United States Patent Application Publication US 2019/0348154 A1 - sequence listing, part 48

SEQ ID NO: 177610 - DNA, 1068 bp, Klebsiella oxytoca
atgaaaaagtcaccattagcagtagccatgaaaaaacgtatcggcggaaatgatgagatccagaaagtcgagcaatggctggacaccggttttcccccgttaaacgaagccgtttctggtgatctggaaggcggtcttccttgtgggcgtattgtggagatttttggacctccgtctgcaggcaaaactttcctcgcaacccgcgcgatgattgcagcgcagaaggtcggaggtatcgccgtattcctggatcatgaaaacagttttgacgttggcctggctgaagttatgggacttcaatctgatgaagatgaaggtaattgggtctataagcagccagacacctttgaggacgccatcgacttgaccgggcaaatcttatctctggttcgcaaggagagtctgatcccagctgaagcgcccatcgtcattgtctatgactcgctggcctcaatggttccgcgccagaagttcgagaagttcgagaagatggcggatggcacggccaaagagaaagacgagctgaatatgaacgacaacacggcactggctcgcgcgacttcggcaaatctaccaacgctggctaagtgggcgcagaaatacaatgcctgtctcattttcctgaaccaagttcgtacaaaaatgggcgtaatgttcggagaccctaccacttccccaggcggcgactctccgaaattctacgcttccgtccgcatcaagctgggtggcggtcagttgaaagaaggcggcgatcgtgttggtcagttggttaaagcagagtgcgtcaaaaacaaagtggcgccaccgttccagaaatgtgaatggaacttctacttcgacccttcgcgtggtctggacgtcgtagaatcgcttgtagagtacatgcttgataagggatacattccgaagacgtccaccgggcgcatcgagattggcgacaagaagtatacaaagtcccagatcgtcgatatgtaccgcgagaaggatttgagcgaaatcgtgaaggctattaagtcgattcaggcgaagatgaagtcaaaggacgaattagagccagctgacgcgtaa

SEQ ID NO: 177611 - DNA, 261 bp, Klebsiella oxytoca
atgattgcgtcaattattactggaaaatcgactacgccgaccgggctggcgaaggagttagtcttcacctatggcgagtatgttgtgtctgattttaacgcgtgcatcgtcggtcacaaaatcgctctgacagcacgtgaagtagatatcgtgaaaggccatattctcaccatcattgagcgatccgcaaaaatgatgaactgcgacaccatcacgtttaatcgtgaacaagccgagaaagaaatcggcataactaaataa

SEQ ID NO: 177612 - DNA, 963 bp, Klebsiella oxytoca
gtgaacattttaataatcgacggaaatagcctcggttactaccaccagcagcaaccaaaaaaactccatagcggcgatatggagacccacgcagtgtttggttttatcaccaacatgcgccgctatgcttcgcttctgaaggctcgaccaatagttctgtgggatggtttcagcgacaagcgtcgcgagttttacccggactacaaagccaatcgtgacgacaacgcagaaatgaaacagatgaaagaaggttttgcagtccaaaagcccttcatcaaaaaagcaatcacctcgctgggtgttgatcagattactgcaatcgacggtgaagctgacgatttggccggaattctgaagaagcgttatgttgcgtcgaaagacgtcgagcacatctacctgttaaccgcggactccgactggattcagctggttgacgaaaaggtaacatgggtcagtttgcgcgaggatgctaagcataagcgcatcaatatcgaggcgttccctgagttgactggctacccaacgccacgcggctatctggaaggtaaagcgctgcagggtgacaagtcggacaacattcagcaagtcggtggcattggtgacaaaggcgcgatggatctgattaacgagtatggctccattgttacgctggttaaggggatttgcgatggatctattgtcatggacaaaggtcgcaacaaaacggcagtgaataacctggcaaagaacgctttcaatgagaaaaccggctgtcggatgcttgaggcgtttatgcgaaatattaagttgatggatctcatcgacaccaaattcgccccggagaaactggagattattcgcggtgagcaaagcctggaaacatttaagcaaatctgtatgcagttaagtttccagtcaatcatcagcgatatggaaatctttgtcgtaccgttcgtcaaacgctgcgggttggtggctgaatga

SEQ ID NO: 177613 - DNA, 978 bp, Klebsiella oxytoca
atgtccgctttaatgaacctgctgaagaaaagccaagaagttgcgaaaaacgcacgcggcaatcgcggaaacgatctgcaaaagatgcaaccaggcgaaaactacgttcgcatcatcctgaacaaagacgaccctgacaatattccattctcccacaagtacggcattcactatgccaaatctaaaggcgaagatgggaaggacgtatacagcgctcatctgtgctttcagcatacccatgataagccgtgcgaaatgtgcgaaatggttatggaagctaaagcgaagtacaaaggcaacaaagccatggaaaaagtcattgacgatatgcgtgcctctccgcgcatggctgttgtcggcatgtggtctcagaaagaagacttcagcgacaccgacaagacttctctcatcgatatgcctatgtccgtgtttgacgacctgatggacgccattatgcaggatatgaacgatgagatcggcgaaccgctgagccgcgaaaaaggttacgcgtatcaaattactcgcaccggatctggtctggatactgactacaaagtcaaaccgatgcgtaaaaataaaacagccgttccggctaagttctgggacaaccagccgtctctggaacagtttgtaaaccagaccgatccgacaaaactgatggcgacctccaaaatgattgctcgcgcgaccggaatcgcactgccagcgtctatgggttcaagcgccggcgctctgccaaccccaaccggcaaagcagctgcatctcttccaggcatgtccattactggcgtagatgactcaactgccgaagcctctttactggataaagaagttgaatacgcgaaagaaaccgtattcgaaccagaagagaaagaggtaaaagaagtaaaagaagcgccagcaagcgagccagcagctgagccggaaaacgaagatctggatgacatttacgcgcaacttaacgcgctttcaatgtaa

SEQ ID NO: 177614 - DNA, 441 bp, Klebsiella oxytoca
atggataaggcgatcatcaaagaagtgatggatgacatcaggcttgatacgcatgatttggacgctgtctggcgtcgtcagccggagcttgtcgccatttatggttttaaacaggttgaggctgaaagcgccgcgaatgctgcaaagcgagatttagaatccatcgaagcgcgtctctattcgacgacgcgtgccggtctgagtttcgacggtgtgaagatcagcgaatcgacgattgaagccaaaataaagtcgtctccggcgtatctttcggctcgccaaaagtacgatgacgcgaagtacctcgctgagttttacaagcaggttgttaacgcgctcggacaccgtcgagacatgatcgttcaggcgtctaaaaaggcaatttccgaatacgaaagaacaggtgttgaacgattcaacgcccctaaaaatgtatcttga

SEQ ID NO: 177615 - DNA, 165 bp, Klebsiella oxytoca
atggatttaaccattccaatgttcgttttagcctacttaatcgctggcatcggtttcgcgaaaatctggtctgaagcggcgagttgcggtgatgttgagctgaagataatcggctgcatcttctggccgattggactgtttattagcgctttctggagctggtaa

SEQ ID NO: 177616 - DNA, 423 bp, Klebsiella oxytoca
atgagtgaggttacagtgtcacaggagtttatcgataaggccattatcgctctgaataagtcggcattctgggagtttgcagactgtcccgtcaccattcgtctcgctatgcggcaggcggagcttgatgggcgccgggcgaatagcgcagcacgtagcgcagcaaagataattctgaagcgcgtgcgcgacccgatggttcgagattatgtcgctgtgatagctaaatcaagcaatgtcaaaaaacaccttgctgagtttgaggcttatcgagaccgactgatatcaaaggttgcggaggaatttgtcgaggtagataaagcggccagcgtcaaagactaccgtctccagcgtgctcagcgtatagccattaccgggcgcggagtcggaaaaagaacgctggcagaaatgtacgtagcctaa

SEQ ID NO: 177617 - DNA, 1161 bp, Klebsiella oxytoca
atgaagattactaaaatcatctcagagaagcccggactcagcgaatcaaaagcaaaagaggtctgggatgctttcgagaaattcggttcgtatggctttaacaaatcacacgccgtggcctataccgcaatcagctaccaggcaatgtatctgaagactcaccatccggctgcattcttcgccgccgcactgacaattcaggatgatgaaaaacaccgagctgttgtaaaggatgcactggcacgcggcgttatcgtgatgccgccagacatcaatctctcaactgaccgcatcgaaatagtcgaactgaaggatggccgggcagcgttatatgcccccttctcagctgtcaaaggttgttctgaaaaaggcagcttagccattatgcgtgctcgcgagcgtgtaggtggtaagtttgagtcgcgagcacaattcaaggaagcgatagaggccagactttgcaatatccgagttcaggaggctctggaagccgttggtgcatttgccagtattgagcctggcagcgaaccggcgatggcagaatcccgtcgcaaggctcaatcagagctgatgggaagcctcattatcgatgcggtaaaagtgagtcgcccgttcgagatgaatccgaaacgccaggcagaagtgtcgatgttgatggaagagctgcgtaaagaggtcggggtgggcgaagatctggttactccgcatatcggcgtatcgccaaaaataatgattatcctcgacacagcaaacggcaacgatatcaggacggggatcttcatggagaacggctacgaagatttgaaggctaaaatgctcgttaatggtgatctgcgcatgagcgaggtgtacgttaccggcgtcattaagcaagataagaagttgccactgtcccgcgacgcagagaacacctacatcgagtttatgaagaaagagcttgagctggttaaaccaacctacgtcctgacgtgtggtcgcctatcggccagtctcttcaacgacaaaaccaaggcaacggatttggtcggacgtaaggaatactttggcgcaatggacttgaccgtgttttacggattcaatccgggcatacttcacttcagaccggaagaaggtgagaaattggagcttattatggaagacattaaggaggcattgtcatga

SEQ ID NO: 177618 - DNA, 2373 bp, Klebsiella oxytoca
atgaaggcattaatggtacgcaccgatttttctcttggtgaatcggcgctgaaagcaagccgcgtagcgaaggctgcgaaagagttaggttattcagccattatcagcgcagacacaatgagtctggcttcaatcatcccgctgcagcagtcggctggtgatgacctggctgttatttgcggcgtccgtctggtcattagtgacaatccgctttatgaaggcatggtcagaaaagccaaagaggaaggtacagagattccggtatgcaagcctggtcgtctgtacagcttcaccgcgctgataaagaacgatgaaggatacaaagatctctgtgagctgatgacgttgggcaaccgccgcgagcagtttcactttttcccgcgcatctcgttggagcagctggccgaaacgtattcaaagggcaacatccttctactgacgtctgatcgcgatagcatatttcatcggcaggacttcgttaaaatcctgactaaattgctggaggttggtgggcgtgacaacttctacagcgttgtgtatccgattgctacgcctctctacgatcagttgaacatgaaggcgatgaaggtggctaatgcgcttaaaatcgcccctgttgcgttctatccagcttattacgagaaagaagaggacgcagacctgcgcgacattgcgcatatggttatcaataacatcaaaacggatcagccatatcgttttcacatcccacaccagcgcgacaactctatccagaaccgcaagcatttgctggttcgcttgatggaattctcgaaacgcatgggtatcgagggtattagttccgcgatggttaacgagactcaggacgaaatcattgcggcgtgcagctggcgctggcatgagatgccggtcagtctgccagttatggcggaagatgagggtgatacgttgacgcgaatggcggcagaaggattgaagcgtcgtttaacaacgcttgaatttggttggaagccaccggcagagcagtatcaggtttacatcaaccgtttacgttatgagttgagtgttctgaaaaagctgggattttgcggctacttcctgatggttgaaaatctactgtcatgggcgcgtaaacaggatatcccggtcgggccgggtcgcggatcgtccgccggttcacttgttgcgtgggcgattggaatcaccaacatcgacccgctacgccacggtctcctgtttgagcgctttatcaaccctgaacgtctggatttgcctgacgcggatttggactttagccaggcgctccgcccccgcgttctcgaatatcttgaagagcattacggcgaaaaatatgtggctggcattccaaacttctcttatctgggtatggcgtcggcactccgagacacagcgcgtatctacggcgtgtcaacggaagatatggcggtatctaagcagctgaagccattcgatgatgagggattaactctcgaagagacgcgcgagcagctgggcgccctcgacaaatacgcgaaagcaaacccggaagcattcgacgccgcgtgcaaactccagtcactgatgcgcagctatggtaagcacgccgcgggtgtcatcgtttctggcgtaccactgactgagcgaacaccagtcgagttacgcaacggggtgcgctgtatcgcgtttgacaagcgtttctgtgaatcaatggggcttatcaagctggacgtgttagggctggctacgctcgatctactggctctcgctaaacgctacatcaaagagaacgaggggatcgacgttaacctcgacgcaatccctctcgatgataaacgcgtccttgagggtatggcgttgggtgaaacaactggcgtgttccagttcgagtctggcggcatgagaaacctgcttaaaaaccttggaagcggcatcaaaccaatgtcgtttgaaatggccgtcgcaactaccgcgctatatcgcccaggcccaatgcagtccggcatgatggacacctacgtcagcgttgcgcgtggttatgaggacgctcactcacttcacccaagccttgacgaattgaccaaagaaaccaacggggttttggtctatcaggaacaaatcatgaaagcgtcgcagatcctcgccggcttctctctgtcggaagcagatatggtaaggaaggcgattggtaaaaaagacatcgagaagatgaaaaagattggcgccgacttttcagatcgtgcgcagcttggttggttggaagtccagactgacgacggccagattgtcactgttcatcgagccgcgcttcatccgtgctctgatggtaagaagcgcactgtcgagcaagccatgaaagaagatgccgacattattgaatttgacacctctaagtaa

SEQ ID NO: 177619 - DNA, 1251 bp, Klebsiella oxytoca
atgtcggtcgaattgcagaacaaaacagtcgctgaacaagaaaaatctcgcgagatcgaagaaaagcctattttgtgcaaatggtgtggcggcgagacccatcatgtcggttctcatttcattggaaaaaaatgctctagcatcccgaaagagcacgaaaacaagacgcctaatgaattgatgaaaatctatgttgctgcatttcctgaagcgccgactatgtctgcagctgccgccaaacgtctgaaagagcaccaggtcaaaaagaaagaagagccatctgtgactcacgtcggatatgccggtttcgaagactacatggtcgaaaaggttgcagtgcatgaaatactcggtctcgatgctgacttattgaagacggcatctggcgaacctttgcgcatcaccgtaaacatcaacaagccattcccggaattcgtgccaaaagcgaatcctgactatgtgttcggcgacatcgagttgcttaaagacgtgcttatgatgatcgagatgcgtatccctgggtatctatggggtcacgcaggaaccggcaagagcacgctaccaactcagctttgcgctcgactaaaccgccctatcatccgtgcgcagcacaccgcgtccactgaagagtcgcatatctgcgggcaaattcttgtgcgcagtggtgcgacttatttcgagccaggtcttctggcaagtgcaatgcgtaacgggtgggtttatctggcagatgaatatgatttcgcgttcccgcaaatccttggcgtttaccagccagtgttggaaggcgaaccactgatcatcaaagaagcgaccccggagtggcgctacgtcgaaccgcataaacgattcgctttcatcggaactggcaacaccaatggttccggtgatgaaactggattgtatcagggcacgaatatccagaacgcagctaacttctctcgtttcggcatcgtctcacacgtcaagtacatggacaggtctcatgagtccgcgatgctggagaaaatgggtttaccgaaagtgtacgcgaccatgcttatcgatttcgcaacccgaatccgtagcgggtatgaggcaggaaatattagccaacccatcgggccacgtgaactgcgcaatgcagcagtgattggaatggcgcacaaaaacttcaagaaaggcgtgacgaagtctttcatcaataaattaccgtccaccagcgcggtatccgcaaccgagatagcgcagcgcatctttggtgatgaataa

SEQ ID NO: 177620 - DNA, 1989 bp, Klebsiella oxytoca
atgaaaaagacttcagttaaagatatcactaagtttcgcgaagcgattaaaaacgtcgtttcaatgctggttgcacgcaacatccccgtcatagaacgtggagataaagcatatgttgaatacaacaaagccggcgaaccactctgcatctgcataccatcaatacccgatgacgccagcgacaaatttctgatggcgatacgcggattcatcgaccacgaagtcgctcacgtccttttcacagacagtacaaaagccaccagcttcgtctggaacgccgtagaagataccttcattgagcgaaaaatgggagagatgctcaaaggctccagagcaaacctcatcaacacacaaaagcatgttatcgatacggttttcattcctaaagaaatggaggctatcgctgaaaagctgggcgatcagacccgtatgtttatggagttctatcttgttcccgtgctgcgtgcgtggaatggccaaataccgttcatcgactacatggaagaccgctgggagcgcgttaaagagcctgtatcaatcctgattaaacatggcgtcgataagatgatccccaaaatatgcagcacgagagatagtgtggcagtggcctcgctaattgtccgactactggtcgacaagccaatggaaagtgaagacccaggtgaatcaaaggaaaatggggaaggtaaaggaaagtcttcaagcgaatcgtctaatgacgattgcggtgatggcgatctaccctggcatggcgatgatgagcctgaagatagtgaggaaaaggattccccaggatcagttgataacgaagagggggaaaccgaatcggccgacgacggagatggcggctcttcacagtcagaagaagacaaaaaggctgatggtatcggagacgaacctggcgacccggaaagcggagcgagggatataccaaaaccaacgaaaggtgatctggaaaagctggagtcaaccaaacttccaaaaggcgccatggatatgtctatggaaggggcaatgaagatgattatttccagcgaatccgaattgtcgaccggctatcgtccgtatgagcgcacttacgactttatggggaggcttgagcacgcatcggagttcttcagaaacgttctggccacttcgccgaaagggttccacatgtacggtgacgctgataactacatggtgatcccaaaacatgaggccgtcttcaataagaatattaagcctctaattggcgatgacatcgtcgcgacactcgctaaagaccttgagcgaacgatagccagccagaaccgcaatcagtttgttccaggtcagcgtcgcggccaactgcatggcccaagtctgtatcgcctgtccgtcgatgatgaccgagtttttcgcaagctggaggtcaaacgcgcggtcaactcatgcgtgcagattgttattgatatgtctggctccatgagagggcaaaaaatcaagacagcttgtgcagcagcctacacactggcggatgcattggcgcgtatcaacgtgaaaactatgataaccggcttcacaacatcttctctggcgatgcctgggaagtccgagtttaaccgctctgaagcgctttttctgccaattatcaaggggtgggagacgccgatatccagcaaacaaacgatatgcaacctaggtgctctcgcaggtacgatgatactggctgaaaatatcgatggagaaagcatactggccttgcttcaacatttctctggccgccaggaagatcgcaaaatcatgattgtgcttagtgacggaagcccagcggctcaggggcgtggtttggttgggcacctgaaaatggtcacaaaacagattgagcaggataccgatatccatcttctggggatcgggattttgacagacgctccgcgtcacttctaccgcgacaacatctgtctgaacaatgttggtgatttagccgaaacgctcatcaagcaaatgcaacgcctactttcgtag

SEQ ID NO: 177621 - DNA, 219 bp, Klebsiella oxytoca
atgaatgcaattttgaactggatgtcgtcggcgacaaaactatcagcaatatctctgagtgaccagattggagccgatatcatttgcgaactgggcgcgaaagatggacacatagcagactccgatgatctttttttctatattaatcatctagataaggattttgctttagtacagggaatttcgagctacactctcatttgcattcacaccaactaa

SEQ ID NO: 177622 - DNA, 306 bp, Klebsiella oxytoca
atgtacgaacccaaagggcgttaccgtccgtttatgaccgcagcgatgctcacctgtggcaaaacacaagctcagattgcaaaagaagttggatttgagaacgctaacaacatttctctcatcaaatctggccgtgctcatctttcgttagacaaggtcatcccattcgcgagagctgttggtgcgccgccagacgattttatgatgatgtacttatccgagagattccccgaaatctatgaatttgttaaaaaaataaagaatgaaaatgatgctctgaagagcaagttaggcattactgattga

SEQ ID NO: 177623 - DNA, 1035 bp, Klebsiella oxytoca
atgttaaattcgttcgaaatcgataaagctttggaaaattgttctgctgaaacagttcaatatctccagcgctgccaagccatgaccggttcgcaaatgatgaccatggatgccgattcgaaattcagtgaagcctttatgtttttcacgcgcttatcactccttgtgacgcgacggcgcccagagctaggtgttcactgtattctcgttcacgcaatgccggcgatcggcaacaaaaaagtttcggatatcaaccgcctcacagttaacagactaattaatgccctggtgttggatggcaagttagtacaaagccggcgcgttttttctgttttaaaacagttccttgggtggtgtgagttccagggtgtgatcgagacctccccacttggagcgatgtctcttaacaaagtagccggtggactgaagccaagaccgcgggagcgagtgttatcggatgatgagctggaaaaattttggcacatgtgggactttgctgacgtttcagagagcacacgttgggccgcgcgtttcgtgctctgctcagccagacggccggatgaagtgcttcgggctaaacgagctgaattcgatctcaataatgatgtatggaatcagggtagtaggaataagtctggccgtgaacattctctacctattagccccataatgaagctgtgcattgataaaatgatggccgcatccgggaacagcgattggctggttccctccccaaagaatgcaatgaagcctgcatctaaggttctgatagctcaggcatcaagaagaattatgagtagaggttatctttccgataaccttccggcacccttcgaaatcagagatttacgaaggacggccagaagtacactctctcgactcggtgtagagcaagacgtggctcgtaaaatcatgaaccacagtcttgagggaatagatcgcgtctatgacagacacgactatcttggccgaatgtccgaggcaatgtcagcatactctgaattcttaattgaaacatgtaagatcaatcagtaa

SEQ ID NO: 177624 - DNA, 417 bp, Klebsiella oxytoca
atggcattgattgtcgaatttaacccggatacaagatccgagtttttagacccaactttcaaaaagtaccccgatttagaaagccaactcaaagccgaatttatttattgtaagacgaaaaacgtcacaacgaatattttcggcaacgatgccattttcactttcccctcttacgcagtagaggcacagttgtctcgcgttcatatcaagctgccgagcgaagcgccgtggccccacggcatacccgatcgtcaaaagaaaagtaacacgtacctggtttacacccagcatatgtggaacccttcgagctattccattctggctcttgtaactccagcgcatgacctaatgagtgcagcaaacactcgactaatttctcgcttttcagcctacgcagaggcttttcactcccgttaa

SEQ ID NO: 177625 - DNA, 384 bp, Klebsiella oxytoca
atgtcaaacatcaataagatgaatgaggtaactgcagaaggtcgtgaactttacgcgagaattgatgaacttgcagaacgcgactatgaagcggcaaaaatggctgctgaggggatgcgtgcagacatcatcggagccttggctattgctgaatttttattccaggcactgccagatgtttcggtgatccgttcattccccaaagactcgatgcagtacaaactttgcagagcggtcgcagaagcacgacacaatgccaaaaatctggacaacctgttaaatcagatactgaacgtcagcccgtatcgtgagtcaaacatcaaccacgatgcactgacattactagcggaacgtggtacaagggctgcggctaaatggcattga

SEQ ID NO: 177626 - DNA, 321 bp, Klebsiella oxytoca
atgtttgatagattatccccagagcaaattcgcgagttcctgctggaacaagggtttttgagagtacgccagctcgaagacagtagttggatcggtgtgctaaggcttgcttttacaacgtcggtctgtatggatattgacgaattttcgccctttcgttatcgctggtgtttcgctgacccagcagaggcaaaccactttttcgagacggccgtagattatgacgaagtgccgacgaagcgcgattcgttgaaggggcaccggtatcgtggtgagccgcttctgcgtgaaaaggatgaattcggctttgataggtggtaa

SEQ ID NO: 177627 - DNA, 3123 bp, Klebsiella oxytoca
atgacgcagcagaccagaaccatcgccgaatccaataacttcatcgtgctggataaatacgtcacggaatgggaagcgagtgaccgttaccagagtgaggcggagttagagcgtgagctgattcaggatttacgtaatcagggttatgagtttgtgcctgatttaacctctcagtcggctatgctggccaatgtgcgggtgcagcttcaggcgctgaatcaggtagtgtttagcgaaggggagtggcgacgatttaccgagcagtatctggataatccgggtgatacgatagtcgataaaacccgtaaaattcacatcgattacatctgtgactttacctttgatgacgggcgactggaaaacatctacctgattgacaagaaaaaacttgttcgtaacaaggtgcaggttatccagcagtttgagcaggcagggacacatgccaatcgctatgatgtcacggtactcgttaacggtttgcccctggtgcaaatcgagctgaaaaaacggggggtggcgattcgtgaagcctttaatcagatacatcgctacagcaaagagagctttaacaccgagaactccctgtttaagtatttgcaggttttcgtcatttcaaacgggacggacacccgttactttgccaataccacaaagcgggataaaaacagcttcgatttcaccatgaactgggcgcggtctgataacaccctgattaaagacctcaaagacttcacggcgaccttcttccagaaaaacaccctgctgaacattctgtttaattacaccgtgtttgatatcagcaacaatctgttgattatgcgcccttaccagatagcggcgacggagcggattctgtggaaaattaacgtggcgtatcaggcaaaaagctggagtggtaaagaggggggaggttttatctggcacaccaccggctcaggaaaaacgctgaccagctttaaagccgcaaggctggcaactgaactggatttcattgataaagtcttctttgtggttgaccgtaaagacctcgattaccagaccatgaaggagtatcagcgcttctcgcctgacagcgtgaatggctccgacagcaccgccggactcaggcgtaatctggagaaggatgacaacaaaattattgtcaccaccatccagaagctgaacaatctgatgaaaggtgacgcagatttaccggtctaccagcaacaggtggtctttatcttcgatgagtgccaccgcagtcagtttggtgaagcccagaagaacctcagaaaaaaattcaaacgtttctatcagtttggctttacaggtacgccgatttttgtcggtaaaaatgcattgggggatgaagataccgccagcgtcttcggggcagagttgcactcctacatcatcaccgatgccattcgtgatgaaaaagtgctcaaatttaaagtcgattacaacgatgttcgcccgcagtttaaagcgctggaaacggaaacagacgagaagaagctcagcgccgcagagaataaacacgctttgctgcatccgatgcggattagcgaagtcacgcattacattctgcaaaacttccgccaaaaaacacaccgcactttcgccggtgcaactggcttcaatgccatgtttgccgtcagcagtgtggatgcagccaaagcctactatgaagcattcagaatcatccagcaggcggctattgaacaggataagagctacaggccgttgaaggtggcaaccatcttctcatttgcggcgaatgaagagcaggatgcggtcggtgatatcaacgatgaagggtttgatatcacggcgatgaacagcagtgcgcgcgagtttctggagtcggctataggggactataacgcgacgtttaagaccaaccacagcacggacgggaataacttccagaactactatcgtgacctctctgagcgcgtcaaaaagcaggaggttgacctgctgattgtggtcgggatgttcctgaccggatttgatgccccgacactcaataccctgtttgtggacaaaaatctgcgttaccacgggctgatgcaggctttctcacgtactaaccggatttataacaccactaaaacctttggaaacattgtgaccttccgtgatttagagcaggccacagtggatgccattaccctgttcgggaaaagtaacacgcgaagcgtggtgatggagaaaagttatgacgagtacatggaaggctttacggacacgctgaccggagaggcgcggcgtggcttcatggatatcgtgagcgagctggagacacgcttcccgaaccccgcagaaattgaatccgaaaaagagaagaaggccttcgttaagctgttcggggagtatctgcgggcagagaacgtactgcaaaactacgatgagtttaccacgctgaaagcactgcaaactgttgacctcagcgacccggttgccgtggaagcgtttaaaaccgggcactatctggatgatgaggcttttgctgcactccagacggtgcgcttacctgctgagcgtaaaattcaggactatcgctccagctacaacgatattcgtgagtggcagcgtcgtgaacgtgacgctaacaccaaagataaaaatagcgttgactgggatgatgtggtctttgagattgatttgctgaaatcgcaggagattaacctcgattacatcctggggctgatttacgagcatcatcaaaagagtacggataaagagacgctgaaagaggaagtgaagcgcttaatccgggccagtctggggaaccgtgcaaaagaggggctgatggtcgattttatcgaacagacgaatctcgatgccctgccgggcaaagagggcgtcattgaagccttctatacctttgcacaacaggctcagcagcgtgaggcagaagccttaatcaaagaggaaaacctgaatgaggacgccgcccggcgctacatcagaaattctctcaagcgcgaatatgccacggagaacggcactgcgctgaatgaaacattacctaagctcagtccgctgaacccacaatacagaaccaaaaagcagacggtctttcagaagttcgtggcctttatcgataagttcaaaggggtgggtggaaggatctga

SEQ ID NO: 177628 - DNA, 1278 bp, Klebsiella oxytoca
atgagtgagctgagttatctggaaaaactgctggaggggattgaggttgagtggttccctctcggtaaggttgcaaaaaaaatttattctggtggcacccctgatactaaaaaaatagaatattgggagcatggaactatcccctggatgagttcaggtgaagtaaatttaaaaaccatcaaagaaactgagaaattcattactgaggatggattaaataactcaagtgctaaatttgttcctgaaaattccattgttatggcattagcaggtcagggtaaaactcgtggtaaagtagcaagaacccgcattaaattaaccaccaatcaatcacttgcagccattacatttgatgagcggaagatcaattcagattatattttccacttcttggaaacccagtatgataatctacgtcagatatcatctgggaacagcgggcgtggtgggctgaatcttcaaatgatttcagcatataaagcccccattccttgcccgggcgatccagaaaagtcccttgccatccagtctgaaatcgtccgaattctggataaatttaccgcccttaccgctgagcttaccgctgagcttaccgcacgtaaaaaacagtacaactactatcgtgaccagttgctgagttttgaggaaggtgaggttgagtggaagacgttgggggatgtaaccaaaaaatggtattcaggcggaacacctacggccggaaatccagaatactatgatggtggtgacattccatggctaagaactcaggaaattaaattttcggatgtttgcgaaacggaagttaagataacagcggcagctttaaagaaaacatcagctaagtggattccagaaaattgtgtgatagttgcaatttcaggtgcgacagccgggcggtctgctattaataaaatagcgttaacaacgaatcagcactgtggctgtctggaaatagatagcaaaaaggctttgtatcgctacgtatttcactgggtcagttttaactatgaaaatattaaagctttggggcagggagcgagaggagaccttaactctacaattataaaaaatttcaagttgccgattccctatgctgatgaccctgaaaaatctttagaggaacaagccagaattgttgctatcctcgataaattcgacactctgactggctccatttctgaaggtctcccccgcgaaatcgaactacgccagaaacagtacgaatactatcgggatttgctgttcagtttccctaaacctgattccgtaacgaactga

SEQ ID NO: 177629 - DNA, 1557 bp, Klebsiella oxytoca
atgaccagcctgcaacaacgcgccgaattacaccgtcagatatgggctattgcgaacgaggttcgcggtgccgttgacggatgggactttaaacaatacgtcttaggggcgctgttttaccgttttatcagtgagaacttcaccagttacatcgaagccggtgatgacagtgttcagtatgccggaatggctgacagtgatattggtgatgagattaaggatgatgcggtcagaacaaaggggtattttatcgcaccaagccagctgttctgtaatgtggcgaagcgtgccaatacgaatgaccacctgaatgctgatttaaacagtatctttgttgcgattgaaagctctgcatccggttatccgtcagaagccgacattaagggactgtttgctgattttgatacgaccagtaaccggctgggcagtaccgttaaagagaaaaatatccggcttgctgcggtactgaaaggggttgaggggctggctctcggggattttggtgcccatcagattgacctgttcggtgatgcctatgagtttctgatatccaattatgccgccaatgcgggtaagtccggcggtgagttctttaccccgcagcatgtctctaagctgattgctcagctggccatgcacggacagacctccgtcaataaaatctatgaccctgcggccggttcaggttctctgctgcttcaggccaagaaacactttgataatcacattatcgaggacggtttctttggtcaggagattaaccatacgacctttaacctggctcgtatgaatatgttcctgcacaacatcaactacgacaagtttgatatccggttagggaacacattactggctcctgaatttaaagacgagaagccgtttgatgcgattgtgtctaacccgccgtactccgtgaaatgggtgggcagtgatgacccgaccatgattaacgatgaccgctttgcaccggcgggtgtgctggctccaaaatctaaagctgactttgcattcgtactacatgccctgaattacctatccgcgaaaggccgtgcggcgattgtctgtttccccggtattttctaccgtggcggggctgagcagaaaatccgtcagtatctggttgacaacaactatgtggaaaccgtgatatcactggccccgaacctgttcttcggtaccaccattgccgtgaatattctggtgctgtcaaaacacaaaaccgataccaaagtacagttcattgatgccagtgcattgtttaagaaagaaaccaacaacaacgtgctgaccgatgcccatatcaaacagattatgcaggtctttgagagcaaggcagatactgaccatctggcgaagtctgttgcggctgacgatgttgctaagaatgactataacctgtctgtcagtagctacgttgaagctgaagatacccgtgaagttatcgatatcacggtactcaatgctgagctgaaaaccacggtcagtaaaattgaccagttacgcaaagatatcgatgcgattgtggcagagattgaaggtgctgaggtgaaggcatga

SEQ ID NO: 177630 - DNA, 252 bp, Klebsiella oxytoca
atgtttactgaaactgttctagccaagcacacatcttccattagcgagtttaaaaagaacccttctgccgctatgagcgagtctaatggcgagcctgtggctgtacttagccacaataaacctgctttttactgcgtcccaccagcactgtttgctcttatgatcgaccatattggcgaccagatgcttcttgagaaggccgtgggtaggctggacgatgaagaggttgaagtcagcctggatcagctgtaa

SEQ ID NO: 177631 - DNA, 279 bp, Klebsiella oxytoca
gtgacaaaagttaaattaccgcagtaccaaagcatgaaaatcgttatttatggaaaggacagctgctcttactgcaaacgtgcggtagagctggccaagcagttaaaatctcagggtcatggtgactatgagtatatcgatatcgttgaagctggcattgatgccgctgcgctgggtgagctggtcgggaagccggttcgaacggttccgcagatcttcgtcgagggcgagcctatcggcggctacacggaactggttactttaacctccatcctgtaa

SEQ ID NO: 177632 - DNA, 768 bp, Klebsiella oxytoca
atgggtacatcacgcaaacatgcgcgtaaggtagcgcgtaaagcagtaaaagagaatcgtgcgttccgcggccgtcgtgttgattacgttattgtcgatgagctgaccgacgctcagaccccacgaccaaagcgagacaatacgccagttgaggctcgtaacgaggctcaggcgcattatcttatcagcatcgaaaacaagcctctgacgttcgccaccggtgaagccggctgcggcaaaacgttccttgccacggctgtcgccgcgcagaagctgttggataaagacgtccgcaaaatcatcgtcactcgccccgtattacaagctgacgaagatctgggcttccttccgggcgatgtgggtgagaagttcgccccatacttccgccccgtctatgacgttctccagaagcgtctgggcgcatccttcctcgaatactgtctcaagccagagattgccaaagtagaaatcgccccgttcgcttacatgcgtggccggacgttcgaaaacgcagtggttattctggatgaagcgcaaaacgttacaccgtcacagatgaagatgttcctgacccgcatgggtgagaacgttacggttatcgtgaacggcgatgtgacgcagtgtgacctacctggtaataaagagtccgggctatccgacgcactgcgccgctttaaaccaaacgcgcacgttgggttgattgagtttgaagccgacgattgcgtccgctctgaactctgcaaagtggcattaaatgcctatcaataa

SEQ ID NO: 177633 - DNA, 612 bp, Klebsiella oxytoca
atgtctgaagtaaaaaaggttattaccgtagctgagcgttctactaaagcgctggttaaagttgttgccgacggccaaaaactgttctccgatctggcgtctttagccgcttcaaccgtaactctgactgaagaaatcgaatttaagcagggccagttggctgatatcgaaaaccagatcgctgcctccgagcgcgaatccaaagcccagctgcgtctgcgtgtaatcgaaaacgaagacaaggttctggccgagttgatgaaagcacgcggttatgccgttatcactcacgctgatctggatgcactaaactccgacctggtcgcggccaaaaccgacaacgagtacgcagtatccgaagcgcatgaagctggttatcaggctgctgctgctaaatttggcgctgagaaccgcgatctggtatcccagcataaagttgagctggcggagcacaaagcccaggctactgctaaaaaccaacgcatctccgatctggaagcacaggttgcagagctgcgcggtcaaattaccgcagagcgcgaaacccgcctcgaaatcgccaaagctgatgccggtcgtgcaggtgttgtagttaacgccggtaagaactga

SEQ ID NO: 177634 - DNA, 249 bp, Klebsiella oxytoca
atgacagactatattttgctcgcatttattctagtttgtattttttacaccgtgacgagagctgtatctcggatcgtcgatatggtgacggttaagtttttcgttaatgacgacatgatggaaaacgtcgtatcgaggttgattagcttaacatctctccgctgggatgggattcgagacgatagaagttatactgtaacaacaaagggttacgtcgtaaccgtcaaaaaaaataaaaaacaaagataa

SEQ ID NO: 177635 - DNA, 216 bp, Klebsiella oxytoca
atgatccagttaagtaagttggaaaaaagcacgcttcgagaaataagccagtgggagagtttctacgaacactggcgcccgaagactcgtgcaaaactggagcggatgggattcgttgaaaatatctcccctgaagggaagcaaaagaattttcagctgacgaccagaggcagggttgttctggctgaacttgtcaacgcaggagcttttagttga

SEQ ID NO: 177636 - DNA, 201 bp, Klebsiella oxytoca
atgataagtgaccttattggctttggtctgtcgacctttttgctgggctttgttttgggtggaatgttttttgtgtcgataaagaaggacagtatcaaggctggggttatggagttcagaggtcgaatctaccgaattgtcgatgtgacctctgaggcaaagggattagctgtgggaggtgtagatgatccagttaagtaa

SEQ ID NO: 177637 - DNA, 1329 bp, Klebsiella oxytoca
atggaaaagttgattgctctgcgtggaaaactagacgccattaaagctatgggaaccaatgccaagaaagtagccctggctgagctggacgcattcgaacaaagcatggtgtcactgatgcttaacccattcatccgattcggggtgaagaaatacagcgtcgcggagccagcgcttgagaataaaatctctgatgaagacgctatcgatattctcaactccttggccagccgtaagctcactggtaacagcgctattgcgatggtggagcaagctatttcagacatgacagaggaagggcaagacgtgttccgccgcttcctgattaaagatccgaaggccggcatcggtattagcctgtgcaataaaatcttcgacaacccgattccggtgttcgaggttcagctggcgacgtcgtacaaagaaaaaggcgacaagtacccgttcaaggaaaacccgaaagccaagttcccgatgattgccagcctcaagctggacgggatgcgcgtcattgccgaagtcatcgttgacgaggcagaggttaacttcctgtctcgtaccggcaacccggtaacgtctctcgaccatctgaagccagcggtattagatttggcgcgtatgacgccgcataagcacatcttctttgatggcgaagcgacggccggttcgttcaacgattccatctcagcactgcgtaaaaaaggcgtatcagctattggcgccgtattccacgtcttcgattacttcttgccggaatggaaagccattgccaaaaccaaggagtacaagaaagaaggccgcaagttaaaagaccgccatatcgacttgtgcagctggacaaactggaagagccgcccggacagtcagtacaaaggcgacgtgcgtttgcatgacttccagttagtacatagccataaagagtttatcgacttgttcatggcggctctggacgccaacgaagaaggctatatggcgaaagatccgttctccgtttatgagtttaagcgcaccaagagctggtggaagatgaaggacgagatcgaagctgacggtgagattatcggcttcaagccaggtaaagaggattcggcattcgcccacactctcggctcggtaactattcgcctggagaacggtgttgaggtcgaggcatcgggcattaagcacatgtacctggatgagatctggaacaaccagtacaagtacatcgggcgcatcgtgaaggtcaatgcccacgaagagacgccagacggcagcttgcgtcaccctcgtctgaaatggccgtcctgtctgcgtgacactgaagaccgcataggggataaggaatga

SEQ ID NO: 177638 - DNA, 471 bp, Klebsiella oxytoca
atgagtcagttcgagccacaagtaggccaagtatgccagatgatctacactaccgcggacgttccgcaatggattaattgcttgccaaaggcagcatcgtctcatggtattgccgtgagcattgacattgtcaacgaaggtgaaagaacactctggttcgacagcttccagattaaccgcaacatcgttttccgcccgatcgttcctgaatgtaagctgtgggccgctaaggactctgacgacgtctacgagatggtgtgccttagcaacgtgcttaccgccaagcccggtttccctttgactgtcattttcaaaaacaaagacaatgagattttctccatggacgccgtcgattttcttgatgcctacgaaccaaaaccgagtgatctaccgatggtagggcaaagcgaacagtgcgacatcctcgattctcaggatgagcctgtcgttgttgcgggagagcttcaataa

SEQ ID NO: 177639 - DNA, 456 bp, Klebsiella oxytoca
atgaaaaccaactttagcaaatttccgtcaattagcggcagtaatagctattcgatgctgtgcgaggaacttctaatcaacggatcgccgacgcgctcttcctatacggtgtgtcagcacaccgtactggcatttaaagagaatcgactcccgcctggttcattcgattcgtgcgcgacagccattcgtgccggcaagtgtcgtgcggtcaagatgatgttggaagaagttaaaacaggcgagcggatttacttcatcgatggcctcgaagagatgcgtaagctgagagaggaaattgagagtcgtgcagctaaaagcgcaacgcgcaacaagcgtgctgcgacgtttggctcaagagtgacgccaaagccggaaatcaaaaaaacaaccgttctcgtcgacatttacgccgaagcggtaaacgcagaagttaataaaacagaggaaaacacatga

SEQ ID NO: 177640 - DNA, 912 bp, Klebsiella oxytoca
atgtatatcaagagcatcgacgaagccgtcagaaaagccattagcgaagcggcgcacatctttaaagatggagatgtagaacggatagttaaagaggcttgtgaaaaggcgaatcaacgcatcagcattaagatgcctgtcaccatatccacccctaacgagccttggatttacatttcgtcaactttaacggctgatcggaacttcgagctgttcgtcatcgtcaaccttactgacgtcgccgaggactatctgaaggcgaaggtgttccaaggtattttttatgcaggaagcccgcggccggcgatgtcactctacgagaagtcgataatgataaaagccgaggattatgaatcatacgtcggccctgcagcggtaaaaaacttcgctaactatatgctggaaagcggcgtcctgcaggctccagagtttgatcgtgtcctgcgctcacttagggctacgatgacgacagaagttgtttcaatgccgaagatccctaaaattgtagatgatacaccagagactgctgccattacggccgtgcattcgagcgcattcgagacgccaggctattctcgtgccttttcacttaaagcacctggcggcatcattgacgcgatcctagaccagaagtcgtctcaggcaaaaaaccgtttcaatgaaagcattgaaatgcagctcttcagcgaatacgacggggaaatggatgagattgagtcggttaaggccgtgtcgaagtgcttcggcggtcttttcgcaagacctggtgaaatgattacccgtcttggttatgacaaagctgccatgctctcagaaggcaaaagctacgctctcgctcacgtccgtgaagcgataaaacatgcagaagtacacagcctcgtcgcggaaaaccctctttggggttcttggtaa

SEQ ID NO: 177641 - DNA, 1116 bp, Klebsiella oxytoca
atgtcagaattaaaagaactaatggaagaattcgactttgagcagtggcttgatacagaggggatctcgtatcgtcgtggctcaaggacttcaaaggggcgtgaagtcaacatccgtgaatgtccgtgctgcaaaagtagtaagtggaaggtttacttcaacctgactactggccttggcaagtgtttcgccggtgatcacccggaggaggtgcagtttaacaagctgaacttcatcaaataccataccggcgaatcatggcgcggattgcagcgttacatccgcaacgaactgatgcagcaaggctggcgcccaaaagaagaagagattgagctaaagtcggatgttgagctgacgtctgaagttatcctgcctccacattatcagctgccaattgaaggccaacttccaacgtatcttgttgatcgtgacatctccccggagctggcgacctactttgatctgcggtactgcgtcgagggtacgcacgtttatctcgatgagcgaaatggacgaccgcacgtccagtctttcgatatgcgcatcttgatccccatttacgatttggacggcaaaatgcggacgtttcaggggcgcgacgttactggtgagtcagatcgtcgttatctctttccaatatcactgccggcatctggcaagttcctctacaacggacacaatgccatcgggaaacgcactgtaatcgtttctgagggcgcttttgacgttatgggcataaagcgtgctctttttgctgaggaatcgctgagagagtatgtggagccgataggaacgttcggtatgcacttgtccggcacgctggatggtgaaaccgaggatcagcttggcgcattcttgagattgaagcaaaagggattagagacggtcgtcatgatgtgggactccgaaaaacaggcaatacacaacacgtttggtgcagccaagcgattagccggcatcgggttacgtgtgaaaatcgcgtgtctcggagaggaaggcttagacccaggcgatgcgacaatcgagcaggttctgaaagcctactatcgagcgaagccatacaccaagatgctcgaaatgatggcgaaactacacggtattaaagcacttctctga

SEQ ID NO: 177642 - DNA, 1362 bp, Klebsiella oxytoca
atgaccactacctcttcagcgcttgagacgcctgttcacacaggacgaccgctatcggaagaatttgacgctgggtttgaagatcgcctgactgcgtactactgccgagacagagagtttctgatcagagccggcgatctggttctccctgagcaattctccaacaaggcaaatggatacctggtcagcattgtggccggctatttccgctcgtacaaaagctccccgtcgaaagagttcatcatcgacatgattaaggaggcgaagaagcgcggaaagattcgagaagagttcgtgcctgaagtcgttaatgcgatgaagcgtattttgaccgagaagctggaagacaccggctacatgattgaccgcgtcgtgacttttgcgcgttcggttgcttttgatgatgcgttcatcaaggcggcggagctgaaggagaaaggcgagtttgagcgtgcgatgcaggtcatgcagaaggtggacatggtcggcgcatccgatatggatgacgtgtacagcttctatgaacgttccggcgaacgacatgagcgtcgcgaatacgaggcgtccgatgacttcgtacctaacagcgtaacaacaggcattccgttactggataaaatgcttcaccaaaaaggctgggggcgtaaagaactggttctgttcatgggcttcgcaaaatcgggtaaatcgacggccatgggtgagttcggcatcaatgccacgctgaaaggctacaacgtcctgtatgtctcactggaggtacataaagacatcctgtcagatcgctgggacgcccgtatctccgaaacagaaatgtcaaaacttattgagcgccgcgatgatattgcggaaaagcttcgctctgtaggtgctgatgggaaaatcggaagcatgtggattgttgagcgtcgcgccaatacattttcacctgcagaccttgaccgcttactcagcaacatgaaagtgaatggcatgatacctgacatggtcattgtcgactatgcggatctgatgcgtgccaccacgccaaccaaagacccgcgcaatgatgtgaaggacatctacaccgacttacgtgctgtcatggataagcatgatgtggccggaatgacggcatcccagaccaaccgtgaaggtggttcctctgaagttgcgacgatgatgcacgccgcggacaacatcgagaaggtgcgtatctgtgacctgattatctctatcaacaaaactgaagaggaagaggccaaaggcgaggcccgtctgtacttcgctggctcacgtaaccagaaaggcggcgttagtttgcgagtgcttcaggatctggaacagatgcgattcattaagcgaatcattgacgttatgtaa

SEQ ID NO: 177643 - DNA, 741 bp, Klebsiella oxytoca
atggacagattattaaacacaccagacggcgaaaagtacgcgttcatgcaggagatgacaacctcagacatggacagatgggtatccgaaaacattggtctctctcgctgctcaggtgagacggagttgtttgcgacaaagtggttcgattaccgcaatatgcatccgctggtagccacctgtcttttctctgaaatctataagatcgagtacgcacgcatcatgctgactcacggtcgcgacgacttccagcgtgctccgtatcgtaccggactaaagcgcgtcgcctatcaggatcacggaatgggggtaaaaacctcgctgtggcgtgctcgccagtttgcggacaagtattgctgttcgtatgagtattacatctcaacgatactgagcatcgcggcgcagcgcctgtgggctaatctccctcgcccccagcatctttggcaagacgatcttgttgagatatttgagcagaagctttcccgccgctctcagatccgcatcgatgacagcatcttcagctaccacaacatgccgcagttggtggccccggaaatgcagaaagattactgcatgtgggtcattaagcacattgacgcgatgaagccttcgttgcgtgtcaatggtgtcctgtcagccgtctatctccgtcgtcttatcccggaagctgtggcagcaaagcggtatccaaagcttattcaggatgctcaaggcttgtatttgagcgcctgcgaagattga

SEQ ID NO: 177644 - DNA, 483 bp, Klebsiella oxytoca
atgacagtgattagttcaaacattaaactatcagctctgttattatttgcactactatctaattcagcatgtgctcaagaaaaatataactctgtgctatccctaccaatgacacttcctggcgaagaaatactagacccttcttcacctaaaatctctgattggtatcagtcctgcaaacgtgctgaggatactaaaaacgctagagattggggttactgcaaagggtatctggactccgccatccagagtcattacgaaaccacgaagaaaagatgcccgaacctttcaatccagaactttttggacgcagttgaaaaagaagcctctgtatatcaagaacataactcaatgccggcgaagggaagagatggaaaggctatgaatggtgtgagagtctacaaaaaaaacactcttacggagtggcagcgcccagctttctctgttctttctggcattattaaaaaggaatgtacactctag

SEQ ID NO: 177645 - DNA, 1206 bp, Klebsiella oxytoca
atgcgcgacgcttatatttgtgacgggatccgcacgccgattggccgctacggcggggcgctggccagcgtgcgcgccgatgacctggccgccatcccgctgcgcgagctactgagccgtaaccctaagttcgacccggcatcgattgatgatgtgattctcggctgcgccaaccaggccggtgaagacaaccgtaacgtggcccatatggcgacgctattggcgggctatccccacagcgtacccggtaccaccattaaccgcctgtgcggctccggtctggacgccatcggcttcgcggcccgcgccatcaaagccggagaggcggatctgatgatcgccggcggcgttgagtccatgtcgcgggcgccgttcgtgatggggaaggccagcgccccgtatcagcgccaggccgagctgtttgataccaccatcggctggcgttttgtgaacccgctcatgcagcggcaatttggcactgacagcatgccggaaacggcggagaatgtagctgaattgttaaatatcagccgcgccgatcaggacgctttcgctttccgcagccagcagcggacggcgcaggctcagcgcgacggtattctggcgcaggagatcgtgccagtcgacattatcggccggaaaggggcggtaaacgtcgtgcgtgacgacgagcatccgcgagcggacaccaccattgaacagctttcgcggctaaaaacgccgttccgccagggcggcgtagtgaccgcgggaaatgcctccggcgtcaacgacggcgccgcggcgctgattatcgcaagctcgcagcaggccatcatccaggggctgacgccccgggcgcgcattgtggccatggcgacggcgggcgtcgagccgaaatttatggggctggggccggttccggcggtacgtaaagtgcttgaatgcgccgggctgaacattaacgacatggacttgattgagctgaatgaagcctttgccgctcaggcattgggcgtgctcagacagctggggctggcggacgatgccccccatgttaaccccaacggcggcgccatcgccttaggccatccgttgggaatgagcggcgcccggctggcattaagcgccagcctggagctgcagcgccgcagcgggcgctatgcgctgtgtacgatgtgtattggcgtgggtcagggcattgccatgatccttgagcgagtgtga

SEQ ID NO: 177646 - DNA, 261 bp, Klebsiella oxytoca
atgttaaaaatactcaaaactccggaagggaaaaggtttctgatggccgtagctttggtgtttgtcgttgcggtgtgcgtggtttcaaaagcagcttttcagggcgtggaagaccagtacaacctgccgatggaaacatgggatgtatcactctttattatccagggcacatgggtggccatttacagtgttatgttcacaatagtgggctcgctcccttttggattttatttcctgggccccaaaaatgaagagggttaa

SEQ ID NO: 177647 - DNA, 489 bp, Klebsiella oxytoca
atgaaaaaagcgctgattgttattgatgtccagaacgattatttcccgcagggtgcgtttccgctggagaatgccggcgtcgcctgcactaacgtcctgaccgccatcgactatgccagacagcagaactggctcatcgtgggcgttcagcacgtatcagctcctgacgcgccatttttccggccggacagcgagggcgtacgccttcatccgcatatcgcggaggccctgggcgatgcgccggtgatccgcaaggggcaggcagacagcttctatgaaacctgcctggaagcactcctgcatgaccaaggcattaccgacgtctacctgacgggtatgatgacccagcactgtatcacccatactgcattgtccccgcaggccagggaattcagtatgcacatcattgccgaagcctgcgcggcgcccacggacgctcttcacgagctggccctgagcggcctggccgcgcgctgcagcatagagtag

SEQ ID NO: 177648 - DNA, 1227 bp, Klebsiella oxytoca
atgccaaaaaatctgaccccatcccattcccgtcacgccctgtgggcatcgatggccgccctctaccttaacggactgctgtatgccgtctggggcgtcaatattgccgtcatcaggatccggtttgacctgtccgaaggcgcgctgtcgctggcgctcgcagccgtggcggtcgggggtattgccaccatggccatggcttcccgtatcgtcacccgtaaaggcagccgctataccgccatggtcagtggtctgctgatgggcggctctgcatcgtttatcctggtgatcccacagttcatgccgctgcttgcgctgctttttgtgttcggcattttcgtcgctgcacacgatatttccgtcaacacccaggtcgcttcgctggagcggctatccggtaaacctatgattggcgcgctgcacggcagcttcagtgcaggaggactttccggtgcactgctgtcgagctactggcagggggcctctttacctgcagaggctaactttctcgtgcctgcggcagcgggagccgcggtcatccttctcacgtggcgattcatgctcccccgggaggctgaaagcacatattcgggcagcgaggacgcatccgctacagggctcgcgggcgagtttcacaaaggcgtgcgtgcacgtctgctgtttctgggcctgctcgccttctcagccctggttgtggaaggggctttttacgactgggccgcggtgtatatgcgtgaagtggttaaggccccggcatcctgggtgggatacggttacgcggcctttgccgtggggctggtcagcgggcggctgagcggtgactggatccgcgcccggattgcacatcagcttcttatcgccgtgggctggatagtggcggcaggagggctggcagctgtactggcgctgcgctcgccggcggaagtggtggccgggttcttctttaccggcctcggtatttcaaacatcattccgctgcttttctcaacggcggccaggctggccgttcagggaggaatgccggcatccgaggggctggccatcaccacgcgcatcggatacatcggcctgctggcggggccgttgctcgtcggaccggttgcggagtttgtcggcctgcgtctgtcgctgctgagtctggggatcgcgctctcattcacctgtgccggatggttgctcctcagccgccggaccgcaggaaaaccctggaacatcagcgtagcgtaa

SEQ ID NO: 177649 - DNA, 942 bp, Klebsiella oxytoca
atgacatccagaagacaattcatacagctgtcggtgaccggcgctgtggccgccgcagcggcatccattcccttcacctcggcagcacaggctgccctaacagccgccacgtccggtaccgccggaaccgtatccgcgggctccggcagcggccgtataaagatcacccaagtgcgtaatgccacgctcattgttaactatgccggcgttaagttcctgatagacccttacctggcagaaaaagaagcctaccctggctttgagggaacgttaaacagtcaactacgcaacccgcgcgtggcgctaaaaacgccgatgaacaccattcttgacgtcgatgcggttattgttacccatacgcacaacggcaatccgcagggcgatcactgggacgaagcggcagtgaagctggttcccaagcatctgcctctctttgcccagcacgaagccgatgcagcgcgcatccgggcacagggttttacggacgtgcgggtgctgacgcctgagtcctccttcaagggcgtatcactcagctggacgccgggacggcacggaacggaagaagcaacggccgtcgccggggaaggactgggcgacgtatgcgggattgtcttccgccataccggtgaagaaacgctgtacctcaccggcgacacacgctggaacagctacgtcagaaaaacgctgaaaacctataaaccggacgtgattgtgatgaacgccggttttgcagtcgcaaccaaccttgatggcatcattatgggcgttgaggacgttaacgaagtggctgaggccatgcctgacgccacccttattgcgagccaccttgaggcggtcaaccactgcaccgtcacgcgcgccgatctgcgtaaattctcaaagctgatgggattcgacaatcgtctacttatcccggaagacggtgaaacgatttccgtctga

SEQ ID NO: 177650 - DNA, 252 bp, Klebsiella oxytoca
atgggcgggatcagtatctggcagctggcaattattgccgtcattgtggtgctgctttttggcaccaaaaaactgggctctctcggcaccgatctcggggcatcgatcaggggctttaagaaggtgatgggtgaagaggacagcgcgccggcacaacctcagaaggagcaggcacagtcgatacagctgaatactgaagcgctgtcgcatgccggacaggacgctaaaaaccgcgataccttacagagctga

SEQ ID NO: 177651 - DNA, 1191 bp, Klebsiella oxytoca
atgcgtaatatgtacaaacaggtcctgatcttggcgggatcgcaggccgtattccagacggtaaccatactgctgatgaccattggcgggctggccggattatatctcgcgcccgatccctcatgggcgaccataccggttgcaatgggcagcctcggtaccgctctggtcatgtttcccgcatcctttttgatgacccgggtgggccgtcgcgcaggcttcctgattggcgcagcatcgggcatcgtctctgcagccgtcgctttggtcgccatgatgcagcactctttctggttgctttgcctggccatgctgctgatgggcatttaccaggcctttgcccagttttaccgctttgccgccggtgaggtcgccacggtagaatttcgtacccgtgccatttcgctggttattgccggtggcgtggtggcagcgtttgccggcccctggcttggccgcacgggcagcaacctgctttcaacgccgtatgccggttcttttatcctgatgggcgtgatgtcagcgattggcgtactgctgctgcttggactgaaggtgccgggagagtcccatactgcgactttcaataccccgcctgccaggcgctggacgacggtcatcacccagccggcctatcttgtggcgctgttttcagcagcctcggcctacgggatcatggtgctggccatgaccgctacccctatcgcgatgacacaccatgattactcgctgggagaaagcgcctcggttatccagctgcacgttctgggaatgtacctgccgtcgttctttaccggcagactggtggcccgctttggctccgtgaaaattatgctggccggggtggcaatgatgatcgtctacgcctgcctggccttgtcgggaaccagctgggcgctttttgccggcgcgctgatttttgtcggtaccggctggaatttcctctacatcggcgcaaccagcctgctttccacaacctacagtggaaaagaaaaaggggtggcacaggctgttaacgatatgagcgtgtttgtgttcaccctgctgtgctcggttgcggcaggatcgttgctcaacaccatcggctggcagagcatgaataaactgctgctgccgtgggtcattgtcctggcgctgccgcttctctggctgggctggcagcgtcgccgggccgccatcgcctcaaattaa

SEQ ID NO: 177652 - DNA, 207 bp, Klebsiella oxytoca
atgaaaaacgcactgatcgtcatcgatgttcagaatgactatttccccggcggcgcctggccgctcgaaggtgccgaagaggtcgcggcggaaatcgtcggcgctgtccggcaggcttataaggctggatggtggtgggtatacagcatgttgccgcggctgatgcgcccttcttgcgcccgggcagccctggcacggatatcctga

SEQ ID NO: 177653 - DNA, 960 bp, Klebsiella oxytoca
atgtcatcattatccgtcgccgtggttgccacacccggtgttagccctttccatttctccattcccttcatgattttcgcccaggccgtcgagcccggactgttcagcgtcagcgtctgtgccgacgcgccaggtcaggtccgttccgacatgggctttaccattgatgttccgcatggccttgagccgctacgcacagctgacatcattgtcatcccgtactggtctcatcctgaagaaaagcccgatgagcgcctgctcgccgaactgagggatgcgtgggcgcgcggcgccgaagtcgtggggttgtgtctgggggcctacgttctggcctacgccgggctgctcgacaaccggcgggcggcgacccactgggagtttgagcatgatttcagaaagcgtttcccccttgtgcatctggacagtaatgccctgtacaccacggacgagcgtcttatcacttcggccggcaccgctgcgggtatcgactgctgtctgaatatcgtgcgggaacgctacggcagcagcgcagctaaccacgctgcgcgcagaatggtggtccctccctaccgtgaaggtggccaggcccagtttatcgaacatccggtaccgaccaacacgcgtgatgagaaaatcaacgagctgctcgactatatccggcgtaatctcgaaaaaccacacgatctggatgcgctggcgggattcgtgaacatgagtcgcaggacgtttacccgccacttcctgaaggcgacaggggtaaccgtcggcgagtggatcaacgcccagcgcctgcagcgcagccaggagctgcttgagacaaccagcgccagcatcgagagcgtttccgagctggccggtttccagtctccggtgtcgttccgccagagtttcaaggctcgttttaacgtcagccccagcgaatggcggagggcgttccgcgggcctgagccccttgcctga

SEQ ID NO: 177654 - DNA, 780 bp, Klebsiella oxytoca
atgaaactgacacaagtacgaaacgccaccctttttattgagtatgccggcaccaccttcctcatcgatccgatgcttgctgaaaaagatgcctgggacggctttgccgggacggcgcgttcgcatattcgtaacccgatgaccgccttgccgatcgcgacagaatcgctggtcaatgctgatatcgtcatcgtgacccatactcatatggaccactgggatgaggccgcacagaagcagattccttcaaacaagctgatctacgcccagcacgaggctgacgcagaactgatccgctcccaggggttcaccaacgttcgcgtgctgcaggatgacaacgtgttcacccacggtctgactatccataaggtcgaaggccagcacggcagcaacgaagcctacgcggttccgcacctggctgaaggtctgggcgatgcctgtggtctggtgtttacccatcatgatgagaaaacgctgtatatcgccggtgacaccgtctgggtgaagccgtacctgaaagcccttcagcgctttaaacctgacgtggtggttctcaataccggcgacgcgcacattgacgactatggcccgattatcatgggcgcccgtgacacgctgcgcacgcttcaggccctgcctgagacaacggttgtggcctcacacatggaagccattaaccactgtctgctgacccgccaggagctgcgcgagtacacgcagcagagtggcattgaagagaaggttcttatccctgaagatggtgataccctgactttctga

SEQ ID NO: 177655 - DNA, 693 bp, Klebsiella oxytoca
atgagtacgaaaatcctcctttttcccgttttactggtcgtttcacttaacgccgccgcgtcgtccacatgggtggacaaccgctacgcgcacattacgggatcagagaaaaaccagtacaaaatcggtggcggtcatacctttgacaatggcgccacagtacttgccgcctggctgtatgacgcaggcaagaacttcgatcagtttaaaagcagcttccaggagtacgagggctggtatcccctcaacctcagccctgactggacgttgtcgccaggcttactcagtgacgtggaccagacgggaacgaaaattgcgccctatgccatgcttgaataccgtgtctccggcgatctaattgtggcggggcgttatcgctataaccacatgacgcacaaagacgtaaacatcaatggagagatggagtataacgactcccaccttcttgacgtcttcgtgaactatcaggccacggataaattatggcttcagctgaaccccgaattttctattaatgctggtgacttcaggtcgcctaacgggaaaagaacgcactgggagcccaatattgccgcgcactaccagctgaataaacactggagaccttttgcagagctgggttggctggaccgggatgaaaaccatgataaccaggtccgcgtacgcatcgggatccgttatttcctgccgtaa

SEQ ID NO: 177656 - DNA, 3153 bp, Klebsiella oxytoca
atggacttttcccgcttttttatcgacaggccgatcttcgccgcggtactgtcgattctgatttttatcaccggattaatcgccattccactgctgccgatcagcgaatatcctgacgtcgtaccgcccagcgtgcaggtgcgcgcggagtatcccggcgccaacccgaaagtgattgctgagaccgtggcgacgccgctggaagaggcgatcaacggcgttgaaaacatgatgtacatgaaatccgtcgccggctctgacggcgtactggtgactaccgttaccttccgcccgggtaccgatcccgatcaggcgcaggttcaggtgcaaaaccgggtctcgcaggccgaggctcgtctgccggaagatgtgcggcgtttaggcatcaccacgcagaaacagtcgccgactctgacgctggtggtgcatctgttttcgcccggcggtaaatacgattccctgtatatgcgcaactatgtcacgctaaaagtgaaggatgagctggcgcgactgcccggcgtcgggcagattcagatttttggatcgggcgaatacgcaatgcgcgtctggctcgatcccgacaaggtagcggcgcgcgggttgaccgcctcggatgtggtgacggcgatgcaggagcaaaacgtccaggtttccgccgggcaattgggcgccgagccgctgccgcaagagagcgacttcttaatctccattaacgcccaggggcgcctgcataccgaagaagagtttggcaatattatcctgaaaacggcgcaggacggctcgctggtccgcctgcgcgatgtggcgcgtattgaaatgggttccggtagctatgcgctgcgctcccagctgaataataaagacgcggttgggattggtatcttccagtctccgggggccaacgctatcgatctgtccaacgcggtgcgcgctaaaatggacgagctggcgaagcgttttccgcaggatatgcaatgggcggccccttacgatccgacggttttcgttcgcgattccattcgcgcggtcgtgcaaacgctgctggaagcggtggtgctggtcgtgctggtggtgatcctgttcctgcaaacctggcgtgcgtcgattattccgctgatcgcggtgccggtctcggtggtggggacgttcagcatcctctatctgttaggcttttcgctaaataccctaagtttgttcggtctggtgctggctattgggatcgtggtggatgacgccatcgtggtggtggaaaacgttgagcgaaatatcgaagaaggattggctccgcttgccgcagcgcatcaggcgatgcgtgaagtttccgggccgattatcgccattgcgctggttctgtgcgcggtgttcgtgccgatggcgttcctctccggggtcaccggtcagttctacaaacagtttgcggtgacgattgcgatttccacggtgatctccgccatcaactcgctgaccctctctccggcgctggccgctctactgcttaagccgcacggtgcgccgaaagacttcccgacccggcttatcgatcgtctgtgcggctggattttccgtccgtttaaccgctttttccaccgtagctcgaacggctatcaagggctggtggggaaaacgctcgggcgccgcggggcggtttttgtggtctatctgctgttgctttgcgccgccggcgtcatgtttaaagccgtccctggcgggtttattcccacccaggataagctctatttgattggcggcgtgaaaatgccggaaggctcttcgctggcgcgcaccgatgcggtgatccgcaaaatgagcgaaatcggaatgaataccgaaggcgtggattatgcggtggcgtttcccggtcttaacgcgctgcagttcactaatacgccgaataccgggacggtcttttttggcctgaagccgttcgaccagcgtcaacatacggcggcggaaattaacgctgagatcaacgcaaaaattgcgcaaatccagcagggctttggcttctctattttaccgccgccgattttaggactgggccaggggtccggctattcgctctatattcaggaccgcgccggtcttggctatggcgcgctgcaaaacgcggtgaacgcgatgtccggtaccattatgcagacgccggggatgcatttccccatctcaacctaccaggctaacgttccgcagctggatgtgcaggtcgatcgcgataaggccaaagcccagggcgtgtcgctgaccgatctgttcggtacgctacaaacctatctgggatcgtcttacgtcaatgattttaaccagttcgggcggacctggcgggtgatggcgcaagccgacgggccgttccgcgaaagcgtggaagatattgccaatttgcgtacccggaataatcagggcgaaatggtaccgatcggcagtatggtgaatatccgtaccacctatgggccggacccggtgattcgctacaatggctatccggcggcggatctgattggcgatgccgatccgcgcgtactctcatcctcgcaggcgatggcgcagctggaggcgatgtcgcagcagatactgccgaacggcatgaatatcgaatggacggatctgagcttccagcaggcgactcaaggcaatacggcgctgatcgtcttcccggtggcggtgctgctggctttcctcgtgctggcggcgctgtacgaaagctggacgctaccgctggcggtgatccttatcgtaccgatgaccttactctcggcgctgtttggcgtctggctgaccggcggcgataataacgtattcgtacaggtggggctggtggtgctgatggggctggcctgtaaaaatgcgattctgatcgtcgagtttgcccgcgagctggagctccagggaaaagggattatggaagcggcgctggaagcatgtcgcctgcgtttgcgcccgatcgtgatgacctccatcgcctttattgccgggacgattccgctgatactcggccacggcgcaggcgcggaagtgcgcggcgtcaccgggatcacggtgttttccggtatgctgggggttacgctgtttggtctgtttctgacgccggtgttttacgtgacgctgcgtctattcgtgacgcgcggtaaagcggtgaaggacgtgatgcctgcgtag

SEQ ID NO: 177657 - DNA, 1092 bp, Klebsiella oxytoca
atgaaaaacgcgatttatcttttaaccggcggcattgctctcgccctgtttgccgcagcaccggcacgcgcggcgatgggcggctgcgaagccgtaggcgggcctgttaattttaccaccagctttgccaacgactggacaaaagagcaaaacgtcgccgggactttaatagacctgacctccggcaccacatctggcggtagctataaaatggtttgcgactgtcctgccaacaccggggttaatctctactattcagcaaccacgccgttagctagctccggctattccggatttcaaaaattaaatgataatctggatattaaaacggtgattaccgatgtacctggcgtatcggcgcttacggttcctactaacataaactcaccggttaggggagaaggttattttaaggctgcaaacgataatggcgtatgtaatggggatcctgacgatcagcgcgccggggcatttactgtgggcagtaacatcagcattacctttcgcgtcacgcaatcttttttaggccggatggagatccccagcacgcatatcgccaccctccagtcggcatggagtagcaccgttagttatgcaaaaaacgtctacaaagatattgccgatatctatctcgagggcagcatcaccgttccgcaaagctgtaagattaacgaaggcgatgtcattcgggtcgaccttgggcaaatcagcgcctcaaaattcaccactaaggaccacatgcctgacggatatacgcctgtaaggtttgatattgtctacgattgcggggatacatccttgtttggacaaaatgactatatcagtctggctgttcagggtgaagacatcgccgatcagtacacattagccgcccgccgtagagaatcagataatgtcgcggatattgggatccatataaataaccttaccgcgggggcaggtcttatcaccgttacaggagactctggtatgactttagctgattcggcaggcgttctccatatgcgggcataccccattaatctggtcggaggggccctacagccagggcctttccgtacctctgcaaccctcaccgcaacggttagatag

SEQ ID NO: 177658 - DNA, 387 bp, Klebsiella oxytoca
ttgttgattaaacccaacgatgacgagctgcgggaaatcttcggtcttgacgtcagtagccgccagcaggtgcgtgaggccatgcgcacgctgcatcaactgggcgctcgcaacgtgctgctgacgatgggagccgaaggtctctacttttccaacggcgaaggcgtgtggttttgctccgcaccgaaaattgaactggtcagctccgcctgcgctggtgacgccgcactgggtgcttttctcagtaaatggcttaacaaagaagatgtcactcacgctctggcattagccagcgcgaccggcgccgatgtcgccgcttccgccgggttaggcaaattacaacgcacagaagaattattacaacaaattcaggtcgtccaattataa

SEQ ID NO: 177659 - DNA, 657 bp, Klebsiella oxytoca
atggacacaaccagtattgatgatttcgttcgctattctgttggttatgcccaggaagaagaaaaagcccgctgctttatcgatgcggacaacatgctggcccgttctatcttcaacatcggtacgctggataatcccgggcacgctgataacgtcgcctcgatcaagctgaagaaaacagccccattccgcgcgctgctgtcgatcaacggggatcaccttaaccagaagcaagtcgccgaatggctggaagactggagtgattacctgattgcattcgatgccgacggtaacacgatgaaaatcgcccaggccgcgcaggcagttcgccgcgtcaccatccagcaaactaatgcctccgatcatgaagatggtgatttcagtggcaaaaagtcgctgatgcagagtatcgaagccagcagtaaagacgtgatgccggtggcgttcgagttcaaatgtgtgccgtatgaaggactcggagaacgtgcattcagcctgcgcaacagcctgctgaaaagtaatgatccggtattcgtcctgcgtatcgtccagttggaagcccaggaagaagcgatcgccaatgagttccgcgacctgttgatcggtaagttcgacggtaagcctgtcgaggccttcatcggtactttcaaagcctaa

SEQ ID NO: 177660 - DNA, 528 bp, Klebsiella oxytoca
atgagctttattcaaaccttttcaggcaaacattttaactatctcgacatccagcaagacgccatcgagatcgaagatattgctaatgcactctcgaacatctgccgctttgccggtcacctgcctgagttctatagcgtcggccagcacagcgttttaacaagccaactggtacctcaagaatttgcgcttgaagcgctgctgcatgacgccgccgaggcatatttgcaggatatccctgccccattgaaacgccttcttcctgactaccgcgccattgaagatcaggttgatgcagctattcgccaaaaattcggcctgccggctgagcagcacccaaccgttaaatatgccgacctggtgatgctggccagcgaacgtcgcgactttgagatcgacgacggcacccactggccgatgctcgacggcgtcattcctactgaccagtttgtgattaaccccgtccgcccgggccagtcttacggcatgttcatgaaccgctttaaccaactgatggagcggcgctaa

SEQ ID NO: 177661 - DNA, 786 bp, Klebsiella oxytoca
atggctaaaaactcgatcgatgcttatggcgccagcggcaagacaaacgttctgatgtttgagccggaaaatctgcatattgtcactgacaaggcacacccgctttacgatgagcgtattcacttacctctcagtgaggcaatggtgctgaacatcatagaccagggtgttctggagccgattattgtgtggaaagacccggaaacggggatgtcctgtgtggtcgatggccgtcagcgcgtccgtcataccctggaagctaacagccgtctggcaaaagagggtaaaaccccgctgctggttccggcggtcactaaacgcggttctgctgttcgcatggcgcaggcaatggtcagcgcaaacgaaatccgccaggccgacacaccgctgggccgagccaaaaagatggctgatgcgctggagcgcgggcatgacgaggaagacctcgcactgatgttcggcgtcagcgtccccactgtacgcgcaacactatcactgctggatgccactcaggcagtcaaagacgcggtagagtccggcacagtgaccgttacccaggcgcgtcaacttgcatcactgaaaccggaagaacagcgggaaaaggtagccgaaatcgaagcggcgaccgctggtaccaaaggccacgaaaaagcccgtcggcaacgtcagatactcggtgaagcaaagccgcgtatcaaatcacgcaaggaaattgcaaaagccctcgaagatgccagcggcgaatatgccgaggctctgctctgggtacttggggaggcgaaatga

SEQ ID NO: 177662 - DNA, 135 bp, Klebsiella oxytoca
atgaactttgaacctgaaaattacagccggcgcgcccttctctggtttgctgcactggtcagtgttgtcgggtgggttgcagtagtcgctgtaatctggggcgtatgcatcatgatcgaatgggtgacagcatga

SEQ ID NO: 177663 - DNA, 309 bp, Klebsiella oxytoca
atgaaagaactgaaattctacggcgccagtgatgatctttttgaatgtgaaggcgctcttcgagaagaaatctgtatgtatagcaatcctggtatttatcacctcagatcatctgaaggcgagatgctcattattgcctgctataccgacgaaggttgctgggctataggtgttggccaggtcaatgaagaaacccagcttcctgcatggccgacatctttcagtcagcatgatcgtggttatagcgtggttctaacactacaggttcctgacgacactgaattggtgctggacgatagcgatgactga

SEQ ID NO: 177664 - DNA, 435 bp, Klebsiella oxytoca
atgactgatatcaccaacttagttaagaatctccgccactgggcaaagatggcctcactgaccagcgaacaagtgtcctgcttaagcgttcagcaactcgaaactattgcgaatgagcttgattcagcccaccagctgatcgccgaacttgagtcatttcgtaccgcctacatggaatggagcgataaaacggattggatgcagggtgataaacgttttgacgttgtgcgtccactgggtaagcaccgtgtggatgtgctcagggaatatatcaagcttctggagtcccgcaccgtgaagcttccgaagcgctcagttggcgaagtcatgcatatgagcgggtttagccgcgactacgccgagggttggtgctcaggcaatgataacgccattcacgtaatgcgcgtcgctggcatcaaggttgagggggagtga

SEQ ID NO: 177665 - DNA, 351 bp, Klebsiella oxytoca
atgcgcgaaatcggagagcaaattacagcggctagagctgccgcagtaatacacgaaacattcggacacctggacgcgaagccgggggagcggcacaaaggctggttcgtttttatcaacggtcaacatggtgatatggacgtggtgtacagcgactttccaacgttcggtgaaggtccgggatatttcactgacagagaggacttcatctgggagttaattcgtgatgatgctccatgtgctgctgtcggcatctaccgattcgatggtgagtatcgtctacccaaaagaaaaggttcggcccgtttcgttggcaaaatcacctgcattcagacattcggggaggaataa

SEQ ID NO: 177666 - DNA, 789 bp, Klebsiella oxytoca
atgatcaaaaactacttaaacagagaacgtctggaaaaaattaaatcatggcgtgaaacatacggcgctggaagcaacgtaattctaccagcagaagaagcggaagagttgtcctgcatggcgctggccgcaatggacagcgagccggttgctttcatcaatggggcatggacgctggtttattatcgcccgcccaaagagtcagggctaaagattggcgacaagctctatcgccacgcgcagcagccggtagtgccggagaatcgcgtaacagcagaacaccgacgcgttattgaaatgctgctcaacgtttgcggggccgcatttgaactcgcggatgatagttgccagcaagatgttgacggggaagattgtcatgttgttccagacggtgcatttcagaaactaagtgatgcgctggacgaaatagaaaacactcttccgaccgaagatatcgacagaccagatgtatttcttgcctggtcggcaatgccaagggcagcactgaaatctattctcaatgctggcaactctccggtaattccagagggttacgtgatggtgccgatgaggttaaccgctgagaacggcgcaaagggtgtgctatctggcgaattttcagaaacacagtttgtaaactgcccggagtgttttggtgatgatgagtgcgaaacatgcgacggcagcggcagaattgaaataaaagtgccagtcagttggacgactataaaagaaatttggattaaaggtgtcgagcattttgcagccgcaccgcaggagaataactaa

SEQ ID NO: 177667 - DNA, 567 bp, Klebsiella oxytoca
gtgaaccatttaatgatcgacatcgaaacaatgggtaacaagcctactgcgccaattgtcgcgatcggcgctgtattcttcgacccgcaaagcagtgagttgggcgcagagttctatgtggccgttaacctcgccagcgctatggatcagggtgcgacacctgacggtgacactatcctgtggtggctcaaacaatcatcagaggcccgagcagctatttgtaccgacgataccagaagcatcacatttgctctctccgagttgagttcatttatcagccgccactctgacaacccacgttatatcaaagtctggggtaatggttccaacttcgacaatgtgattttacgctcagcctacgaccgcgccggccaaacctgcccgtggttattctggaacgacagcgacgtgcgcaccatggtgttgctcggtaaacaacttggtttcgaccccaaaagcaatatgccatttgatggtgtagcccacaacgcattggccgatgcccgccaccaagcaaaatatgtatcggcaatctggcagaaactattgcctacaagcgacgaataa

SEQ ID NO: 177668 - DNA, 207 bp, Klebsiella oxytoca
atgctgagcctcgattgtgttcccatctcaacttattgcaaagagacaggcgaaacccctgatgccataaataagcgcatccagcgcggcgtatggcgtgaaggggtacaggtgctaaaggtcgaaggcgttaaggaaagatggatagatcttagtgaggttgcaaaatgggctcgacaaaatcgcctaaactcccgcgcggcgtaa

SEQ ID NO: 177669 - DNA, 1191 bp, Klebsiella oxytoca
atgggctcgacaaaatcgcctaaactcccgcgcggcgtaacgatcaggaaacatagtactggggaaactatcaatattacctttacctataagggggtgaaatgccgggaacctttatcaaaccttgaagttaatagcaaaaacattaaatacgccgagcgaacactcggcgaaattcacaataaaattgagcggggtacattcaattatggtgaacactttccccgttcggcacgacttaaaatatttggtaatgcttcaacaggaaaaacggtaaaaaattatctcgatgaatatcttgtaatttgtgaaacgagaaaattatctccctcaacaatcggcggatataagaaatgtttaaatgctctggcatcacttcacgtttttcctgccagcgaattaacacctgctgctttaaaaacatggatccagagtcagaaaacgacattaaagacgattaggaaccaactttcattcctacgctcagcactggatgaagctgtgactgatggtgtattgcagattaaccctgtttcactggtgacagcctcgcgctaccagagtagtaaaaccgaggatgaaagtgattatattgttgatccgctttcgccagccgaggttgaagcgcttttgcatgccgcaggtaacaagcagtgggaaaacatattccgctttgcaattgaaaccgggctacgtagttctgaactctgcgccctccgttggcgcgatatcgactttatcggcaaaacagcgcatgtgcaaaatgccagcgtagtgggggtaattaagggcacgaaaactaaagctggaacacgtaaagttgagttaaccgaagaagccttgtatgccctgacttctcagaagcctttcacctttatgaaagatgcaacgatctttgaggatcctaagacagaaaaaccatgggcgggtgccgatgcgataagaaagaaagcctgggtgccaactttacgtaaagctgggatcaggtaccgtaatccataccagaccaggcatacgttcgcgacccgacatataagtcgtggcgctaacctgttctggctggcatcacagatgggacataaagggccagaaatgttgttcaggcattatggacgctatctgaaggagtatgacggcaacactgaaaaacgacccaagctggtcagcggtggaacctcaaaggagccgtaa

SEQ ID NO: 177670 - DNA, 1242 bp, Klebsiella oxytoca
atggcaagacaaaccaaacctctatccgttaaggaaatcgaatctgctaaacccaaagaagcggactacgttctctatgatggcgatggccttgagctactcatcaaatccagcggaagtaaaatctggcagtttcgctacattcgccctgtcactaagaaacgagcgaagaagagtattggtccctacccgtcagttacccttgccgatgccagaaactacagagcagagtctcgctctctcctggcgaaacaaatcgatccacaggaacatcagcaagaacaacttcgcagttcgctggaagccaaaaccaatactttccagctcgtagctgaacgttggtggaatgtgaagaaagctagtgtgacagaggactatgcggaagatatctggcgctctcttgaaagagatgtctttcctgcgattggcgacgttagcgttacagatattaaagctcacacactggttcaggccgtccaaccggttcaggccagaggagcactggaaaccgttcgtcgcctgtgccagcgcattaatgaggtcatgatctatgcccaaaacacagggctgattgatgctgttcccagcgttaatataggtaaagccttcgagaagcctcagaaaaagaacatgcccagcattcgaccggatcagctacctcaattgatgcagacaatgcgaacagccagcattagcctttccacacgctgcctgttcatgtggcaacttcttactatttcccgccctgccgaagcggctgaagcccgttgggaagaagtagacatggaagcgcgagaatggaaaatccctgcgtcacggatgaaaatgaaccgtgaccatactgttcctttatcagatgaagccatggctgttctggaaatgatgaaaccagtaagcggcaaccgagaatttatctttcccagccgtatcaagcccaaccagccaatgaacagtcagactgtaaacgcctcactaaaacgtgcaggttttggcggagtgctcgtctcacacggtctgcgatctattgccagtacggcccttaatgaacaaaactatccacctgatgttattgaggctgcattggcccatgtagataagaatgaagtacgtcgagcatacaaccgcactgattatctggagcaacgtcgtccaatgatgcagtggtgggctgattttgttatggctgctgatcgcggaagtatgattgagggaggtatgaaaggagtgcgtttagcggggtga

SEQ ID NO: 177671 - DNA, 345 bp, Klebsiella oxytoca
atgaagacacggcagcatgcgcaaaaatcaatcttcagtctggaagcaatcttcgaacagtcccgcaacaatgttagtgaacttgaacagctgttgagcgagctgacctttcgcaacactgccagggcgcggacgctaacgtctaaaatcgagcaatctctaactatacttagcgaccgcaacgtggtcgccatgtcggcttccagcccatcaaaacgtcatcctgattcggcgtccatacaatcttctcaagttgtgccccacaatgcgcctgcagatgtagagcagctgcaaccgaaggttttaccagtgaagtggatatttttaaactggttatgtctgtaa

SEQ ID NO: 177672 - DNA, 5109 bp, Klebsiella oxytoca
atgagtttatctacttttttattaaaatgcctaggtcctattgggcgtatcgttatgcctaaagcaaagcaaatttacgctgagcatacggcgggaaataagccggatgaagccatcgaacttcaattggataaatttctaaatgaagccttgggacggctgggggttgtggatgactcgaaaccttggtggtcaactgctatgaatgccctaggtaaagcggctgttcagccagaatcatttaaacgtcctcatatacaaaagtggttaactcagcaagagacgcaataccttcttaaacaacttatcagggataagcttactggtaatgaatactcacaagaaagccttaatatactcgtttcaagctacattgaagaatcttttgagagtaagcagtacgctatttcgataatcactacagcacttgccgtactcgaagccagtgtattgggttccattaaagataaaggtactgctgctattgttcaggcttatggggacaagcagttggagtttctgagcagtctgcgcgaaaatcttaatcacctgatacctgacgacatacggcagattgtcagaattgcacaaaataacgcagaaagcattcagtgcgatataggtggtatacaaatagaacgtacggcatttctgcaggatataaataacctcatcaaatcagtccaattcattcaagtccgcggtttacctggcagtgggaagtctgtactactaaaacaactggctcagcaggctcttgataaaggtcccgtactttttctcagggctgagcagcttgaaggaaaaagctggttcagttatgccagtacgcaggggttatcagcacagccgctattccagttgctctcccaaatagagaaagttggtactcccgttatattcattgatgccattgatagaacggaaaaagagcaacagcctattattctagatatcattcgtactatcatacagtcaccagagcttgcaaattggcgtattgtagcatctctacgtgatacgagcgttgatgcactccagcactggcttggggatacagttaatggaatgacattaggaaccgtatccctcaacaatctaagtaacgaggaagctgaaacacttgcagcagctaatcctctgcttagatcattgctttttagttcaacacagcttgaagatattgttaggcgtcccttctttgcgaaagtactccatcagaattacaccattgatccccagtcaacttttcagcctcgttcagaagtcgacttgattgcccaatggtggcaacgaggtggatacaatgagacaggtcagtttgctgtagagcgtcagcgccaactcattgagttggcaaagctccaagctcatgccttaaacaaaccgatcaaaatgaatcagctttctacaatgatgcatattgacgcaatgaagtctgatggccttcttgactctgtgcgtgacggtatctctgtacgttttacgcatgatatcttcttcgaatgggcttttctccatgtcattgctgagtgtgaggagcgatgggttgatgagattcggtcctgtggtgagcctcctgctttagctcgcacgatagagttggccgctcaatgggagtacaactatggggaaaactgggctgcctggttagccctaactcagtcttccgggttgagaacacaatggttacgagcatggctgttaggacctttaggtttgcctgactttgccaagcagcaagatccatacactcgagccatttttgctgatggttgtcagcttttcaaaaaagctttagtttggttccaggcgactaaaattacgccgaacgagtccatcaatactttcgcctttccctctgaaactcaacagcaatatgcctacctagtaagctggccctccgattatcttttatggcggcgttttattgaattcattcttgctcacatatctattgtcccaaagagactctatccagatattctcgctgtatttgaggtttggcagaacgtgttcttttgtaccgctaatcccatcacccataaactcttacttcaatgtaatatatggttaaatgatattgataatattaattaccgtgataattggaatgcaaattcctttgattggcatgaaatacctgaacttgaaaaattcaggaaatctttgagacgactaatttttctctcgtcaaaggctgaacctgagatagtctcaacctatctactcaactcaggtcggtcgaatacgctacgccgagatgtttttgacgacgtattaactctttgcccgatattggcacaatcgcaccctagcgaaattgttaatattacattggcctgtttaaaagaagaattacccgaagaacaacttgcacgagaagcagcagaaaacaagcgggacagggagaggcggattaccattcaggccaagccagagtccgaaaggacctcacaagaacaggcatatctcaataatttcagcttattcacaactgtcggtgtttcccattatgattgggatagattgtgtttggatgatggttttcgtaatttctatccacctacaccgcgaagggagcctttccagtcattgttccagcactcacctaatgaggcgttagctctagtcagagagctttgcaatcatgcgacaatggcatggagacaaatgcatacatgctcccgagatacacaaggtacgcctatcccgcttgagcttacattttgttggggtcatcagaaattctggggaaacgctcgtgagttccagtggttcagagcagcccgagcttctcatgtaattggctgtgctttaatggcactcgaacagtggtgttatgaagaactaatgcgtgctcgcccactcgatgacctgcttgaacaagttgttatcggccatgataacattgctatcctgggcgtcgccgcaatgctaacactacatactaagacagtttcccctgctacattgccgctgctaacatcacaacgagtgctaagtgctgatcagcagcgaatgcaccaagacttaatttcttgttcgggcatgttttcttccgacggtcagaccgatccctcacttattgggactacatctaccgcatctatacaaccagaacggcaacaaactttgacaagccttatttcatcacatttcattaagggtgatgaatatagcgatattcttaaaaagaacattctcagttttactgataatctaccttttgagtacgaagagttgcgtgatcggcctgagtgtatttctagattgaggactgaagccttaaagtatgctgaattggtagactggaataactacaattttcatgaagttgagaataggccagacctgatagcggtttctcataccagttctttttcatccaccccggaaagtcttgccaaaagagaaactgcttcgaagtttattaacgcaactcgacttttatcatggtgtttgaaatgccttgaaaaaaaagcattgctagacacattctcaataccagaggctattgctgttggaagacaaatcgacacctctgatgttatgatctattctgcagatgaatcagaagaaactcacttagctatttatcgaggtgcactttcagcaattgcggccgttatattaacttttcgtcaagaaactacaccttcgaatattcattgggcgcgagatattttaatgcgcgtgctaaaacgaaaagaaataaaagatacgttctggacccccgacgccattaccatagaccacccagcgatatttgctgcgcaaggacttgcagccgaactccgtgaaaatgctcatcaatatgaaatcgctcgcagcttattaattctgataactcatccacttaaagccgttacattagcagcactcaaagaagcctgcgatttatggagcacagcaccaaaactcacatgggtggcactggttttggcattttctcgcaattgcgcatctattcattcattacaagacacccgtaagaaaggagatataaacttgccgtcgcctgaggctgagattgaaataaatgcactccttgaactctatgaagggggtagcgagtggccgaaactcccactaattccagcgccttgggtaaaacgtaataatttaaacattcagaatcataacaaagataatccaaccgagagtgacgaagaaaagaatgcctctgacattatctggcttgctgcagatgctgcaaaagcattaagtcttgttcctgttgaaagcattatggcaagtgatagaaaagaagattttataatttttcttcaaagtgcattaaactggaccgttcaagagtatgaggttaacggtgaacaatccaaaggtgggaattattcgcgacatgacacctttgaatggtcacaatcgctaggtacaacacttagcttggttgctggcttaattccatttagctcttttaatacacgttttctcatacctattttagaaattgaagatagtcattgtctggaacttttgtatccgttagtaaatggttatgtctgtcactatgtatacgacgcactaacaataccatctgacacagttatcatacttaatatctgtttagaccgattccttaaacttccggagtttgactcaaattctttcctcaaaggtaagctgaataattttcagtatcaggggctaattgacgccttgatgtttgtttctgttgagaaggcagagaaatcagctcgttatgcgaatggtgattggtccgaacttccactaatcttaccagttattgatcactttattagggcagttggtgggttgattccaatcatggaaagatttttaacactttgtgaacgtgcaaaagtaacttatcccgcggatatgtttgccgatcaaatcatatcggttttaaatcagggcccagattccctccaaggatggcacagcactctacttctagaacgtattgctgcgttagttgagtattttgcgcatcgaaatacgccaatgtcagtcgatttgtcacagaaactcttgaggattcttgatgtccttgtagatatgggggatagacggagctctttgttacaattaaatgagtcgtttcgagatatccgtttatag

SEQ ID NO: 177673 - DNA, 2199 bp, Klebsiella oxytoca
atgagcagtgcctatgatagtctcgatccccgcgtccgtaagtgggtttacaagcaggggtggtctacattaaggcccttgcaggagagttctatcccggcaattttagcccgtgatcgagacgtgctaatcagtgcaggcacagcagcgggtaaaacagaggctttctttcttcctgcctgttcggcggttgcagatctcactaatggatttggcatcatctatatcagcccgttgaaggcattgattaacgatcagtaccgtcgtcttgagagccttggagatgcattggaaatgccagtgactccttggcacggggatgtaccacaaagcaaaaagaagaaggctcggacgaatccttctggcattttactgattacacctgagtcacttgagtctttgctcataaattcaatgggctggctcaaacaggcgttttcgtcagtcgcatacatcgttattgatgagtttcatgctttcattggctcagagcgtggtgtacagctgctttctctgctcaatagaattgaccatgtgcttggacgccaggtaaatccaattccccgcgttgcgttgagtgccacgctgggggaactggagaaagtgcccgaacttttgcgcccggacaaacgactaccctgcgtaactgttacagatagtaagagcgaggccactcttcaggtacaggtcaaaggttatctggagcgagtgctccaaaaagaagaagaacttcagagttcagctgaacatgatgtttgctctgacatttttagactttgccgtggcgattctcatttggtctttgcaaacagtcgaaagcggactgaaagcattgctgccacgctgagcgacatgtgtgaggaacaaattgttccgaatgaattctttccccaccatggttcccttgccaaggaattacgtgaggcgcttgaatctcgtcttcagaaaggaaatttgcccacaacagctgtttgtacaatgacgctcgagttgggaattgatataggtaaggttaagtcggttatacaagttacgcctccgcattctgtttccagtctacgtcagcgtatgggacgttctgggcgacgcgactccccatcagttctaagaatgctaattacagaaaatgagcttactggaactagcagtatcgttgacctcctacggctacagttggtccagtcgatggcaatgatcagattgatgatctctaaacaatggtttgaaccagcagatgctcgacagatgcattattccacgctgttgcaccagattcttgctattacggcacaatggggcggagttcgtgccgaccagctctggtcgcaactatgccagacaggaccatttagaaatgtagatttaaacgatttcaaaagcctgcttaaacatatgggagcatgtggcctactcactcaatttgctagcggcgaaatggttgttggggcagagggggagaaactgactaaccattacacgttttatgccgtgttcaatacaccagaagagttccgcattgtcaccggaaacagaacccttggaacagtgcctgtggactccccactgctaccagaccaacacatcatcttcggtgggcggcgctggaaagtgacagagatcgagacagagaaaaaagttatctatgtagaggcgaccaaaggcggtcagccaccacaatttagtgggggaggtatgtctgttcatgatgccgttcgtcaggaaatgctcgctatctatagggaaggtgattaccgcatagcaataggtagcaagaaagtagattatgccgatactgccgccagaaacctatttgcggaaggctgtagtaactttcagcgttataacctgcaaaatgagtattttattacgagtgggcaacactgttacgtaattccctggatgggggataaagttgtgaatacgattacagccttgctcatacgttgtggttttaaagccaattcattcgtaggtgttatagagattgatgatgcaagtgtagcaaccgttcaacaagcccttaaaaaaatgctgttgtcaggcttaccatctgcatttgatcttgccgaagatgttccagaaaagttcttggataaatacgacgagtatttaccagagtccctgcttgcgaaaggatttggggaaaaagcgtatgacattgaatgtactcgtatttggttgaagcagcaccttcagtaa

SEQ ID NO: 177674 - DNA, 1317 bp, Klebsiella oxytoca
atgtctgtaacacgtataagagtgaaagaacgcgacgctattattcagtcacttaagtcaggtgtaacgccaaggataggcattcagcatatccaggttggccgcgtgaatgagatcaccgctctccaccaagatattgagaggattgctgacggtggtgcaagcttcagacttatcatcggtgaatatggttctggtaaaacgttctttctgagtgttgtgcgctctattgcgctagagaagaagctggtgtcaatcagtgcagacctttctcctgacagacgcattcactcatcgggaggtcaggctcgtaatctctattctgagcttatgaaaaacatgtccaccagaaacaagccggatggtaatgcgttacttagcgttgttgaaagattcgttacggaggcaaggaaggaagctgacaaggacggctccgaggtttcatcagttattcataaacgcctggcagcactatcagatatggtcggcggatatgactttgcgaaggtcattgattcattctggcgggggcatgaacaggataacgaaacgctaaaatccaatgccattcgctggttgcggggagagtacactactaaaactgatgcccgtaacgatctcgacgttcggactattatctcagacgcttcattctatgactctttgaagctgatgagcctttttgtccgccaggcaggctatgccggtcttttggtcagcctagacgaaatggtgaacctctttaaactgaataatacgcaagcaagaacagcgaactacgaacagattttgcggatcctgaatgactgcctgcaaggctcagccgagaatattggttttatcctcggggggacgccagagttccttttcgatccgcgcaaaggtctttacagctatgaggcgctccaatcacgtctggcggaaaatcggttcgcgcaaaaagcaggagtgattgactactcgtctcccactttgcatcttgccagcctcacccctgaggaactgtatattttactgagaaatcttcgccatgtttatgcaggcggagatccagagaattatctggttccagatgaggcgctgactggatttctgcatcactgtagtaaaaccattggagacgcttacttccgtaccccccgtaataccataaaaggtttcctggacatgctggccgtgctggaacaaaacagaacgatgaactggcaaacactaatcgagggtgtggcgattgaagaggacaggcccagcgaaatggatgacgctattatagaagaaagcgatgacgacgacggactggcgaacttcaaattatga

SEQ ID NO: 177675 - DNA, 2310 bp, Klebsiella oxytoca
atggagttattgaagtttctggcggcgattttagtaatttacttgttgttttttagaaagaaaaaacgtaaatctccaaagtcttatgcttcaagccccgtgaaagcaccgccaaaagaatggctcgctgacatcaagaaaaaagaggcggttgtgcgaaacgatgatagtgaagacgataaccttgcaacttttacattgagcggtggccggggtgttgaacttcgggtgacaaccaatcattaccggaacacctcaaagtcagcaggtgcactagctcgatgggtacttccgggtgagatgataactgtagctggtgtagcaattagcggtggccacatttacttggggcaacgtatgaagccctccggtcaggaatcaggcggctattatgacgatggaaatgaggcatcattaattgatgacacatgtaagataaaacctacttcttatctttacgaggacagttcattaggatactggcccagtttttcctctctttccccagaagcacgcggtgcgtatgtcagttggctcgccagcgataggtctgatccatcgtgtcctatcggctatgtttttatctacctctacggcctggaaagaaaagcgctcatagattccactgacccaaaattccctgatgctgagttccgtaatctgttcaaagaagtcgctcggttaagatccgtattcattgagaaccgctcattccgtggatattcggcccagttactcgaagccatgtcttttctgcgcccgaacatgggcttagccactgagctcgatagcaattcaggtttcagcaacagcatgcaatttaagctggctctggcaaaaactgtacatgaaggagttcctgtatcagctgaactggcgttgaactgggtaataaaccacaccgagtattcgctgcgtaccccggctcgccgctgtgctaaagagtttgctgcacttttcaaacggcgttacaccctcaaatatggtgaagggatggtcgttaaggcgaataaaacgcggctaaggttagattacacaccagcaagtcctagtttgcgaggtgttcgacttcctgttcccgacctgcctgatccaagtgcgttgaagagccctgtccagaaaattatggctcttgccgacatatgtacggatgaacttgatgcttatagtcgctaccttggtaggaaaggtacgtcagtcaatgatacggctgcaattatgttgctcccttcagagatcgttaatgaaagtgcagaaaaaatattaagctcattcaaacgctgggctgatgaggcgatcctcgtcaaggaggggttagtctcagttgctgacttttgggcacatatgaatgccagttgccccaataagatcaataaaaaagaggccgatttgatgcatgcctttgctctgaagatgggttacggtctggcacctgacccgtattatcaccatgtgaaggcggatgttgatgggacacttgttctattccctgccgccgaaggtggacgcttctcaccttctcctgaatttatctcagcagtaatgacgctcagattaggggcgatggtcgccttgattgacgattctcttgatcaagctgaacagaaagtgcttgagaatgccatcaacaacaatactggcttcaccgatgatgaaaaacgctctctacatgcgtatttaacgtggcaacttcataccccagccaatatgacaggaatgaaaagcaggattgagttgatgggggccgcggaaaaagctgctgtgggcaaagttatcgttagtgttgcctgttcggatgggacaatagcgcctgccgaaatcaaacagcttgagaagatttattcaagtttggggctggatccctcatctgtctcgagcaatatccatcagcattccgcaactgaacatgatctcgtctcgtctgtaccaactgatcagccagcagtagggttcagactggatgctaatgtacttgcccgccacgaatctgccacggatgatgttcgtaaattgctgaacacaattttcaccgaagaagaaccggaagagctagaaagcgctccagcctcattaacggaaacgggggggcttgactccgcacatagccagctttatcgcagtttgctggagaaagaacagtggtcccgaaaagaggcgacagaattgtgcggaaatttgaatttgatgctcggcggtgcgcttgaggtgattaatgactggtcctatgcggtggttgatgctccggtactggacgatgccgatgatgatatctgggttgacctggaaattgccaaagaattagagggatag

SEQ ID NO: 177676 - DNA, 762 bp, Klebsiella oxytoca
atggctgatttagacagggattttacccctgatgagttactcatcgtatttcgtaaaaagaggaaagcgttacgttttcatctcggggtcagacagaaacatatcgccaggcaatggctgaataaagatactgaaattgttatcgtgctacaaacagggagacaaacgaaggatgaaggtttagcgcggcgacttgctgatgagcacggagagaaaaaatggcggcgttatctgaaaattttcagtctttcagaatggatgataaaggggatcaggaacgatatgtctgaggctgaacaatactgggagcagggaacatcggctctcgaatctgatccagatcatgcggtacaattaatgctgaaggctatcgcgttgttggatcgcggtctgaaacgcagtgaatccgcagcaggtaaaagaatcaaggaacggcataaactcaattctgcttatggcggaaaggtcaaagcgacacgttttgatggcgttaaagacgaagtgataaaacacctggaagcgcaacctgagggctgggaaactaaaaccgatgccatcaacgcaattattaaagcgttaaggccctatattgaggagcatggatggccttccgcacaggataaaaacgactcacgggacgcggcaatggtggaggcaagccagagcaagttgttggctgaatggtcagtcaaagacaaaagagtgaaggcggcgttcgcgaaggcagtacaaaaacgtatcggggtgtcgcaaaatcgatag

SEQ ID NO: 177677 - DNA, 210 bp, Klebsiella oxytoca
atgtctgtacaaggtatcaggatactgcgcatacgcgccgttgttaacaaaacgggcatcgcccgctcaaccatctatgactggatcaacccgaagtcaccgcgttacgacccgaccttcccgaaacagcgcaggctgggtatgcagtccgtcggctggcttgagtcagagctagatgcatggctgctggaacgccagcaggcatcataa

SEQ ID NO: 177678 - DNA, 1611 bp, Klebsiella oxytoca
atgcagaatttactgccatacactgtcattccgaaaatgccggagccttatattcccgtacaaaacagaaccccggagggttaccctgtctgcgcgttcccgccggtgatgcgggatgtcattgatgctctttataacgagacgggtatcccggcggaactgatagcgggggccgtactggcagctgcttccctcgcctgtcaggctcatattgaggtggtaccaccacactcatcggatccgatgcactgtgcactgtatctactgacgttggcggtctccggtgaaggtaagaccagtatcagcaaaaaagtgatgaagcctttttaccggttcgctgagcaaatgaagcagcagcacgacggtctgatgaaggcacacctgcgtgctgacaatatctggaaaatacaccagaaagcattgaccagtaatctgtacactgccatcaaaagcggttctgaggggacggaggaagaacggctgttagatgaacatgcagaaacccggcagcagcctccgacccgcctggcgatgctttatgatgacaccaccgcaaaggcgctcctggaaggtctgagccggtactctgaagccggggtggtctcagatgaggcaattaccttttttaaagggtatctgaaaaacaacctcggtttactgaataaagcctgggacggggagacctatgaataccaccgcccgggcggcgaagagtacgatatcaatgcctgtctgaccctggcattaatggttcagcctccggtctttgaaaattactgccgcaaccacggtgaactcagcaaggggagtggttttctgtcacggtttctttacatcaataccatcagcacactgggtcgtcgccacaccaatacaggtcacgctcagtctgatgaagcattaaatgtattccaccagaaaattaaccagttacttgataagcagaaggtacgtttttatagtaacgactcgcagaaacaaacgctcaggttatctgatgatgcgaccgcttactgggcagaaaaacagtcagatctcagccgtaaagcagcccccggacagcagatggagcatatcagtgaaattgcagccaaagcgggggcgaatgccctcagggttgcggccattctgacatatatgtattcacctgagagtttatgtatttcgcggggggtcatccaggccgccttcaaaattgtggaatggcatcttgaagaagcggaaaggctgtttttcccttcttctgaacggaatgcatttatggaggacgtttacgagatgttcaggtggcttaaggagaaatttctcgataatgagggatatccactcaggaaaaatgaggtaaaccggaacggcccgaaccggctgcgtgacgccagtaaatcacaatctgttcttgagcagttaatcgcactgggtctgatttgttttattcgtcccggccgtcattctgcggtgtatattgccatgccctccctggaatgtcgccactcatggtgtattccaccggcattcctggagaacggacataatccgattattgcatcgccagagaatgtcactggcaggtatggttttgaatactttgactttaacaggctggaatattaa

SEQ ID NO: 177679 - DNA, 1146 bp, Klebsiella oxytoca
atggccgtatgtaaaagaaataactgcatggcacagatcggccattcacccgccgaacggatattacggctatgcccggtacattatcagggcagacagttaaatgcagccagacgaacggaaagagcagcattaatatgccagtatcccgcctgtggtatcagtatatctgaaacccgcaatcagttttattgttgtaaggaacatcgggataaagcccggaggttaatcgatgacgatgccattataagactggttaagcactcttactggattaacgtagaatcaatgctaaaaaataattcccttggactggggagtatcaccggtccgacggatattgcagacctcattcggttatatcagcgcaaagctgtccaccaaaaaacgtataatatgctgaacgggcacagagttgctgatacgacaaaaaggttaatcccctggctggatcttgagctatgccacatttaccctaactctaagggcggtgcaaatatcgccagaaacattatcatcgcacctgctgctataaaccggatgatgaaggattttatcccctgctgtcagtcaggagtgctgagtggcataaaagcaatggaaacacctcaaccggttaaatcgaccttactgaaagcgttaacggataaatacggttcagatgctgtacaggaagcattgtacggagttaagcatcttgcctttgctgatttaagtctgtcacgcaggctatttgacactgatatttacgcattccctccactaacccgtctgttaaaagaggaagccttacgcctgaatttgatgtcactatgggaaacgctggtttgtaccgaagtcagcgtctggcttaatgccgggcctgcgaatgaattatttgccgttgccgcgtttcatgcgttgctgaacggcgacgccgaccacctgctggagcaatgttatcgtttagtcgatgaaatcagggtgaagcacaagcgggggtctcaacaaatctacgacgaatttcagcatatactcagccagtacatggcaaaatattttcacattgacaccagcgaccacagagcctgtaatctcttctataaccgcttttttagtgttcctcctgtcacagaggacggtgtctgcgccataccgcctcagtga

SEQ ID NO: 177680 - DNA, 465 bp, Klebsiella oxytoca
atgaacagaaaaatgattcaccctttactactgacctgtgcgctggtaccggcagtggcaatggccttcggtaatcaaaccacctggacccggggctggggccagggagtatcagagtttgttatcaatggggaaagtcaatcgcaactgtctctcacctgtgaggattacggctcgcaaccggccacggtcatattcactgacgccagcgggcatcaggtcagtatggatgaagataaaaaccttcaggtcagtatcgacggtggagcccccatcgacatcagcgaatctggcagtcgagtgggcggtaataacctggcgctggcctggggtcagctacgtaatggcaaacaggtctcagtaaccggagacggtgttaaggatgccacattcacgctggctggggcagcaaaggtattgccagtattcgggacccacggctgcgtgggtaaagatgcactctag

SEQ ID NO: 177681 - DNA, 360 bp, Klebsiella oxytoca
atgaaatttaaacacatgctggtgcccgcactgtttgcactgtcagccctggcgctggcagagccaacgccatccatcaaagtggagaccagtaatcaggttcaccctgccggaacacgctacgtcacggtcgtggtcactgcactggataacaccgtgaaagtcgaaaatattgacgtgaaccggggaaactgtcgcattgccaaccagaaatatctgtactccagcaataaagaaactattttgcctgctaccctgcgttacgggcagtccgtcagcgtgagtttttataataactgcgtggcttcagaagtcgtcgtcactactgataaggggggatggcgttacacttaccactga

SEQ ID NO: 177682 - DNA, 213 bp, Klebsiella oxytoca
atgacctttctgaaaatgctggtgacgaccctggcccaggcactgacctggtgcggcgggcatcaggcccgtcaatttattgaaattcgtctgcgtcaggcaggctacgatgacagcagcattgatacagcccgggaagcggtcacgttgctggtcactgcacttatcaccgccctgatggcgcagatgctgaagattctggatacgctgtaa

SEQ ID NO: 177683 - DNA, 822 bp, Klebsiella oxytoca
atgcgattagccagccgttttggtcgggtgaaccagattcgccgtgaccgtcccttaacccacgaagaactgatgcaacatgtccccagcgtcttcggggaagacaagcacgactccagaagcgaaaagtacacctacatacccactattaccctgctggagaaccttaaacgtgaagggttccagccattctttgcctgtcagtcacgagtgcgcgaccagagccgacgggaacatacaaagcatatgctgcgcctgcgtcgtgccggtcagataaacggtcagcaggtaccggaaatcatcattctgaattcgcacgatggcgcatcaagttttcagttactgccgggaatattccgaagcgtctgcaccaattcgctcgtttgcggacagtcgttcggcgagatccgcgtgccacacaggggcgacgttgtcgggaaggtgattgagggggcctatgaggttctcagcgtctttgaccgggtggaagagaaacgtgacgccatgcagtccctgcaactcccgtcacccgcacaacatgcactggctacagcggcgctgacataccgttttggggaagagtaccagccagtaaccgaagcgcaaattcttgcaccccgccgctggcaggacgagagcgatgacctgtggaccacttaccagcgcattcaggaaaacctgctgaaaggcgggctaagtggccgtaccgcgcagggtaaacgtacccacacccgcgcagtaaacgggattgatagcgacgttaagttaaaccgtgcgctctgggtgatggcggaaaacatgatggagctgttgggcaggtaa

SEQ ID NO: 177684 - DNA, 474 bp, Klebsiella oxytoca
atgacagatattatcaatattaacaataagttagctgtgctggttggcaatgacggttctgaaccaacgctgacagccgcgcccgtaccagacgaacagcgtgtggagttctggccgcagcactttggcaacatcccgcagtggataacccttgaaccgcaggtctttgcttggatggatcggttctgcgctgactacagcggcggtgtctggaatttttatactctcagcaacggcggggccttcatggttccggaaacggacaacgatgtcttctggtcgctgttcaacgccatgaacggcaacgcctcagacatgagcgccgaagctgcagggattgcagtctgtcttatcgcttacagtcatcacgcttgccgcacggaatgcgactccatgacggaacattactggcgtctgcgtgactatgcgctgaaccacgcagaatgcagcgccatcatgcgcattatcgactga

SEQ ID NO: 177685 - DNA, 141 bp, Klebsiella oxytoca
atgccgtatgaactgtctcaccttaatgccctgtgggatacgctgaggaatacaacggtcagggatgaggacggtgaccttgtgaccgacgaacccttcctgcatttcctgacgggtacccctctcttccatatctggtga

SEQ ID NO: 177686 - DNA, 483 bp, Klebsiella oxytoca
atgaatatcaccacgtgtccccctgacagcgggggaatatctcccaccgcgcagcgcaccatcaggcgcgctctgaccctgctggaacgccagttacgcgagcccggcgaggcatttacctccagccatgcagttcgcgactggcttcgcctgcagctcgccacactggagcgtgaagtattcatggtgctcttcctcgataaccagcatcgtcttattgcccatgaaacgctcttcaccggcaccatcaaccatacgcaggtacatccccgtgaagtgataaaggcagcactgaaatacaacgcggctgccatcgtgctttcacacaatcatccgtcaggttatgccgaacccagccatgccgacagattgctaactgaccatctgaagcaggcacttaaactcgtggatatctgtctgctggaccacctggtagtgggaggcatggacatcgtctcgtttgccgagcgtggctggctttag

SEQ ID NO: 177687 - DNA, 222 bp, Klebsiella oxytoca
atgaaaatcatcagcaaacgtcaggcaatggcgatataccgccagcattctgagtcccggctgtttcgcttctgtaccgggaaatataagtggtccggcagtatctgccattactacggcagggaagtgcaggatatccggggtgtactggccgtgtttgctgaacgccgacaggaccgcaacggtccgtatgtgatcctgcgcagcgtcaccctgaattaa

SEQ ID NO: 177688 - DNA, 360 bp, Klebsiella oxytoca
atgcagaaagcaacccgtgtaatcaaccataacatcgcggaaccctggtggggcctcagacgcaacgtcacgccatgttttggtgcccggctggtacaggagggtaaccgcctgcattaccttgctgaccgcgccagcaccaccgggacatttaatgacgcagatttacgccatctggaccaggcatttccgttactgatgaagcagatggagctcatgctgaccagcagcgaactcatgccccgcattcagcgctgcatcacgctccatgcaaaagggctgatatgtgaggccgatacgctcggttcctgtggctatttgtacatcgtaatttatccggcgtctgcaacaaccgcataa

SEQ ID NO: 177689 - DNA, 375 bp, Klebsiella oxytoca
atgcaaatacaatccctgccccctcaaagggcggcatcgtcacgtctgtcatcagtcaaaatctggcaaaaattactggagtatctgctggagcaacactacggccttaccctcaacgacacaccgtttggcaacgacagtgtgatccagaaacacattgatgcgggaatctcactgtgtgacgctgtgaattttatcgtggaaaagtacgacctggtgcgtactgaccgtcacggcttcagcgtgaaagagcagtctccgtttatcggcagccttgatatgctccgagaccggaaggctactgggctgatgacccgcaagggatataaaaccgttactgacatcacaggtggcagattcagcggagggaaataa

SEQ ID NO: 177690 - DNA, 321 bp, Klebsiella oxytoca
atgctgcgggaatgcctgtggatagccgcacattaccgggacactgaaacggtactcacccgacagtttcgcctgctggccgtgttactgtatctgggcggttattttccgaaaggaaatgtcgacggtatgctcccggagaaatgtttcattttactgaacgccccggaattaagccccatcctgacagacgatacggcccctgatgttctggcggcgtcctgccacaccctcttctacctcagacggatatctccgttaaggtgttaccaccatacgcgctgtctgagcgaacatctttttcaactaatggagatctga

SEQ ID NO: 177691 - DNA, 990 bp, Klebsiella oxytoca
atgaaaatcaacatcgatatcagcgtcatcattcctgccttcaatgcagctgacagcatcggagctctggtccatacactgcttggcgaaacaacgctcagtactgaaatcattgttgtggatgacggttcaaccgacgaaacatggacgctactcagcgccattacagatgaacggcttattctcattcgtcaggaaaaccagggcgtgtatgctgcccgtaatgctgcactggtgattcaccgtggtgaatgggtggtgttcctggatgcggatgaccgggttgcggcagattttctgcaggagcggctgcgcacagcccgcgaagcacaggccgatgtcgtccttttcaatgcccggcatacagacagcgccggacatctgcggcataccgttcaccgcagacagccttacggtcagacgctgacgggtcagcagtggatacgccattgcgtcagtcagagggaatggccgcattatctgtggctgcagataatccgttcagcgtatattcgcgagcatgacctgcgattccaagaagggaaaagccacaaggacattctctggacgatacagtttgccgccgcagatggccgattttatttctctgacagacaggattacctgtgggtgaataacccggcgtcaattacccaccgcccggattattacgatatccgcgcgttcagctattgcgacgtgattgcagatattctggcactcagtacacagacgcagtaccgatctgtcagacgagcgctggtcaggcatgcgctggtggaaagccgccattttctgggcctgtaccggcgcagggtgaatgaccggctggcggtccgggcgcgttttcgtgcgcggatagcctttcgccatctggtatccggcgtgagcaacctgagcgatgtctttttcctcctgaagctggtccgcaatatttatctgcctggtgtccgcaatactcccgcagccgtttcgcaggtgcggcgttaa

SEQ ID NO: 177692 - DNA, 321 bp, Klebsiella oxytoca
atgtttactctgttaacaactgggttaaccgtttcggattactacaagaatggcggggtacttgaatttgagttagatgctctggaggtcggcggtaatagcactgagtttgaaaccttccatagcttaaaaaacaagctgcatattggttttgagcttcctcccactgtcattattcacgaccctgcaattttggcgcagataatggcatcaagtgatagctggacaaaattgcatgcatatacatatgcgcaaaaaggtagtattgtttataagaagttaccttctgggctgtacaacgctcgttgtgagtggaattaa

SEQ ID NO: 177693 - DNA, 1191 bp, Klebsiella oxytoca
atggctcgtgatgaatctgaacgataccgttttattgataattccgaatggaatgaagatttttctctttctgaatccgccttattgaccaaaatactagaaatacatgaaaatattgataaagaaagattgcaaggggggactcataaagccccggttgatttttttaccccactaataaaaacaaaaaacaaactatctcctcttttcaatgagttggtatctaattcattatttgcttctgcaaagaatattattgaacccatgatgcgttggtatgaagatgcagatggtaatttcgtagagcaatttcagactacaggttttaatcaacgaatatgggagctgtatctattcgctctgttgactgagaatgatataacattcaatcagaaagaagccattcctgacttcatttgtgacagctttcaaggtaaattttgcatagaagctacaactgtcaacccttcaataatagagggtaaagatgaagaattgccacaatatcacagcttaaaagatttggaagatataaagaataactattatcctataaaatatggaagtgctcttttttcaaaacttaaaaaaaagtattgggaaaagccagtttgtaaagataagcctttagtttttgctatcacagactgcctcagtcctgcttccggtaaggattcccgggcgtcattgccatattatctttatgggtacagacatgaggccaaagtagacgatagtgggagtgtgacaatagttcctgttaagatcgaagagcatacttggggaaaaaaagtaataccttcaggtttttttaatcttccagaagcggaaaatattagcgctgtgattttctctaatgatgcatcgtttggaaagttcaatcgtatgggacttctaaatgaatttgcacctgaaggttcagagatgattaggacgggacttagaattaatcatgatgtcaatgcaataagtcctcaatcatttatcctggaagtcggctctccttcctaccatgagcaatggagtgaaggtctagaggtttaccataaccctaacgctttacatcctctatctaggaatgtatttcaagaggccgcgaatcattatttattagctgatgggaaaattaaaacatatttaccagagtttcatccgcttggttctattactaaagtaaaacatttagaataa

SEQ ID NO: 177694 - DNA, 1176 bp, Klebsiella oxytoca
atgtcggccgcaccattcagtcttaatagagatttgaagcgcttgcgcgaagaaggttaccacgtacacattgtaggtggtttcctagtcatgcgtgacgtgccgtatgttaacgcgcaacgggaagttaaaactggcacgcttatatcgagcctttgcatgtctggcgacgttactcaaaaaccggaaccacacacaatccactttgatggagagtttccatgtacttcccagggggagcgcattcaggctatttttcatcagagtgaagaggtaaatcttgggcatggactgtctgctcagcacttattctccagtaagccagggcctgaaggttacagtgactaccatcagaagatgtccacctatgcgacgatcatttctggccacgccgccaccctcaaacctggcgttagtccacgtgtttttaaaacccctgatgatgaggaagggggcgtatttaactatcttgaaaccgcatctgaccgggtcgggatcggggcattaactgcacgacttgaaggtcaacacattgccatcattggagtcggtggtacaggttcctacatactggaccagatagctaaaacgccggtaagtgagatacgtctcatcgatggtgatgattttcttcagcacaacgcttttcgcgcacctggcgccccgtccattaacactctcagggaagtgccgaagaaagtcgattacttggccggaatttacagtcagatgcaccgtcatatcgttacgcatgcagtacagataagcttggataatcttaatctcttggatggaatcacctttgccttcctttgcatggacgcaggcgagccaaaacgtttagcgatgcagaagctggaagatatgggcgtgtcattcgtagacgtgggaattggactcgagttggtggacggatcgcttggcggcatcctgagggtgacgaccagcactccagagaagcgtgaacatatccgcacccgtgtgtctgtcaaggagagtggtgcagataacgtttacgcttcaaatattcaagtcgccgagttaaacatgttgaatgcggcacttgccgtcattaaatggaagaaactactcgggttttatcgtgatcttgaaaatgaacaccactgttcatatacgactgacgggaatatgttactgaatggtgacttgctatga

SEQ ID NO: 177695 - DNA, 756 bp, Klebsiella oxytoca
atgaacagccaaaatattaacaatatcgacgatgtcggagaagctattcgcgaaggccgcgaactacgtccggctactgcctaccgcatcctgtttgcgcaggaaaacctagattttcacgcgattgtagtcaatgacccagttccactgggtcgacaaattctgattgctgcgggtctgcgtgcaaataatgactatagcctctttgccattcttcagacgggtgactttgaagatcttcgccttgatgaaccttttgatttacgcggtcatggcgctgaacgtttcgtggccttccagactgatcgtgatttcaaacttactgtaaacgacagccaagtatcatggggtaaacctgcaatttcgggggcagcactttatgaactagcaaaaccaggcgacggcgatgccgtatttatggttgtccgtggcggcgatgatcgccagattgaaccgaacgaggcggtggatcttacgactccgggaattgaacactttgtaacggcgccaaagcgtaaaccaaagattgatatcgtcgttaatggacgtgaagttcaggtcagtgatagtcatcaaactttcgagcaatttgtggctatcgcatatcctggtgaagctccaactgctgagatcgtatattcaattacatatcgtggagcgagctcaaaaccacacagtggtgagttagctgcaggcgcctttatcgaagtgaaaaatgggagcgtaatcaatgtcggccgcaccattcagtcttaa

SEQ ID NO: 177696 - DNA, 3393 bp, Klebsiella oxytoca
gtgcaagcagtggaactggctcgtaaggccgctgctgctctacatgatcaggcggttgattcaggacaaaatccatggactccctatgagtttgctgttgctgaagccaacagacgaggccttgatgtagagagcacaagaaaaggatcgcctaacctgagaggcgcgcgtgctcgttttattccagaagagatgtttattctccacgaaaaatgcgcaactcgttttgaacaagcattcctcgtcgctcatgaaattggtcacgctgaacttggagatgatgtcgaagaggatgaacagagttatacgatagatcccacaaggacgtcggagtcctccccgctgggagttgagcgagtcgtagattacagtcgcagacagcgaagagaggtccagatggatctttttgcgcgcgagtttttgcttcctagacattttgttaggacgctttatctagagggccaaagtgcttcaagtattgccgaaaagcttggagcgccatttgacgtagttgctcaacaactttttgatgcactactgttacccccgactttgcctgaaactccagagtcagcaattgaatttcctttaaacgatgagcaggctaaagctgcagcccatcgtggtgttgcctttttgctcgaagccggaccaggcacaggaaaaacacagacattggtaggccgtgtaaaaggactgcttaatgaaggggttgatccccggaaaattctcttgctgactttttcaaataaagcggcaggagaaatggctgaaagaattgcccgtgtcgatagcagtgctgcagctgcaatgtggatcggtaccttccactcattcggactcgatttggttcgccggtttcacgataagttgaatctgccacaatccccccggatgttggatcgtacagaagcagtagaattgctggagcatgagttcccaaaattaggacttgttcattatcgcaatctttatgatccaagccggattatagcggactttctcaccggcatttcacgtgctaaagacgaggtagtcgatgcaagcacttacctgagactggcgcaggccatgcgcgatagcgctgttgagagtgatgctgttatcgatgcagagaaagcgattgaagtcgccaaggtgtactcagcttatgagaatcttaagcaacagtctgaatgtatagactttggggatttggtttcattacctgtaaagctacttgaagaaaatgatgctattcgcacccatatccaatctacctatgaacacgttttggttgatgaataccaggacgtcaaccacagcagcgtgcgattactgaaagctatttgtggtaatggtgaaaatttgtgggcagttggggatgctaagcagtcaatctatcgttttagaggtgcctcttcatttaacatgacacgctttggaaatgaagattttccaggcggggtgcgatatcggttaaaaatgaactaccgatcggtacctgaaatagtttcaacattttcgagatttgcagtgggtatggctgtaggggatgctgatagcgggctacgccccaatcggggcagtaatgcctgcaaacctgaacttcgctttgtgggacaaggcgttcaacagtcaccagctcttgcggacgctatacaggaaatgcggagtgccggttacccatatcgtgatcaggccgttctctgtacaggcaatgaaaaactctcagaaattgggcaacaactcgagcgtttagggatccctgttcttttcttgggtagtgttttcgagcgtccagagataaaggattggctgtcactgctttcccttttagtggatagccgagcaatgggcctggtgaggatggcttgcctgccagaatttacgatgtcgctggaagatgtcggaaatattcttgcatgcctgcgtgaagaagatgacaggggggattggagagttaaagtagatcagttccaaatctctgcaaatggccgtacttccttaaagcggctgattaaaacacttgacggttttaacggcgatacttcaccctggactgttctggccattgttcttttagacaggactcgtattgcagctcgcttggcaacttcttcaggttgcagtgatcgctcccaatgtattgcaacttggcagttacttaatttcttgcgagtgcagccttcaaccggcgaaggattatttatcactcgcacattagatcgcatccgccgtttagtccgactaggagacgatcgtgacctcaggcaactcccggtagcggcacaaagcattgacgcggttcgcctcatgactatacatggctcaaaagggcttgaattttctgtagtccatgtcccggggatgaatgcagatacccttcctggttatacgcaaaagcaagcctgcccaccaccagatgggatgatagtcggtagtaaggcgaatgccagggagcagtctagtatggagcacaaggcggaaagagaatgcttattctatgttgcattgtcgagagccagggaccagttattcctctatgctgcactacgaaacgctgcaggtagtacccgaaagacatccgagtatctggatcgtcttgagcccaatctgattcaaagaaacatagagcctcatcatccggtcattgagcctcccgaatctttacctatagactgggttgcggatggagaactaaaacttagtggtgatcaggtctccctctatgaatcttgtcctcgacgatttttctatactcacgtccttcaaatcggggggcgacgatcaccaaccccattctcaaaaatgcacgatgctgtccgaaaagtgttcaaggatataatcgagacagagtctgcaataattacgaatatagaaggcagcgttgatctggccctcaaagttgaaggtctggctgagcacggatatgcccctgagtttaagtctctggcacttgacatggtcagatattttaattcaattcgcgaaggtcacgcccctgaaacacccagtgtactcacgatgaagttcggggatatccctatcaccgtagaacctgacgatgtcttgatttattcagatgggcgacgtacgtttcgccgggttagaaccggacataaaagagataaagaagaatcggaccttggcgcagccgcttttatactggcagcacggagagcctttcctgaggcaatagtggagttagttcacctttctgataagaccgtaacgccgattgatctgagcactaagatgctacataaccggcaggaaaagcttcatgttgccttagactctataagtcggggggtatttcccgccgaatcatcatcgcgagtctgtccctcttgcccggcattttttgtctgcggattgacccctccaggagcgcttaaaaaaaaattctaa

SEQ ID NO: 177697 - DNA, 582 bp, Klebsiella oxytoca
atgatgaccggactttcacctcaggcatccctagaagaggtactggagtcattttccatagagcatgatgtgggaaaagcgactctgcaaaagtaccttgcagacttcccggaatatgccaatgacctcatagatttatctcgagagatagccaggatatcaatcgaagatgaagcgccactctctgagtcccagagccgcttaatcaattttgctaccactcgtatccaaaattcacctggcaaaacagcggaggacccctttgctagactctcggcacaagaaatgcgaggtctctctaaatcgctaaagatacctcgacagatcgtcatggctttcaaagagcgaaacgtagtcgccaaatctgttcccagaggttttctggtcaggtttgccgaaaaacttcagatcagcgtactacagttatttacttcgctcgagcagccgcacatggaggttgcagggagttataagtccgaatctaaaccaggtgaagcagagaagattactttcgaacgactgcttcaggatgccgggttgtctgaggaagaaatcagaaacttaatggaagaggacatataa

SEQ ID NO: 177698 - DNA, 486 bp, Klebsiella oxytoca
atgctggatagcgacattcaggagagtgtctttgaccgtatcgttgagatgcttatgcttgataaagcagggtatgaagaacggttggacatttttgaaatccgttttgatttggccttttcaaatttaaaaaaagatgctcaggagaagtcttatcggtcggaaaataggaatactgagcttgagtacgatgattcagaggacgtaactatagaggttgaaactgcttctaaaggttttaatccttttgaagaaacagatctcaatcattttcattacagccgtgagcttgatgcggcgattgagactttacccgatctacagaagcgaatcattgaaatgctccgattagattttccaatagactccatcgacccgcaagagataacgatttccaaagctctaaacaagtctgaaaagaccatccataatcataaaaataaggcgtttgcacgtcttcgttcactgcttgaagggggcatatga

SEQ ID NO: 177699 - DNA, 540 bp, Klebsiella oxytoca
gtgaacgccctacaaaactttggaaaatccctctatgggccggtacttatcttgccgatagtgggtctgtttatcgcttttggcaacgtgttgggcgacggcaaccttgcgaaatatctgcccttgctcggccatccttttattcagaatatcggccagctcattgctaaatcagcggtatcggtactggtgaacctggcgctgatcttcgccgttgggatccccgtaggcctggccgcccgcgataaaggctacgcggcgctcattggcctggtgacgtttatcgtctttatcaacgccatgaatatcacactgcagctgcagggccagctcgcggcgccggaacagatgaaagcagccggccagagcatggtgctgggcggccaggtgcttaagatgggggtcttcgccgggatcctcaccggcgcgctttcgggctacagtcttatatcggttacgggtatgaatcttacgtattcggcctgccaccctgcgaatgcgccaatctgccggtgcccgctatcgacgatcagggaatga

SEQ ID NO: 177700 - DNA, 1203 bp, Klebsiella oxytoca; identical to SEQ ID NO: 173591

SEQ ID NO: 177701 - DNA, 669 bp, Klebsiella oxytoca
atgcgtactcagttattttttaaggtcgccgcgctggctggcctgttagccctggccggttgttcatcaaaactggctaaacctgaacaatattccggttttttaaaagattactcaggtttaaaagaaaccacctccgcttccggtaaaccggagctgcgctggatttctgcggattacaatccgaacaactatgacaatatcgtttataaccccatcacctattatccggtccctaaaccgacgacccaggttggcgaaaaggcgctcagcgatatcctgaattacaccaacaaagagatgaaacaggctatttccgagcgtaaaccgctggctaccaccgcagggaaacgcagcctgatcttccgcggcgccatcaccggcgtggattccagcaaagaaggcctgcagttctacgaagtgattccggtggcgatgattatcgccggtacccaggcggcaaccggtcaccgtaccatggacaccaacctgttctttgaaggtgagctgattgacgcggcgaccaaaaagccggttatcaaagtggtccgtaagggcgaaggtaaaaacctgtccaacgaaaatacgccgctcaccgtcgagaccctgaagcaggtgatcgatgatatggcgattgacgcggtgaagttcgaccccaataaccgttaa

SEQ ID NO: 177702 - DNA, 1593 bp, Klebsiella oxytoca
atgcaacgcagattcacgacgcttgctctggcggtagcggccctgacggccagctcagctattagcgcaaaaacgctggtctactgttcagaaggatcgccggaaaactttaaccctcaactctatacctcgggaaccagcgtggatgccagcgcggtaccggtctataaccggctggttgactttaaagccggtactacggaattagtgccgagcctggccgaaagctgggaagtcagcgaagatggcaaagtttatactttccatttacgtaaaggcgttaaattccagagtaataaatatttcaaacccagccgcgattttaatgccgatgatgttattttttcatttatgcggcaaaaagatcctcatcatccttatcacaatgtctccaacggcaattattctaattttgaaagcctggagtttggtcagttaattaccgcaatcgataagcctgatgaatatacggtgcgttttacattagcgcatcctgaagcgccatttgtcgccgatcttgcctggtattttgcctctattttatcggcggaatatgccgatgcgatgttaaaagccggcacgccagaacgcgtggacatggacccgattggcaccggtccgttcaaactcgcacagtatcaaaaagattcccgcattctcttcaccgctttcccggaatactggcaggggaaagcccatatcgatcgcctgattttcagcatcacgccggacgcttcggtgcgttacgccaagctggagaaaaacgagtgccaggtaatgccgttccccaatccggcagacctgccgcgaatgaaagagaacaacgcgatcaatctgatgagcaaagcgggcctcaacaccggtttcctggcgtttaatacgcaaaaagcgccgctggacaacgtcaaggtgcgccaggccttagcgatggcgatcaataaaccggcgatcattgaagccgtcttccacggcaccggtacggcggcgaaaaacctgctgccgccgggggtatggagcgcggatagccagcttaaagattacgagtatgacccgcagaaagcgcaagcgctgctggtggagtcgggcgtttccgggccgataaccatcgacctgtgggcgatgccggtgcagcgtccttataatccgaacgccaaacgcatggccgagatgattcaggccgactgggcgaaaatcggcgtgcaaactaagatcacaacctatgagtggggtgaatacttaaagcgggttaaggatggtgaacaccaggcggcgctgatgggctggaccaccgcgaccggcgacccggataacttctttggcccgttgtttacctgccagtcggcaaacggcggctctaactcggcgaaatggtgctatcagccattcgataacctcatcgccgaggcgaaatcgataaccgatcgccaaaaacgcgagacgctctatctgcaggcgcagcagatgatgcacgaccagatgccggcggtgatgattgcccactcgactatttttgaaccggtacgtaaaaacgtttctggttacgaaatcgaccccttcggcaagcatattttttatcaggttgatataaaataa

SEQ ID NO: 177703 - DNA, 1380 bp, Klebsiella oxytoca
atgattcgtccgctcaccctcgccgttattcttgcgctggttggctgccagtcagctgatatcccacaggccgcgccgacgctgcatattcccgccgcctggcgcgcggatatcggccccgccagcccggtcgagggcgtgtggtggcgcaattttcacgacagtacgcttaatcaatacgtcgaccaggcgctacgctacaacagcgacgtgctgattgcccgcgaacgggtcaacgagtaccaggcgcgggtctacgccgccgacagcagcctctttccttcactagacgccggactgaccggtacccgcgcgcggtcgcagtcggccgccaccggtctgccgatccacagtacggtgtataaaggcgcgctaaccgccagctacgatgttgatatctggggcgctaaccgcagcgccgccagcgcggcggaggccagtctggcggcgcaaaaagccgccgccgcggcggcgaacctgaccgtcgcctcttcggtggcgacaggctatgtcactctgctctcgctggacgaacagctgcgggtaacgcaacaaacgctcaaagcgcgggaagatgcctttaatctggcgaaacgtcagttcgagaccggctatacatcgcgcctcgaactgatgcaggcggattccgaactgcgctcgacgcgggcgcaaattccgtcgctgcaacaccaaatcgcccagcaggaaaacgcgctcagcctgctgctcggcgctaatcctggcgccgttaagcgcaacgcctttgcccagctgacgccgctgtcgctaccgtcccagctgccgtcaaccctgctcaatcgccgcccggatatcgttcaggctcagcgtcagctggtggccgccgacgccacgctggcgtcatcgcaggcgcagctgctgccgtccatcaaccttaccgccaccggcagcatgcaggatcgcactctgcccgacctgctggataatccgctacgcttatggagccttggcggcagcatcctggcgccgctgctcaaccgccaggcgctgaatgcccaggtagacgtgtcgatggcccagcgcaatcaggcgttgtatagctacgaaaaaacggagcgcggcgcgtttaaggaggtcaatgacagccttgatgctattggccgctacggggagcagctgacggagctgcaggcccaggaggacgtagcccgggagacgctgcgcattgcccaaaaccgttatcgcaacggctactcatcctatcttgacgtcctggacgcccagcgtacgctgttttccacccagctcagcgtggtgcaggtgaaaaacaatctgctgctggcgcaagtcgatttgtaccggtcgctgggaggcggctggtctgattcatcagggatgtaa

SEQ ID NO: 177704 - DNA, 660 bp, Klebsiella oxytoca
atgcaacaacagtggtcggcagtagataattatctggtggaagcgttaatccccaacgatcccttgctcaaccaggttctggaaaataaccagcgcgccgggcttccggccatcgatgttgccgccaatcaggggcagtttctggccctgctggtgcgcatgacgggcgccagacgcatcctcgagattggcacgctcggcggctacagcaccatctggatggcccgggaattgcctgcggatggcgaattagtcaccctggaggccgatgcgcaccatgccgccgtggcgcgcgagaacctgcgcatggcgggcgtggataagctcgttgaggtgcgggaaggcccggcgctggccacgctggagaagctgggcgaccatccgccgtttgatctgatctttatcgatgcggataagccgaataacccaaactatctgcgctgggctttgcgctactctcgcccggggacgctgatcattggcgataacgtggtgcgcgacggcgaagtgaccgatccgcatagcgcagatgaccgcgttcagggcgtcagggagtttattgcgatgatgggcagcgacccgcgcctgacggtaacggccctgcaaaccgtgggcagcaaaggttgggacgggttcaccctcgcgtgggtgaacaattaa

SEQ ID NO: 177705 - DNA, 390 bp, Klebsiella oxytoca
atgaagaaaatgattttactggtggcgctgttgttgaccggctgctgcatgattttccccaatcgtgtctctgtctatccggataaactgcccgttgcggtggcaggcaagaaatactttgcggtgatttatatcgacggcttaccgctgacgggaatggcgattaaaatcggcgagggttatccagatgtctatattagtaatgggctgaaaattgcccgggataaagatgatcggaaaggtcgggttattatctccggcgttcctgagaatacgggggagataaccttcagcgtgagcggcggcacctacggtacgcagtgtccgggtgccgagtttgccaaggaatatacgcttaaggtgatatctgataccaaaacggtcagatga

SEQ ID NO: 177706 - DNA, 270 bp, Klebsiella oxytoca
atgaataatatcaaaatgatcacactcttccatccatatgacaaaacaccatttatgatatgtattgtaaacaaagtagaaaatactgaacatggaataaaacttactcttgaaaacggtaatgatatttgtgtaaataattacagccattatctgttatcagagtctgtaagtcgttgcgataaagacaggttaaagaatatttatattcgcttggtttcagaacttactctgatgagtgaagatactataaaatcacagatgttataa

SEQ ID NO: 177707 - DNA, 984 bp, Klebsiella oxytoca
atggaaggtaaattaattttctgttcagatgcaatactgcggtttcagtccgattacgatgaaacctcggctgttccgttgctttccatacagaacgcgatagctgatgctgatcccttttttcttctacgtttcttccaccatactgttctgattgaagaaggaacaacactggcaagtatcttcttgtctatagagccgtggaaggcactgttagcggcttatctggacagagatgttggtgcctatattgatgaggtaagaaaaccgtcagagccaacgaaatgggatattgaatggatcggaattgatcgtcgaagctcggtttatcgcgcttacaagcgtcaggatatggaagaaggggaggatttttcaacctattttaatcgcgagcggtttccgactgatgagtttgacatagaaagtagctgcgatgcttcaggcttcattaaaggcgataaagaacgctggagtatcagcggtgatgttcaacaaattaaaaatctgcctgtgatcctctatagcaaacagacgctgacggcttcgtcgaaggacggattgttgaagaagaacgtatcaggggtgaagagttccaagcatagctgctttgtttatggcgatacctcgttttctttcagtgaggtaatggaagctatcttcatcagtgggctgttcttctatgcgccaagagacgccgccagtagtcttgatgagctgaaagcgagtgtggctgagttggaagaagaactggccgaggtatcaaaaacggagctggtagccaacgaaacagataaagaacctactatagtcgtagccgaaggtgcttttgattcggtcgctgctcatatggagtcagaagctgaagagtggcaatccatcaagaagctgtgccagcgagaaggtgagctacccatacgcataggtagtattaagatggctgagcctgctgagctacgcttgtgtgggaaaattatacgtggatag

SEQ ID NO: 177708 - DNA, 918 bp, Klebsiella oxytoca
ttgaacattaaagcaacaccagtattaatctcacttgtctacgaagctcttttaagatccttttggcgtaaaccggcactaaagaaatttttattgtcttcacatatttccgaaaacttcatttcaacgtggagggaggacgagtcaaagagggctttcttagatcggttattccctaaactgcaaagtaatgcaaaaggtaataatgttatttgtctgatggcaattaatctttctgaacagacttcttttccagatttaagaggctgggaggattccttacaaatgatccagtcggcaaccaatgctgtgagagatttgaaatcctatattacaaaacaaaatgaagagcatcagaataaaaaagaaaaacaagaattcagggcgcgagcagaaaaagagagggctgaaataaaacgttccgaaacggatttgattaagttaaaatctgagtttgagtgtttgcataatgaaattggaacacaaaatggtggctatgagtttgaaaaatggttctttaagcttgtagactactgcgaaatcgtttgtaaaaagccatataaaactgatggtaggcaagtagatggagccataactattgatggtacaacttatcttgttgaattaaaatttcaaaaatcacagtctgatgctacagatatagattcattaaaagctaaagtaagtaaaatggcagataatacaatggctgtaatgatttctgtatccggttattcttctgttgctataaaagagtcatccggtagccgaactcctctaatattattagactttaaccacttatatttatttctttctggtggcatgaaattcgatgagataatcacacgtataagacgtcattcatctcagactggagaagcttacctacctgtaaatttattcgggggattttaa

SEQ ID NO: 177709 - DNA, 378 bp, Klebsiella oxytoca
atgaaaaaaatgctgattgctgtattgactattcttccacttgccagttgtaccgtacatgataataaatctcttattgatgaaaatcatcagacggtaaagctaaagatcgtcaaggggaaaaccactcaacaagagatcctcaccgcgttcggagaaccacagacacgcgccacgaatgatggacaagagatgtggagctactccagtatgacgggagaaagccagttatctaactatgttcccggccttgctttactgactaatagcagcacagcacacattaaatctctggatatctggtttaagggtgatgttgtagagcgttataattttagtcagacagccagtaagacttcacgtggtttgatggattaa

SEQ ID NO: 177710 - DNA, 474 bp, Klebsiella oxytoca
gtggaagcagtaggtattatatttttggtagtgattttcatcattatattgactttttctgatatacaaaagaaaaagcactacaacagctttattgaagttctggatggagacattttatcttatcaatgtcagcgaaccgggatcgtcatagacaccaaacagcgcaccattcgttttttcgataaagaaagagacaagacatattcttatgacaatatcagagagatcaattatacgctttcagagggaggtaagttttacggcaatggaacattgaaaggcatgaataatgcggctattgctaactggagagaacaactttcagctaatcaacgttctggcctaaatattttaaccgatgatattaaaaaccctatgtggaaaattaatgttcccttgaagaacaaaaccacttcaaaccaagaactctgcgaacgctggcttcttgtttttaaccgatatgttttttaa

SEQ ID NO: 177711 - DNA, 531 bp, Klebsiella oxytoca
atgaagaagattttactcgttgctggcacagttctagcgctggcgggatgtggtgaaaaaggcgatttcgagaaagcgatcaacgctaagatcggacagaccaaatactgcttctcgctggataataacaacaccagtttccccatccgtcttgccaagccacggcttgattcgactggaaccgggacgaattcggtgatcctcgatggatttgttgagcagggaatgatggtctttgagcagggctatgattcgaacgtattagggataacagacgagggattaaaagccaaagtctggagcacaacagatggtgcttgtgtaggtcgtcgtgccgttgacgaaattaaggaatggactgaaccgggtgaaggcggtcagaaggttgttcgcgtgtcatatacatggaagctggttgacgttccgggctggatcgacaaaaaagcgttcgccaatgttaaagggatgaatgaacctgctgatggtgcaatgaatctctttaaaaccagcaatggctggaaagctaactaa

SEQ ID NO: 177712 - DNA, 975 bp, Klebsiella oxytoca
atgtcttctatatcaaaaagaaatcgcaataaaatggcaaaagtccagcaaagaaaactgcacacaggtttatccaagcgaaaagaaaaaagaagtgctatatataacagtttaatttccttagaagaaagccaaaaaatattaaaatatttatcatttggatttgagaaggatttatataaagcatcattgaataatttgagcgacaaaggaaacccacttcgattcaataactttgcatattgcatgcgagaaataatatcgctgattttatctcgatactctaccgacgaagatatattacggtgctgttggtatactaatgagaccgatgatgaaaacggcattaccagagcacaacggtttaaatatattatccaaggcggtttaagtgatgataaattatctgaattgtttcaatttgatgaagatgaagatgaagaaaaccatattgctaaaagattgaaagagtttactaaattatttagagagctaaaccaacatactcatttaagagaaacaagatttaatattggtgataaaaaatgtgaagcattggctcatgctgtaatctccacagtattcaacatattaaaaacaatggaagatctacgtgatattatcaataaacaggtggaatctgtgattgatgagatccttttagaagaattcattagccaaacctatgatgaaatagacgtattatcatcacactctaatgtggataactttgaattagactcctatgctgtatcgaaaatttgcagtcagtttgtgttaattcaaggccaagggattgcaaattgtgttcttcaatgggggtcaaactcagatatgaggaatgatattggtgcaacaatggatgaaagctttgttttcgatttttctatacaagcttcattagataatttaagaaacttatcattagccccccaaggtatagtaattaatacatctccatggtggaatgactaa

SEQ ID NO: 177713 - DNA, 1491 bp, Klebsiella oxytoca
atggcgatttttcatctggattttaaaattgtgaaacgaagcgaaggcatgacttccgttgcgaaagctgcctaccatgcccgtacacgtattacagatgatcgcattggacaggttttcgattttagccacagaacagatcttcatggtcatattatattagccccggtttccgcacctgctcatattgttgaaagctcctcagtattgtggaatgaagttgaaagagtcgagcgtcaacaaaatggacaaacagcccgttattttgatgtcgctatccctgtagaattaaataacgatgacaagaaaaaattagttgccgaatactgccagaagaactttgtcgataaggggatgattgctgatatcgtttttcacgatttagacggtaagaatccccatgctcacgttatgttgacgctgaaaactatcaccgctgctggttttggtaaaaaagacagaagctggaatgacaagaagatggttgttcagtggcgtgagtcgtgggccacgatgtcaaacagctaccttgagaccgcagggagtgaggaacgtatcgatcatcgttctctcagaactcaatgtgccgatgcccttacccaagcagaagaagcattcagcgctgaagaaaaagcattctggcttgccaaggcaaccaaaacaaaccgtccagcaatgcaacgtattcatcgcgctaaatggaatgacaccaagtcacaggagcaacgagctgccgaacaagctcaacgcaatcagcaaatagaggaagcgaagaaggtctataccacattcagtgaactaccactggagatcgttgttgatgtcagaagctttacgattacacatcttgctgaacccgaagaaattattattcctgacgactcgacagtagaagaacatcagccaattgtggcaacaccagctacaagcagaagaccagcagcaaagtcttatcgtgatcccaataagatcagcaaagttggtgctgcagggaagaaatcccctgttctggttgctcctgaaccaaataaatccactaaactgaaaaccccttcttctcgaaacaccagagcgaagaaccgtgctcccatgagcaatagaaagcaggttaaaccgattcagaatggtgtcttcaagcgtttcaccttacttgtggttggcttcttcaaagagagatttgtatgggccagaaggaaaaccgataccactggtgctgaacatgataagcgtattgctgaaaattatgtgtttgatgaagtattgggtgtctctattccacgctcagagtttgaaagacgcgctaagtttaacaatgacccggtatcaccagaagcaggagtctatggcaatgaatcagataatgacaagaccgttcgtttcccaagtcgtcctaagaaaaaacagtccgaggttaataatgatttaattttcattgaggcaaaccagccagataatataaaaaaccatataattcaaaaaccaaaaccataa

SEQ ID NO: 177714 - DNA, 306 bp, Klebsiella oxytoca
atggataatgaaagtaaaagatcaaaaacagaaaaaacattaaagcaaaaagtagcatttgctcaacttgaacttaaccgtcttaagtcaatggagaaatcagagaaaaagaaagttgaaacaagactcaagattattcttggtgcggaagtagccaaggctatgaattgtggtgttgaagacgtggataaagaacttgttatgggtattttactctcagcatctgacctgaatgatgttgaaagaataaaatatataaaagcagggagatggtttctagctcaaatggatggaagacagaaataa

SEQ ID NO: 177715 - DNA, 558 bp, Klebsiella oxytoca
atgattttattaaataacaaaagaaaaaacaagaaaggtttctcattactcgaattattacttgttctggggattatcgcagcattagtggttgcggcttttattgtgtatcccaaggttcaggcttcacaaagagcgcaggccgaaagtaataacattgccaccatacaggcaggtgtcaaagcactctatacatcagcatccagctttaccggactaacgaatacagtggctgttcaggcaaaaatctttcctgacaatatgttgagtggaacaggtaatacggcaaagcccatcaacgcattcaaagggaatgtgacgttggtggcagcggctacaggaccatcatcagcggctggttcttcttttaccattacttatagcaatgtgcctgcggcagagtgtgtgaaaattgcgacggcagcagcaggtaatttttacattgctacggtcggaacaaagatagttaaagctgccggtggaattctggatgttgcggcaacagcctcagcatgttctaacgccacaagtaatacattggtattcacgtctatttaa

SEQ ID NO: 177716 - DNA, 576 bp, Klebsiella oxytoca
atgataaagaaaaaaggatttaccttattagaggttatcatcgttttaggtgttggtagtcttattgcttttatgaagtttcaggatatgagaaataatcaggaaacggctatggctgaaaatgtcggaacacaaataaaacagcttggtgaggcggttaaccgttatatcagtattcgatacgataaggtttcaacgctgtcatcttctcgcaatcagagcagcgatccggggccaagaacctgtacggctaatggctgtgaaatcacttatcaggcgctaattaatgaaggattgttgcctgtaggctattccggaaccaacgcgcaaaaatccacgtataagattttgttaaagcgttcaggagcagcgcctgattacgtgattaatggtctgataacaaccagcagcccttggaaagaaggtgggcgcattcgctatgacctgctgggtaaagctgttcaggctgcgggtgttgatggtggtatgagcagaagcaccaagatcgcttctggctacggtggtcagtggagtgagagttcagggaactacagcaatatcactgacggtggctaa

SEQ ID NO: 177717 - DNA, 201 bp, Klebsiella oxytoca
atgatcactgttatagtaattacagaaggctatatgcatgcaagtaatatttcaataaaattgagcaagcagtataaatttatactgcttgctcagtgctcagttcttccgacgttgtcttactattttagctttcgcaataatggcagtaaagcttactgccaattggacggattgagtggaatctatgcaagcatttag

SEQ ID NO: 177718 - DNA, 1704 bp, Klebsiella oxytoca
atgcagacaaatcatgaagttaacatcatatcagcaatggaaagaagtatcgttaactcagcactttgggctgctgcaggagatgctttgggctggataaccgaactttctcatggagaaagcggggttaagcgtcgtataggtactactaaggtgtcccggacggttccctgggaaagagtaatcggtggtaaaggaggggctaaagcaaaactgcctgcaggtacgtattctgatgatacccaacttcgattagctgtatctcgttcgatacgagaaaatggtttttttgatgtagagagctttgcaaaaattgagcttaccgtttggcttagttattctcttggaggggggctcggcaccaaagcagcagcaagaaatttaaccaagagatcagtgagttggtttacaaacttttttgaaaataataagcaaaattatttttatagcggcggaaatggcgcagctatgaggatacaaccacatgtatggagttctttcaataaagaatacagagaaaatctctatctcaacattctaaaagattcgttagtaactcatggacatccgcatggattttgtggagcaatatttcatgcaatggttctttcagatactataaagaataaaagaatcccgtcaccagatgcttggatttcatatgcaatgcaattatccatcattccagacatcgttagagatgactcccaacttaacactttttggttgacctcttgggaacaaaaaaataattgttcgctgagggatgccatcgaaaaagtccaatcagaattgatttctgacatcgaaaaaatagatgggttagtaaaagtttcaggcaatgaatactatcatgaaattctgtctcgcttagggtgtttaacaaataaattccgtggttctggattaaaaaccgcattagcatcaacagcactttcgtatatgtttaaaaacataggggttcaagatgctttaatttgtgccgctaatgagttagatagtgatacagacacaattgcgacgatgtgtggtgctatattaggagcaacagctgctcatactccagactgggatattcaagatcaaaactacatacaacatgaaaccttaagattgctaaatgttactgcacaggaaaataataaatctttcaattatccagacgttggtaattggaaccctccggtgaatcaagttgatactattggatattataataatgaacttgccattgcaggcttaggttatattacaccaataaataatgaagaatttcattctaatgatgcagtatggcaatggtattcattaccatttggacaaacgattttagccaaacgtcggaaaaatataactcagaatttaaccttcgagcaatttccgagggaattggaacaatctcatattccatatcgagatatagagtcacaagtaacggaaaaacaggataattcattatcccagtatccgttggagtttaataaatcaagtactcgtaatgagttaactcggcaggaacaaaaaacagaaaaagaccccttagatcaggctactgatgacgttatcaattcaaactttgacgacctaacattaggaaggttactaaatgcttgcatagattccactcaatccgtccaattggcagtaagctttactgccattattgcgaaagctaaaatagtaagacaacgtcggaagaactga

SEQ ID NO: 177719 - DNA, 651 bp, Klebsiella oxytoca
atgattaattttgaagatagaaacatacaggaaatactgcacttcacgactaaccgaggattacttggaacacttgtaagtaaacaattgctgtctagatgtagattatcagacgataaattattacaacatatcctctatccaaatgcagtaatacgccctgaagaatctgaattctttgataaagaacaaaattggatcgattttgtaaatctctctatttcagaaattaataaaagatattttgatgtatcaaatagatggcataaagatagaaatatatggtggtcaatattatcatttgacccagagattttaaatcatcccaatgtttttttcgcaacaactaataattcatacgaacattgcatgagaagtagcggtcaaatcggctttgaaagtctctttaaaccatcaattagaagaaaaggcacttggcaagcaaatcgatccaacagaccaatacatttgactacgtgtgaacaagccgaagtcctctaccctcggagtgtatctaccgattggttgagacgcatatatgtcatagatgatgaaacacatgatatagtcggcggatggttagatgagtttggattcactgggatagagatagacatttccccagctaaatttataggaaggcataactaa

SEQ ID NO: 177720 - DNA, 1404 bp, Klebsiella oxytoca
gtgaaagctttatcgattgttgttccaacccctgagcaactggctcttgcagggcaaaacagaccgggagttgaggttatttacggttctgctggaagtgggaaaacgacaacagcactgctaagattaaaatcattatgttatatgattcagtctcgacatcgaagagagaatatatcatccgcaataaacatattagttttaacatttaatagaacactttctggatatattaaaaacctcgtggagcaccaactagatgctaatattcaaacaaatatagaaattaatacattcagtggttgggcttttaacaaattatctagcaggcctcagatagcagacactccaagtgatatcattttccgcttagctaataacgccaacattctgtctccacaatatgtaactaaagaggttgaatatctcttaggacgttttttacctgaaagtataaataattatttagtaacagagagaacagggcgcggcaatacccctagagtggataaagaactcaggatacggattctaaatgaggttgttaatccttacaaagaaaaattaagttcatcaaaaaaaattgactggaacgatcttgcaataatgatggctcgaaatattccttcgctgaactatgaaattgttattgtggatgaaacccaagatttttctgcgaatcaactacgggccataaagtaccatcttgctgattatcataccgttacctttgtaacagacaccatacagcggatttatgccagagggtttacttggattgaagcgggctttgatgtccgtcccgagagaacacataaattaaagattaactatagaaatacgaaacaaatagcaaactttgcggcttcatttcttaaaggtgtaagtatagaagataatggatcaattccaaatctacatgaggcagtatgtgaaggtatgctaccagaagtcatttgcggattctataatcaacaagtcacatatgccataaactttattaaaacaagcattaatcttgagaacgaatctatagcatttttgcatcctctcggtggaggatacttttcatatttagaaactatattagagaattcaaaattaaaatttaaaaatataacaagagaatctgaatggtcgaatggtgaagaaaatatagctttatcaacatttcattctgcaaagggtctagaattcgactatgttataatattaggcttaagcaatcaaactacaacacatgcggaagaaaatattgacgatcaatttttagtcttgagaaaactactagcgatggcaatagcaagagcaaaaaaaggtgttttcttagggtataaacccggtgaagaatctgatctaatgcaattcctcgaagagggaacatatagaaaggtcatcttataa

SEQ ID NO: 177721 - DNA, 1332 bp, Klebsiella oxytoca
atgttgtcattatttagtgttcggtactgtattgctaaacggtctaaaatctgtcattttatgcaccacccaatgcaccacgatgaaatattacttatgccaaagaaagctaaagaactgtctgcactggctgtttctaaacttaaggccgatgcagaatattacgttggtggcgctgatggcctataccttcggattatcggacgctcacgagtgtggggcttgcgtattgtaatgggaacccgcatcaataaagcaggtaaaacagttccccgccgccttaacatggggttaggcccctatcccgaaatttcgttgtcagaagcgcgcgataaggcgcgtgaactccgtaagcagatccgtaatggcattgatccccttgcagaaaaacacgctcgaaaagcggctcaagaagctctggcacgtaagcaaaagacatttcgtgaatgcgctgaagccgtgatagaaatcaaaaatagcgaactaaagaataaaaagcatgtggcgcagtggcgatcgacacttgaaacctatgcctacccgtttattgggcaaaaagtgattggtgaaatcaccaaagtagatcttcttgcaatactggaacccatctggttaaccaagaatgagacggctagtcgtcttcgtggtcgtattgaagccatcatcgattacgcaaaagctaaagagtattttgaaggtgataacccagcagcatggaaaggcatgttgaaaccccttcttcccttaccgagcaaagttcaagatcaaaaacaccatgcgtcattaccttatgaacaaatcagttcttttatgtctgaactgcgcaaacgtaaaggaatctcagctcgtgcgttggagttttctatcctgacggcttctcgctctggtgaagttcgtggcgcagagtggtcagagatcgatctgaaaggtaaaacatggacgattcccgccagccgtatgaaagcagcaaaagaacatcgggttcctctatctgatactgttgttgctctgttaaaagatttaccacgattgaaagataacaatcatgtattccctgcccctcgcgctgaaaccctttctgatatgtcgttattggctgtattgaaacgaatgggccatagtggcttaacgcagcatggcttccgttctactttccgtgagtgggctggtgaaacaacagactatcaacgtgaggttattgaacatgcgttggcgcaccagttggcagataaggctgaggctgcgtatcaacgtgggacgttgtggcctaagcgggtcgcgctgatggatgattggtcggggtattgttcattatgggatcaaaagaaataa

SEQ ID NO: 177722 - DNA, 1407 bp, Klebsiella oxytoca
atgaaaataattgccattaccgcctgtccaacaggcgttgcacatacttaccttgcagaagccaatcttaaaaagaacgcccttaaaaaaggcatccctttactcgttgaaacgcatggcgccgtagacagtgaatatatttttaccgaggaggatattcaacaagcagatattgttttaattgccgcggataaggtcatcgatatctctcgtttccataacaaaaatataatccgcgtctcggtgactcgcgccgcaaaggatgcagcaggattactggacgagattgtcaccggtaaattacagccacaacgacacctggcggcagacgatgctcaggaatcgccgaaaaaagataaagataaatcactggtgtctcaaatttatattcatcttatcaccggcgttaacctgatgatcccgttcgtcgttgccggcggtattttaatcgcgctgagcttctcatttggtattactgcggcaacgccgggagatgaaaattttaacccgctggcgaaaatgctctctgacattggcggtggtgcggcctttgcgctgatgctacccgttctctcgctcggaataagtaaatcgattagcggcaatatggggatagtgtcgggcgcggtcggcggcatgatggccattcagacagggtcaggttttttgggggctttgctggcgggttttctggccggatacgccacgctgctcatcgtcaaatatatcaaccttcctaaatcgatagcgggcctgaagcctattttaatcgtgccattgctgagcgtttttattaccggggcgttaatggtgctggtgattggcgaaccgattaagtttcttctcgactcgctgacagcgttcctcgaaaacctgggcaataccaacgcagcaattatgggccttttgataggcatgatggtggcgtttgatatgggcggtccccttaacaagactgtctgtatgtttgcaattggcttgatgtcgacagggatctacgaacctatcgcggcctgtatggcggcaggaatggtaccgccgttgggtattgcactcgccaccacgctgttcgggcggaaattctcccgtcaggagagggacaccggcaaagtcacctatgttctcggcctgtcgtttatcactgaaggcgctatcccttatgccgtagccgatccgctacgcgttattcccgctatcgtcgccggctccgggctggcaggcgcgctctccatggctctgggatgtgcctccagagccccacacggcggcatattcgtcatgtttattcccaatgtgatcacccacgttgtgggatatatcgtcgccatcgccgccggcgcgttactcaccgcgattattctgcgttttattaaaaaagacagccctgaaactgtacaggagatgtag

SEQ ID NO: 177723 - DNA, 1518 bp, Klebsiella oxytoca
atgaaagtgctcagtaaaagacaaatatcattaatcaatcatttaacgcaggaaagtggctggctggccacctcccgggcggcaaaaatgctcaatatttcagtcagtacgctcagacgagatgttgaagctattaacctttatttcactgataaaggtcattctgtactcagtaaacccggtctgggcctgaagcttgaggcgaacgacgttgtccccctcccccttatctccggggatgcgcaggttgtaaacatacttaaaaacaagcggctggtgggcattgcgaccgatttgctgacgcattctcccacgccattatctatcagctttttagctgagaaatacttcatcagtcgctcttccattgtggaagacctaattaagattgaaaaatggctagagtgtttctcccttagaatgataaagaaccataccggtacgtttattgacggtaatgactatgacatccgcatggcgcttaaggagatcattactcatagcgttttatgtaactatcacatgaccgatagcagaatcgataggttctctcgcgtacagcttatcaaagaatttggtaaagacaacgtggccaactgtatcaatttgattgcatttatcgaggatgaattaacctgcgccattagcgagccctactataccaatctgttttcacatttactggtcaccatcagacgtctggagaagagaatcgtttgcccggctgatgaagctgcgccagtgcatgacaacaaggaatggcagattgctgaaaaagctatcgcatggcttgagcagaaatatacgctcaggttcccgcaaatcgagattaattatatttatcaatatcttgtttcatccggtaagcatcccgttcatgccgtccatcctgacagaggagtgcaggaccaggaagcgttacattatgccattaagttaaccagtctactttcgcagctgcttaaatgtgatttaatctccgatcagccgctcttgaacgctctggttatgcatattaagccgatgttgaaccgtctggctttccgcatcattattcataaccctttgctggatgagattaaaaaagaactttctcctgtatttttagcggtcagaaacgcaactatgcaaatcaataattacagtaaacacgatcccccctctgaggatgaagtcgcctatttaacggtatacatccaggcggcaatcgaaaagattaaagaaaataagaaaatcatccttgtctgttcaagcggagtcggtacatctcagctcctgtatagccggattaccaaagccttccccgactgggagattatcgacattgttcccggcagtcgattaaaggaaacgttagctgaaaaaaagtgcgacctaatcatatctaccatccgaatagaggaaatgatgatccctgttgcctatgtttccgcactattttctgcgaaagacatcattcgggtgaccgaagccttattcagcaaacgccagactcaggagagtgaatatgttaaataa

SEQ ID NO: 177724 - DNA, 1488 bp, Klebsiella oxytoca
atgccaaatacacaagcgatgcatcaggttaaggccgctgatccccacgctggatacagcccacggctttgcaatgaggatctggcaccgacgcgcgaccagaactggagctggtacaacatcttttctttctggatgtcggacgtgcacagcatgggaggctacgtggtggcggcgagcttctttacccttggtcttgcgagctggcaggtgctgctgtgcctgctggtggggatttgtatcgttcagctgtgcgctaacctggtggcaaagcccagccagatggcgggggtgccctacgcggtgatctgtcgtcaggcgttcggcgtctttggggctaatatcccggcggtgatccgcgggcttatcgccttcgcgtggtacggtattcagacttatctcgccgctaacgcgctgatgctagtgctgctgaagttctggccgtcgctgtcgaccctcaccgcatccagcttcctgggcctgtcgcatctgggctggctctgcttcgccaccatgtggctgctgcaggcgatggtgttctggcacgggatgaacgccatcaaacgctttatcgatatcgccggcccggcggtctacgtggtgatgctggcgctggcgggatggattgtatacaaaaccggttttgacgggatctcctttaccctcgccagcaaatcgctgagcgcaggggagcagacctggcagatgatcaccgccaccgcgctggtggtctcctacttctccggcccgctgctcaactttggcgatttctcgcgctatggcaaaagcatgggcgagatccgccgcggcaaccgctggggcctgccgtttaacttcctgctgttctccatcgtgaccgtggtgattgtctccggcacgcagtcgctgtttggccgcatgatcaccgacccgattgagaccgtgagccgcgtaggcaacgacctggcggtcgccattggcctgctgaccatgatcaccgccaccatcgggattaatatcgtggccaactttgtctctccggccttcgatttctctaactgttcgccgcagaaaatcagcttccgcaccggcgggatgattgccgccgtagggtctattctgctgacgccgtggaacctgtttaactcgccggagctgatccactacaccctcgacgtgctgggggcgtttatcggcccgctgttcggcatcctgatcgtggatttttacatcattaagcgcgggcaggtttccgttaacgacctgtttgacgacacgcccaggggccagtactggtaccgcaacggctttaacccgaaagcgatcgccgcgctggtgccctccgtcgccattggcctgatcatcagctttattccggccctgcacgaagtggctaactttagctggtttatcggcgtcttcctgagcggcgcggcctatcgctggatcgcccgcgacgaacgcatcggcgccaccaccggtttcagccctctcgtccagaaagagtaa

SEQ ID NO: 177725 - DNA, 795 bp, Klebsiella oxytoca
atgttaattgaagcttttctggtcgccatctgggcagggatctgctcactggacgacgttgggccgcagatgctacgccgcccgcttctgacgggaaccgttgctggaattattatgggcgatacggttcaggggctggcgatcgccgccacgctggagctgatgtggatggggatcggcaacgtcggggcctattccgcgcccgacattattgccggatcaatcatcggcgtcgctctgggcatttcctccaaaggcggtatcgctgcgggcatcgccctcgccgtcccggtgtcgatactctgccagcagcttcttatcatctggcgctctttcgccagtttcctgaacgtatgggcggagaagtccattcaggagggtgactatggtaagctgctgaaagtccattatttctctacgccgctgtggtttctgatccgcgccgtcccctgcttcctggccgtctattttggcggggacctggtgggtcggattctggccgccatcccggaaagtattctgaccggtatgggcgttgccgccaaaatgatcccggccatcggcgtctgtatcctgctcttaatgctgctgaaaggccggatgtggttcttcttcctgcttggcttcatgctcaccacctatctgaagctgccgatcattcccattacctttatcgctctggcttttgccgtgctctatgacatggcctacagcaatggtcagaaggccgagagttcacctgcggaaaaagaacagcagtccactaccgacactgaagaaggatatgacttatga

SEQ ID NO: 177726 - DNA, 747 bp, Klebsiella oxytoca
atgagtcggcaacgccttcacaggttgaccctgcgcgctgcacagggttttattgattccatttttacactgatgaatgttccgttgcgctgcccggattacaccagtgtcagcaagcgcgcaaagtcggttaatgtcagtttcaaaacgttcacccggggtgaaatcgcgcatctggtgattgattccaccgggctgaaggtcttcggtgaaggcgagtgtaaagtcaaaaagcatggccaggaacgccgtcgtatatggcgaaagttgcatctggccgttgacagcaacacacatgaaatcatctgtgcagacctgtcgctgaacaatgtgacggactcagaagccttcccgggtcttatccggcagactcacagaaaaatcagggcagcatcggcagacggcgcttacgacacccggctctgtcacgatgaactgcggcgtaagaaaatcagcgcgcttatccctccccgaaaaggtgcgggttactggcccggtgaatatgcagaccgtaaccgtgcagtggctaatcagcgaatgaccgggagtaatgcgcggtggaaatggacaacagattacaaccgtcgctcgatagcggaaacggcgatgtaccgggtaaaacagctgttcgggggttcactgacgctacgtgactacgatggtcaggttgcggaggctatggccctggtacgagcgctgaacaaaatgacgaaagcaggtatgcctgaaagcgtgcgtattgcctga

SEQ ID NO: 177727 - DNA, 432 bp, Klebsiella oxytoca
atgccggcgaagcgacgccttgcagaacgtcagcaaaaagctaaaccgcggctgaaatccctggaaagctggctgcgtgaaaaggtgaaaacgctgtcgcgacactcagaactggcgaaagcgttcacgtacgtactgaaccagtggccggcgctggcttactatactgacgacggctgggccgaggcagataacaacatagctgagaatgcgctacggatggtcagcctgggccgcaaaaactacctgttcttcggttcggatcatggaggagagcggggagcgctgctgtacagcctgatcgggacatgcaaactgaacggagtggagccagaaagctacctccgttatgtccttgacgtcattgctgactggccgataaaccgggtcagcgaactactcccctggcgcgtagcactgccaactgaataa

SEQ ID NO: 177728 - DNA, 378 bp, Klebsiella oxytoca
atggacgaacagtggggatacgtcggggctaaatcgcgccagcgctggctgttttacgcgtatgacaggctccggaagacggttgttgcgcacgtattcggtgaacgcactatggcgacgctggggcgtcttatgagcctgctgtcaccctttgacgtggtgatatggatgacggatggctggccgctgtatgaatcccgcctgaagggaaagcagcacgtaatcagcaagcgatatacgcagcgaattgagcggcataacctgaatctgaggcagcatctggcaaggctgggacggaagtcgctgtcgttctcaaaatcggtggagctgcatgataaagtcatcgggcattatctgaacataaaacactatcaataa

SEQ ID NO: 177729 - DNA, 726 bp, Klebsiella oxytoca
gtgatcatggccgatatctttgaggagaattaccgctgttacggctatcggcgccttcacgcgatgcttcgcggtaacaacagggttatttctgaaaaggttgtccgcagactgatggcagaagagcagctcgttgttaagcgcactaggcgacgacgatacaactcttactgtggcgaaatcggcccggcaccggaaaatttactcgcccgggattttagttcctgcaggccaaatgagaagtggctgaccgatattacggagttccagcttccggctggaaaagtctatctgtcgccggttatcgactgctttgatggcctgattgtaagctggtcgataggaacacgcccggacgcgacgctggtgaatacgatgctcgatgacgcactcgatacgctcaacgaacatgataaaccagtgatacacagcgatcgtggtggccattaccggtggccgggctggctcgagcgtatcaacacctccggacttataaggtccatgtcgcgcaaaggatgctcgtcggataatgctgcgtgtgaaggcttcttcgggcgtatcaaaaacgaaatgttctatggcggagactgggcgggtatcacgctggaaaaatttatctgcttcctggacaggtacatacgctggtataacgagaaacgtatcaagctatcattaggtgcaatgagtcctgtgaagtaccggcagcatcttgggatcacaacataa

SEQ ID NO: 177730 - DNA, 306 bp, Klebsiella oxytoca
atgcgcaaacgaaagtcagcccctcaggataaaaatcaggatgctttactcggtgaaatccagcgtctcaggaagcaggttcatcagctgcagctcgaacgtgacatactgacaaaggcgaatgaactgataaaaaaagatctgggcgtcagctttctgaaactgaaaaacagggggaaaaccctgatagttgatgcccttaagaaaaagtaccccgttgctgagttgctaagcgttctgcaacttgcccgcagctgttatttttaccaaaacgtctgtacgataagtatgcggaaatacgcgtga

SEQ ID NO: 177731 - DNA, 963 bp, Klebsiella oxytoca
atgatcagtcgtgatctgcgccacgcgcagaatgtcggcgcgcggcatcgctggcacaatcgcctgcaaaccgtgctgttggtgctgaccctgctcggaattgccgccgtcgctggcagcctgctgttgggtgacggcgggctttggctggcgcttgcggctgcggggttcaccctgctgcttgaaccggcggccgcctccgggctgaccttgcggctgtatggcgcacgccccctgcacccggatgaagcgcccgatctttgggctgtgttgcgcgaactggcggcgcgggccgggctgcctaccgtgccggtaccgcactacgtgcccagcggggtcgtcaacgccttcgccaccggttcgaagcatcacgcggccatcgcgctgaccgacggcctgctgcgtagcctcacgccccgcgagttgaccggcgtgctcggccacgaaatcgcgcatattgcgaacgaggatttgcgtgtcatgggcttggccgattccatcagccggctcacccatcttctggccttgttggggcagcttgcgatcgtgctcagcttgccaacgctattgcttggagtcacggaagtcaattggcccgcgttgcttctacttgcggtcgcgccacagctggccttgctggctcagttgggcttgtccagggtgcgcgaattcgacgccgaccggctcgctgccgaattgaccggcgacccgcacgggctggcctcagcgctcgccaagatcgagcgggtgagccgctcctggcgcgcctggctgctgcccggatggggcaatccggaaccctcctggttgcgcacgcatccagcgacggctgaacgcattgagcgcttgctggaacttgctccgccgcccgcgatgccgccgtttccatcggcccgtttcgaccccgaagtgaccgtatcaccacgtccgccacgctggcgcactggcggcctttggcgctga

SEQ ID NO: 177732 - DNA, 750 bp, Klebsiella oxytoca
gtgttgttggaaacggcatcgatagaaggcgcccaagtatgggcggagcgatttcgtcaggacactgcggcgacagcggtggtgtgtggagaggtgtcgatcagctatagcgccagcatgggggtggctctccttgacccccgtttgcactctgtcgagcaggtgatgctgcaggcggacaacgcgctctaccaggcaaaaaagacaagggtgcaaccaagttgtgggcgcacaagtatttcagaattgagaggagtggcgatgaaggaaaagcaagcagacccgatcaaaacatttcgcgcccaatgggcagtgatgacgttctacgagcgctttgaacaggtgatcgcgctcgcgctgtccgcaattattgccgttatcatcgtggtctcgctgctgcagctgatctcgatcgtcttcagcctgctgatcattgatgcattcaatccgctcgatcacaaggtcttccagaccgtgttcggcatgatcatgacgctgctcattgccatggagttcaagcattccatcgtgagggtggccttgcggcgcgacagcatcatccaagtcaagacggtgatcctgatcgggctgatcgccctggcgcgtaaattcgtgatcctcgacccggagaccggccccgccaaggtcgcggcgcttgcaggcgcgacactggccctcggggcgacttactggctgctgcgcgagcgcgatgaccggacagccggggaaagctcagatgatcagtcgtga

SEQ ID NO: 177733 - DNA, 198 bp, Klebsiella oxytoca; identical to SEQ ID NO: 136037

SEQ ID NO: 177734 - DNA, 2796 bp, Klebsiella oxytoca
atggccagaaaacaatgccaggtctgcggccaacccgccaccgtgcgggtggaagccaatctcaacggtcgtcacagcaccatgctgttgtgcgacgaccattaccggcaattagtgcgccagcaaaagcgcaccgtttcgccgctggaagccttgttcggctcgcgcagcggcctgttcgaggacttcctcggcagtgacttcttccgcatcggcgacgacgcgacgccagttgccgccgataccgatgacgtggtcgatgcctcgtttggcgagcccgccgccgcaggttcgggtgcgccgcgccgtcgcggcagtgggctggccagccgcatcagcgaacagtcggaagccttgctgcaggaggccgccaaacacgctgccgaatttggccgctccgaggtggataccgaacatctgctgctggcgctggccgacagcgacgtggtcaagaccatcctgggtcagttcaagatcaaggtcgatgacctcaagcggcagatcgagtctgaggccaagcgcggggacaagcccttcgagggcgagatcggcgtgtcgccgcgcgtgaaggatgcgctcagccgcgccttcgtggcctccaatgaactcggccattcttatgtcggtccagagcatttcctgatcggtctggctgaggaaggcgaagggctggccgccaacctgctgcgccgctacggcctgacgccgcaggcgctgcgccaacaggtcagcaaggtggtcggcaagggcgccgaggatggccgcgctgagacgccgaccaacacgccagaactcgacaagtactcgcgcgacctgaccacgatggcgcgcgacggcaagctcgacccggtgatcggccgcgcgcaggagatcgaaaccaccatcgaggtgctggcccggcgcaagaagaacaacccggtgctgatcggcgagccgggtgtgggcaagaccgccatcgtcgaagggctggcgcagcgcatggtggcgggtgaagtgcccgagaccttgcgcgacaagcgcctggtggaactcaacatcaacgccatggtggccggcgccaaatatcgcggcgagttcgaggagcgcgtgcagaaggtgctgaaggaggtgaccgagcaccagggcgagctgattttgttcatcgacgaggtgcacaccatcgtcggtgccggccagggcggtggcgaaggcgggctggacgtggccaacgtgttcaaaccgatgatggcgcgcggtgaactcaacctgatcggcgccacgacgctgaacgagtaccagaaatacatcgagaaggatgccgcactggagcggcgcttccagccggtgacggtacccgagccgacggtggcccaggccatcatgattctgcgcggcctgcgcgacaccttcgaggcgcaccacaaggtcagcatctccgaggacgcgatcatcgcggcggccgagttgtccgaccgctacatcacggcgcgcttcctgccggacaaggcgatcgacttgctcgaccaggcggccgcgcgcgtgaagctgtcggccacggcccggccggtggccgtgcaggagctggagtccgaactgcaccagctgcggcgtgaacaggattacgtggccgcgcgcaagcagtacgaccaggccgccgagctcgggaagcgcatcgaagccaaggaggccgagctcaagaagctcgtcgaggactgggagcgggagcgggcctccggcagtgccgaggtcaaggcggaacacgtggcgcagatcgtctcgcgcctgaccggcatcccggtcaacgagttgacggtggaagagcgcgaaaagctgctgcacttggaacaacggctgcacgagcgcctggtgggacaagacgaggcggtccgtgccgtggccgatgccgtgcggctgtcccgcgccggcctgcgtgaaggcagcaaaccggtggctaccttcctgtttctgggcccgaccggggtgggcaagaccgagctcgccaaggcattggccgaatcgatctacggcgatgagcacgccctgttgcgcatcgacatgtcggaatatggcgaacgccataccgtggcgcgattggtgggcgcgcctccgggctatgtcggttacgacgaaggcggtcagctcaccgagaaggtgcggcgcaagccctacagcgtgctgctgctcgacgagatcgagaaggcacaccctgacgtatacaacatcctgctgcaagtgttcgacgacggtcgcctcaccgacggcaagggccgggtggtggatttcaccaacaccatcatcatcgccacgtccaacctgggttcggacatcatccagcgacggctgaaggcgcgcggggcggccggcgaggagtacgaaaagaccaaggccggagtcatggacgtgctgcgcggccatttccggcccgagttcctcaaccgcatcgacgagatcatcgtcttccatgcgctgggcaaggaggagatccgccacatcgtcggcctgcagctcgatcgcgtggcgcgcagcgccgccagccagggcgtgacgctcactttcgatcagacgctgatcgaccatttcgcggaagaaggctacaagcccgagttcggtgcgcgtgaactcaagcgcctgatccgcagcgagctggaaactgcgctggcgcgcgagatgctcggcggcggcatcggcaagggcgatcacgccagcgcacgctgggacgacaaggccgaacgcgtggtgttcgaacgcaaagagccaccgcagaccccggccgagccggagcagccggatgccgcgaaggcgagcgacgcatcttga

SEQ ID NO: 177735 - DNA, 570 bp, Klebsiella oxytoca; identical to SEQ ID NO: 164821

SEQ ID NO: 177736 - DNA, 282 bp, Klebsiella oxytoca
atgaaagcgcacctacaggtgattttcacgctcgatgaattggctgcgtacttgaaagtcggcaagcggacgctttatcggctcgccgcgcacggggaaattccggctttcaaggtgggcgggacgtggtggtttcctcaaagtgaaatcgatcagtggatcaatgatcagacccgagccgcagcaaagaaggaggtgatgcgcaagcgtgaacagcagaagtcatccgagcagcccgtgtcgcctgggcgcactgcccgtcacagcaggcaaagggcttga

SEQ ID NO: 177737 - DNA, 264 bp, Klebsiella oxytoca
atgtgccctcagcgccgtacctacagcaaatctttcaaggctcaggtcattcaggagtgttctgaacccggtgcctccatcgcaaacatcgccttgggctacagcctcaatgccaacctcgaccacaaatggattcggctgcctacccagaaaaccacggctatccagccagcgttcatcccgttgccttctcaaatgctcggcgtgggttcgcatactcaagcgcgctgctgcgatcatgagtttgatccagtcggcccgtaa

SEQ ID NO: 177738 - DNA, 909 bp, Klebsiella oxytoca
gtgatcaataagatttgccaggtaattgacggggagtacgtctgcgacattgatatcactgtggaagaatggaaagctctgttaatgaatgaaaaggtttttgactctaaaagtattgaggcgttaaaaaaatggtatattgaaccaaatcattcctgcacatgtttcgatataggcaaaaagtacgaacagcacagtatgagtgctaatggcgttattaacgggctcggtggtagagttcaaaaagagcttggcagatttgaagttaaagggatcggcaatatagcacccggcacaaaattcattacagtcatgaagagtaaagaaaccggtgaaaaaccaaaaagatacttatggactattcgtgatgaacttgttcaggcaattaaagaactggatttttttgggtcggaagaaataaccaccaatgagtattactcagacgatgagttgatcaacgccatggaggcgaataatacatttgatgtcgcgcagacatttgaatatacaggggaagctaaaccaaagaaacatgcaacagaagtaaaaaatggcgtctcgtacccaagaagtaaaggggtttcaaaaaatgcactgaacaaagcaggttacagatgtgaagtcgatggcgaacacccaaccttcagaaggcgtaactctcccctgaattatactgaacctcatcacattgtacctatgtccaggcaggatgactttaacacttcgcttgacgtcgaagaaaatataatatcgctgtgttgcaattgccataagcaaattcacctcggacagggatatgaagaaatgcttgagaaaatatataatgagagaaaggagttgttaaaacaggtagctatcgatatatctctggaggatttgattcgctattataaaggacagaacaggtga

SEQ ID NO: 177739 - DNA, 126 bp, Klebsiella oxytoca; identical to SEQ ID NO: 152585

SEQ ID NO: 177740 - DNA, 351 bp, Klebsiella oxytoca
atgaaagccagaaacactttatttgcagtattaatgttatccctgccagcgatttcagcagaacattcagaaatgaaaatgactgatatgtctacctcagcttcgtcacaggaatatatggctggcatgaaagacatgcatgacaaaatgatgactgctgtaaatgaatccgatcccgacaaggcttttgcgaaaggcatggtagcacaccatgaaggggcaatagcaatggctgagactgagctaaaatacggaaaagatcccgaaatgagaaagctcgcgcaggacatcattaaagctcaaaaaggtgaaattgagcagatgaataaatggcttgatactcaaaagtaa

SEQ ID NO: 177741 - DNA, 432 bp, Klebsiella oxytoca
atgaaaaatatcgtattagcatccttgctgggctttagtttaatttcttcggcctgggccactgaaaccgtgaatatccatgagcgcgtcaacaatgcgcaggcgccagctcaccagatgcagtctgctgcggctcctgccgtgatccaggggacggctcctcgtatgaccggtatggaccagcatgaacaggccattattgcccatgaaaccatgacgaacgggtcggcggatgcgcaccagaaaatggtggaaagtcatcagaggatgatgggaagtcagaccgtttcccctaccgggccgtcaaagtcattcgcggcaatgaatgagcatgaaagagctgcagttgcccatgaatttatgaataacggtcagtccggcccacatcaggccatggccgaagcgcatcgtcgtatgctcaatgcaggctga

SEQ ID NO: 177742 - DNA, 1479 bp, Klebsiella oxytoca
atgcatagcaaaccgtccagacgacctttctcactcgctctgcggctgaccttttttatcagcctgtccacaatactggcgtttatcgccttcacctggtttatgctgcattctgttgaaaagcattttgccgagcaggatgtcagcgatctgcaacaaatcagcaccacactgagccgtatactccagtccccggcagatccggatgaaaaaaaagtaagcaaaataaaggaatcaattgccagctaccgcaacgttgcccttttgctcctcaatcccaggggtgaagtgctcttgagctcagctcagggggcggcactacgcccggcagtgaattcagcagattttagcgagcacagccgcgcacgggatgtctttctctggacggtggaggatcctgcgggaccgatggataccgggtccggaatgaagatggaaacataccggattatcgcctcctctggccaggcgatatttcagggcaaacagcagaactatgtcatgctgactggcctctctattaatttccatctccattaccttgatgcgctgaaaaaaaatctgattgcaatcgctgttgtgataagcctgctgattgttctgatcattcgcatcgctgtccgtcaggggcatctgccccttcgtaatgtcagcaatgccattaaaagcatcacctccgagaatcttgatgcgcggctggaaccgacacgggttcccattgagctggagcaactggttatctcgttcaatcatatgattggaaagattgaggatgtctttacccgccaggccaatttctctgccgatatcgcgcacgagatcagaacgcccattactaacctggtgacgcaaacggaaatcgcactgagtcagaaccgatcgcagaaggaactcgaggatgttctctattccagtcttgaagagtacaaccggatgaccaaaatggtcagcgatatgctgttcctggcgcaggcagacaataaccagctgatccctgaacgggttatgtttgatttgagtgccgaagtcatgaaggtctttgatttctttgaagcctgggcggaggagcgcaatatcacgctgaagttttatggcaacccctgtctggtcgagggtgatcctcagatgttcagaagagctatcagcaatcttctgtccaatgccctgcgctatacgccggaggcacaggcaatcactgtttcagtaagagaacaggaaagttgcttttatcttatggtagaaaatccgggaaaacccatcccggaggaacatttaccacggctgtttgatcgtttttaccgggtggacccttccagacaacgaaaaggtgaaggcagcggcatcggtcttgcgattgtgaagtcaattgtggaagcccatcatggtaaggtaaacgtggaatcagatatacgctcgacacggtttattttatccgtgccaagactggataaaatgaatcaggtcgctcaaaaaagataa

SEQ ID NO: 177743 - DNA, 681 bp, Klebsiella oxytoca; identical to SEQ ID NO: 139460

SEQ ID NO: 177744 - DNA, 1386 bp, Klebsiella oxytoca
atgttcaaattaaaattactcagcatcagtaccatattcatcctggctggttgtgtttctctggcacctgaatatcagcgtccgccagctccggttccccagcagttttcattgtctaaaaacagtctgacgcctgcggtaaacagctatcaggatacgggctggcgaaacttttttgtcgatccccaggtcagcaggctgatcggtgaagccctgaataataaccgtgatttgagaatggctgccctgaaggttgaagaggcccgggcccagttcaacgtcacggatgcagatcgttatccccaactgaatgcctcatccgggatcacatacaacggtggtctgaaaggtgacaagccgaccacacaggagtacgacgcgggtctggagctcagctatgagctcgatttttttggcaaacttaagaacatgagtgaggctgatcgccagaactactttgccagcgaagaagcccgtcgtgccgtacacatcctgctggtctccaacgtttcacagagctatttcagccagcaactggcgtacgaacaactccgtattgcgcgggaaacgctgaaaaattatgaacagtcctatgctttcgttgagcaacagctcgtgaccgggagtacgaacgttctggcacttgaacaggcgagaggacaaatcgaaagtacccgcgccgaaatagccaaacgagaaggcgatctggctcaggcaaacaatgccctgcaactggtgctgggaacgtaccgcgcacttccgtcagaaaaagggatgaaaggcggggagatcgcaccagtaaaattgccaccaaatctatcttcacaaattttgctgcagcgaccggatattatggaagcggaatatcagctgaaagcggctgatgccaatattggcgcagcgcgagcggcctttttcccctccattaccctgaccagtggtctttccgcaagcagtacggagctgtcaagcctgtttacgtcaggaagtggaatgtggaattttatccctaaaattgaaattcctatttttaatgctggcaggaataaagccaatctgaagctggctgaaattcgccagcaacaatcggtggttaattacgaacaaaaaattcagtcagcctttaaggatgtttccgacacgcttgcgctgcgcgacagccttagccagcaacttgagtcacagcagcgttatcttgattcacttcagataactctccagcgtgccagaggattatatgcaagtggtgctgtcagttacatcgaagtgctggatgcagaacgttccctcttcgctacgcagcaaaccattctcgatcttacctattcccgacaggttaacgaaattaatctgtttaccgcgctgggtggcggttgggtagagtaa

SEQ ID NO: 177745 - DNA, 354 bp, Klebsiella oxytoca; identical to SEQ ID NO: 19861

SEQ ID NO: 177746 - DNA, 1293 bp, Klebsiella oxytoca
atggcttctttaaagataaaatatgctgcaataattatcagcagcctcatagcaggggggctgatatcggttactgcctggcagtatgtaaactcatcacaaaaaacagtacaaaccgaacaaaaggcaccggagcgaaaggtacttttctggtatgacccgatgaaaccggataccaaatttgataaacccggaaaatctccctttatggatatggacctggtgccgaaatatgctgatgacagtggcgataaaagcagtggcgggatccgtatcgatccaacccaggttcagaatctgggattaaaaacgcaaaaagttacgcgaggaatgctgaattattcccagacaatcccggctaatgtcagttacaacgagtatcagtttgtcattgtgcaggcgcgttctgacggtttcgtcgaaaaagtgtatcccctgacgattggcgatcatgtgaagaaaggcactccgcttatcgatatcaccattcctgaatgggttgaggcacaaagtgagttcctgctgttatccggtacaggcggtacgtcaacccagataaaaggggttctggagcgacttcgtctggctggtatgccggaagaggatattcaaaggctgcgttcaacccgcacaatccagacccgttttaccattaaagcacctattgatggtgtcattactgcgtttgacctgcgcaccggaatgaatatttcgaaagataaagtagtggctcagattcaggggatggacccggtctggatcagcgctgcagtgccagaatctatcgcctatctgctgaaagatacgtcgcagtttgaaatttcggtaccggcttatccggataaaacattccatgtcgaaaaatggaacattcttcccagcgtggatcagacaacccgtacgcttcaggtccgtctccaggtttctaataaggatgagtttctcaagccgggcatgaatgcctatctgaaactgaataccaagagccaggagatgctgctgataccaagccaggccgttatcgataccggcaaagaacagcgcgtgattactgttgatgatgaaggcaagtttgtgccgaaacagatccacgttctgcatgaatcacagcaacagtccggcattggctccggcctgaatgaaggcgataccgtggtggtcagtggcctgttcctcattgactccgaagccaatattacgggcgcgctggaacgtatgcgccaccctgaaaaaacagaaaacagtatgccagcaatgtctgagcagcctgtaaatatgcattcagggcactga

SEQ ID NO: 177747 - DNA, 3147 bp, Klebsiella oxytoca
atgattgaatggattatccggcgctctgtcgccaaccgtttcctggtcatgatgggcgcactgtttctcagcatctggggcacatggacgataattaacacgccggtcgatgcgctgcctgacctgtcagatgtgcaggtcattattaaaaccagctatcccggacaggccccgcagattgtagaaaaccaggtcacctatccgcttaccaccaccatgctgtccgtacctggcgcaaaaaccgtgcgtggcttttcacagttcggtgattcgtatgtgtatgtcatttttgaagacggcaccgatctgtactgggcccgttcgcgcgtgctggaatacctgaatcaggttcagggcaaactgcctgcgggtgtgagctctgaaatcggcccggacgccacgggagtgggctggatatttgaatatgcccttgtcgatcgcaacggaaaacacgacctttcagaactgcgctctctgcaggactggttcctgaaatttgagctgaaaaccatcccgaacgtggctgaggtcgcttcggttggcggcgtggtgaaacagtaccagattcaggtcaatccggtaaaactgtcccagtacggtatcagcctgcccgaagtgaaacaggcacttgaatcgtctaaccaggaggccggtggctcatccgttgaaatggccgaagcggagtatatggtccgtgccagcggttatcttcagagcattgatgattttaataacatcgtcctgaaaacaggtgagaacggcgtgccggtttatctgcgggatgttgcccgcgtgcagaccgggcccgaaatgaggcgtggtattgccgagctgaacggccagggagaagtcgctggcggcgtggtgatcctgcggtcgggtaaaaatgcgcgcgacgttatcacggcagtgagggataaactggagacgctgaaggccagcctgccggaaggcgttgaaatcgtgaccacctacgatcgcagccagttaatcgaccgggcgattgataacctcagttccaaacttctggaagagtttatcgtggtggccatcgtctgtgctctgttcctgtggcacgtacgttctgccctggtggcgattatctctctgccgcttggcctgtgtatcgcctttatcgtcatgcacttccagggactgaacgccaatatcatgtcgctgggagggatagcgattgccgtcggtgcgatggtggatgccgccattgtgatgattgaaaatgcgcacaaacggcttgaggagtgggatcatcagcatccgggtgagcagattgacaacgccacccgctggaaggtgattaccgacgcctccgtggaagtgggacccgcgttgttcattagcctgctgatcatcaccctgtcctttattcctatctttaccctggaagggcaggaaggtcgtctgtttggcccgctggcattcacgaaaacgtactccatggcgggagcggccgcactggccatcatcgtcattcctattctgatgggattctggatccgggggaaaattcctgccgagacaagtaaccccctgaaccgggtgctgatcaaagcgtatcatcctttgctgctgcgggtcctccactggccaaaaacaaccctgctggttgcggccttgtccattttcacggttatctggccactgagtcaggtgggcggtgaatttctgccgaagattaacgagggcgatctgctgtatatgccgtcgaccttgcctggcgtctctccggcagaagctgcagcgctcctgcagacaacagacaagttaatcaaaagcgttcctgaagtggcttctgtatttggcaagaccggtaaagcagagaccgcaacggattccgcgccgctcgaaatggtggaaaccacgatccagctcaaacctgaggatcagtggcgtcccggcatgacaattgacaagattattgatgaactcgacaggacagtccgtttaccgggtctggcaaacctctgggtgccgcctatccgtaaccgtattgatatgctctcaaccgggatcaaaagcccgataggtatcaaagtgtccgggactgttctgtccgatatcgacgcgacggcgcagagtatcgaggcggtagccaaaaccgtgcctggcgtggtgtctgtcctggctgagcgacttgagggcgggcgctacatcgatatcgatatcaaccgggagaaagcctcccgctacgggatgacggtaggtgatgtccagctgttcgtctcttcagcaatcggaggtgctatggtgggtgagacggttgaaggggtggcccggtaccctattaacattcgctacccgcaggattaccggaacagtccgcaggcgctgaaacagatgccgatcctgaccccgatgaagcagcagatcacgctgggcgatgtcgcggatattaacgtcgtttctggaccaaccatgctgaaaaccgaaaatgcccggccagccagctggatttatgttgatgcccgcggcagggacatggtgtcggtggttaacgacattaagacggccatcagcgagaaagtgaaactgagaccgggaaccagtgtggcattctccggacagtttgaactgcttgagcatgccaacaagaaactgaagctgatggtgccgatgacggtgatgatcattttcatcctgttgtatctggcattccgccgggttgacgaagccctgctgatcctgatgagcctgccgttcgccctggttggcggaatatggttcctgtactggcagggcttccatatgtcagtggcgaccggaaccgggtttatcgccctggccggggtggcagcagagtttggcgtggtcatgctgatgtatctgcgtcatgccattgaagcgcacccggaattgtcccgtaaagagacgttcacaccggaaggtcttgatgaagccctctatcatggtgccgtgctgcgtgtccggccgaaagccatgaccgtggcggtgatcattgcgggtctgctgccaatactctggggaaccggcgcaggttcagaagtcatgagccgtattgcggcacccatgattggtgggatgatcacggctccgctgctgtccctgttcattattcctgccgcctacaaattaatctggctgcgcagacataaaaaaagcgtgtcctga

SEQ ID NO: 177748 - DNA, 441 bp, Klebsiella oxytoca
atgaaaaaagtggttctaatggcgctggctctcggcctttcactacccgcgatggcgagtgaaaaagtgattgatatgtacaaatctgaaaactgtggctgttgttccctgtggggcaaagcgatggaaaaagacgggttcgaagtacgaactcacgtcatgaatgatcaggcgctgtcagccctgaaagaaaagcatgctgttcctgcaggactacgaagttgtcataccgcggttgccggtaatttgatcattgaaggccatgtgcctgcgacaacgatacataaggcaatgcagtctggttcgggtatatacggtctcgccacccccggtatgcctgcgggaagtcctggaatggagatgggagcccgaaaagaggcttacgatgttatcgcattctcaccggatggaagtaaaaaagtcttccagcgaatcgaatag

SEQ ID NO: 177749 - DNA, 2448 bp, Klebsiella oxytoca
gtgaaaaatgacaatgcagtgcaacacaacaaccagactgcttctgagcagacattatccccggacgagggccacgtattgcataaggtgagagatcccgtgtgcgggatggtcatcctgcctgacaaggcgcacagcagcattcgataccaggaccatcagctttatttctgctccgccagctgtgagagcaaatttaaagcccatcccgatcattattttaccgaagatgccagtgaacattcccatcaccatcaccacgatcatcacgaagtcagccctgatcagataaaacagcctcacaaccaggcggaaaaagagaattctgaaggtgtgtggacatgtccgatgcacccggagatacgccgcagtggtcccggaagctgtcctgtctgtggaatggcactggagccgctcgtagctacggcatccacggggccgagtgatgaacttcacgacatgacaagacgcttctggctggggttgttgctggcgtttccggttctggtactcgaaatgggatctcatctgtttcccgacttgaagaatacagtaccgccacagtacaacacatggctgcagttgcttctggcctcccctgtcgtgttgtggtgtggctggccattcttcgcccgggccggaatgtcgttacgtaaccgctccctgaatatgtttacccttgttgcaatggggaccggcgtagcctgggtttacagcgtcattgcaaccgtcttcccctcctggtttcctgcatcgttcagaaacatggatggcctggtggccgtttattttgaagccgcagcagttattacggtgcttgttctgctgggacaggttcttgagctgcgggcacgggaacaaacctcaggcgccattactgcgcttctgaaccttgcccccaaaaccgccagacggctggatcatgacggtcatgaaacggatattaatgcggaagatgtcctgcctggcgataagctccgcatcagacctggagagagtattccggtcgacggtatcgtgatcgaaggcaaaacaaccgtggatgaatcgatggtgaccggggagtctatgccggttaccaaaacgaagggtgaccctgtcattggggggacgattaatcagacaggtagtcttatcatccgtgcagagaaagtcggtgatgaaacgatgctctcacgaattgttcagatggtcgctgatgcacagcgttcgcgggcccccatccagagaatggcagacagcgtttcaggctggtttgttcctctggtgatacttatcgcggttgttgctttcttgatctggtctgtctgggggcccgagcccaggatggcgcacggtctcattgcggctgtgtcggtcctgattattgcctgtccctgcgcgctgggactggccacgccgatgtcgataatggtgggggtgggcaaaggcgcccaggccggggtgttaatcaggaatgccgaagcccttgaacgtcttgaaaaagtggacacgctggttgtcgacaaaacaggcacgctcacggaaggttcgccgacggtgacagggattatcagtctcagtccgggtggggaaacatctcttttgcgtgtaacggccgcagtggaaaaaggctcgcagcatccgctgggtatggcagtagttaaagcagcacaggaaaaggggatcgcaatacccgcagtcactcatttcaatgcgccgtcgggtaaaggtgtctcaggcgatgtcgaaggtcaacgggttgttattggtaatgaactggctatgcaggaaaacagtatcgttattgataatcaaaaggccgttgcggatacgttgcggatggaaggtgctaccgttatctatgtggccacagacgggcaccttgcaggcctgatagctatctcggatcccgtgaaagcaaccacgccggatgcgcttaaagctttgcgtcaggcggggatccgcatcgttatgctcaccggggataaccagcttaccgctgaagcagtcgcacggaaactgggaatagatgaggttgaagccgggattctgccggatggcaaaaaagcagtgataacccgactgaaagcgtctggccatgtggttgcgatggccggagacggtgtgaatgatgccccggcgctggcagcggctgacgtgggaatagccatgggaacgggtacagatgtggcaattgaaagtgccggagtcacccttctcaaaggcgacctgatgatactgaacagggcccgtcatctgtcagaaatcaccatgaaaaatatccgacagaatctgttttttgcatttatctacaacgcacttggcgtgcctgtggctgcaggcctgctttatcctgtgtatggaatactgctgtcgccagttattgcggcggcggccatggccctttcctccgtcagcgtcattgtgaatgcgttgcgtctgaaaagtgtcaggctcgggaaataa

SEQ ID NO: 177750 - DNA, 198 bp, Klebsiella oxytoca; identical to SEQ ID NO: 97791

SEQ ID NO: 177751 - DNA, 738 bp, Klebsiella oxytoca
atgtattctaccgatgtcgtaaaagaaaatgcctacctttcagccacccgctcggggctggaatcgaacgagatcgctactcttcagcgctccttgccttcccggtttaatctgcggcatttgaaaaaaaatgaatcattaaaactcgtactgcaaaagaaagcgggaaaatcacgtgtcgtggcctataaatttacgtccggttcatttaattacacggcgtatcgtatatcagataaaaagttctataacctttccgatacttccgggaaaggcagtctcgattatccgttaccggccacagcaagactcagttcgcctttcaatcctgcaagacttaacccggtatcgggaaaagtgagtccccataatggcattgattattccatgcccatgaacacgaaaatagtcagcgtcatcgacggaaaaatcacccgggccgaatacaacagcaccatgggatattttgttgaagtaacaggaaaagccggtgttaaaactcgctatctccacctcaataaaatactcgttactaaaggggccagggttacccggggaggcgctattgcgttatccggtaacagcggacgttcatccggtcctcatctgcattacgagctggtcatcaataacaatcctgttaactcactggcgttccgggcagcggcacccgctgataacaaacttgaacagcatgcctttgcgcatgccagagactacgaacgatacctggactga

SEQ ID NO: 177752 - DNA, 450 bp, Klebsiella oxytoca
atgaatatattaatcacgaccactgcgtttacagctttattttgtggggcagcttttgctcagtccagtgatattgcccatgaagcacatcgatttgttaataatgcctcagccgtcagtcatgtgaattactcgacgcatgaaaacttaccggacagggttaataaaaacaacacgccctcattctctgaaatgaatgaacatgaaagggccattgttgctcattcatttatgaacaacagcgcgtcctatgcgcatcagaaaatgattgaggaacataaaaaaatgctgtccggcagtgatgcaaattcaaagacctcgtcttcttcttttaacgaactgaatgccggagaaaaagccgctctcgtgcatgagcaggtcaataatgccggtgcggaagcacatcagacgcaggcaagaaagcttcgcgggctgtattcgaccaggtaa

SEQ ID NO: 177753 - DNA, 1818 bp, Klebsiella oxytoca
atgctgttgaaaacgtctcgacgaactttcctgaaggggttaaccctctctggcgtagccggaagtcttggcgtatggagtttcaatgcgcgttccagtctgagcctgccagttgccgcatccctgcagggtactcagtttgacctgaccattggtgaaacggccgtcaatatcacgggcagtgagcgtcaggccaaaacaatcaatggaggcctgccggggcccgttcttcgctggaaagaaggtgacaccattaccctgaaggtcaaaaaccgtcttaatgaacagacgtccattcactggcacggcattattcttccggccaatatggatggtgttccggggctgagttttatgggcatagagcctgatgatacctacgtttacacctttaaggttaagcagaacgggacttactggtaccacagccattccggtctgcaggaacaggagggggtatacggtgccattatcatcgatgccagggagccagaaccgtttgcttacgatcgtgagcatgtggtcatgttgtctgactggaccgatgaaaatcctcacagcctgctgaaaaaattaaaaaaacagtcggattactacaatttcaataaaccaaccgttggctcttttttccgcgacgtgaataccagggggctgtcagccaccattgccgatcggaaaatgtgggctgaaatgaaaatgaatccgactgacctcgcggatgtcagtggctacacctacacctatctcatgaacgggcaggccccgctgaaaaactggaccggactgttccgtcccggtgaaaagatacgcttacggtttatcaacggctcggcaatgacctatttcgatatccgtatccccgggctgaaaatgacggtcgtggctgcagatggccagtatgtaaacccggttaccgttgacgaattcaggattgccgttgccgaaacctatgatgtcattgtggagcctcagggtgaggcctataccatcttcgcacaatccatggacaggaccggttacgctcgagggacactggccacgagagaggggttaagtgctgccgttccccccctcgatccccgtcctctgttgaccatggaagatatgggtatggggggaatgggacatgatatggcaggaatggaccacagccagatgggaggcatggataacagcggagagatgatgtctatggacggtgctgaccttccggatagcgggacatcctctgcgcccatggatcacagcagcatggccggtatggatcattcccggatggccggaatgccgggtatgcaaagtcatcctgcgtcagaaacggataacccactggttgatatgcaggcgatgagcgtctctccgaaattaaatgatccgggtattggtcttcgaaataacggaagaaaggttctcacgtacgcggatttgaaaagccgctttgaggatcctgacggacgtgaacctggccgtaccatagaactgcatttaaccggccacatggaaaagtttgcctggtcatttaacggaatcaagttttcagatgccgcaccggtgctgctgaaatacggtgagcggctcaggatcacgctgatcaacgataccatgatgactcaccccattcacctgcatggtatgtggagcgatctggaagatgaaaacggtaatttcatggttcgtaaacacacaatagatgttccccctggtacaaaacgcagttacagagtgacagcagatgcgcttggccgctgggcgtatcactgccatttgctctatcacatggaaatgggaatgtttcgtgaagtccgggtggaggaatga

SEQ ID NO: 177754 - DNA, 897 bp, Klebsiella oxytoca; identical to SEQ ID NO: 19852

SEQ ID NO: 177755 - DNA, 381 bp, Klebsiella oxytoca; identical to SEQ ID NO: 19851

SEQ ID NO: 177756 - DNA, 930 bp, Klebsiella oxytoca
atgaacgacctgattatgattgttattcgttttcttctttatctggatttgatggtaatatttggattgccattttttcagatatatggaataagcggtgtcagacatgaaacctataacctgactaatttcaggtcgtttataacctttgctgttgttacaggcatcattcttactggcattaatatgctcctggtatctaatgccatgagtggagtaactgacctcagagaattatccatccatgttatcgagatggtgatagaagaaactgatgtgggtattagctggattgtcaggctctgtgccctgtttaccacactcggtgctttgttcctttacactaataagagagtattgtcctgcctgctgatgacgatgagtgggggcgtggcgctggctacacttgcctggggaggacacgccgttatgcatgacggtctgcattactatctccatttactgagcgatctgacccatctcggcgctgcaggtgcctggacaggtgctctggttgcatttgctatcctgctgacgcgcagaaacgagcataatgcacagagcgtcattgtgatatctgactccctggcaaaatttgccacggcaggaacggtgattgttgtagccctgatcctgagtgcgctagtcaactatctgtatattgctgagggtaacttaactcccttattcaacagttcctgggggaggatattgcttgccaagacggctctgtttgttctgatgcttcttctggctgcagcaaaccggtttcacctgggtccccggcttgaagttatggtcagggaagggaattatgatcgcagcgttgccctgatgcgaaacagcatcctgacagaattcgttgttgcgattatcattctgggcgccgtagcgtggcttggaatgcttgctccgtctcagatcagctag

SEQ ID NO: 177757 - DNA, 681 bp, Klebsiella oxytoca
atgcagcgtattttaatcgttgaagacgaacaaaaaacaggtcgttacctgcagcagggactggttgaggaaggctatcaggccgatctctttaataatggccgcgatggtctcggggccgcgtcgaagggacagtatgatttgataatactggacgtgatgctgcctttcctcgacgggtggcaaatcatcagcgcactgagggagtccgggcacgaagaaccggtcctgtttttaaccgcaaaggacaacgtgcgggacaaagtgaaaggactggagcttggcgcagatgactacctgattaagccctttgattttacggagctggttgcacgtgtaagaaccctactgcgccgggcacgctcgcaggccgcaacagtctgcaccatcgccgatatgaccgttgatatggtgcgccggaccgtgatccgttcggggaagaagatccatctcaccggtaaagaatacgttctgcttgagttgctgctgcaacgcaccggagaagtgttacccaggagtcttatctcgtccctggtctggaacatgaattttgacagtgatacgaatgtgattgatgttgccgtgagacgtctgagaagtaaaattgatgatgactttgagccaaaactgatccataccgttcgcggtgccggatatgtcctggagatcagagaagagtga

SEQ ID NO: 177758 - DNA, 1401 bp, Klebsiella oxytoca
gtgaggttcaaaatttccctgaccacacgcctgagcctgattttttctgcggtgatgcttacggtatggtggttatcaagttttatcctgattagcaccctgaatggctatttcgataatcaggaccgcgattttctgacaggtaaacttcagctcaccgaagagtttcttaaaacagagacgttcaggaacaaaacggatattaagtcattatcagaaaaaataaacgatgcgatggtggggcacaatggcttatttatttctataaaaaacatggaaaatgaaaaaattgttgaactctatgccaaaaattctgttgttccagcggtcctgcttaataagtcgggtgatattctcgactatatgatccagacggaagaaaataacaccgtgtaccgcagtatctcgcggcgggttgccgtgacgccggaacagggtaaaagcaaacatgtcatcattacggttgccacggatactgggtatcacaccctgtttatggacaaactcagtacctggctgttctggttcaatatcggtctggtctttatttctgtttttctgggctggctgaccacacgtattggtctgaaaccgctacgggaaatgaccagtctggcttcctccatgaccgtacacagcctggatcagcgtctaaatcccgatctggctccgccggaaatctctgagaccatgcaggagttcaataatatgtttgatcgcctggagggggcattccggaaactgtcagatttctcgtctgacatcgcgcatgagctgcgcacaccagtcagtaatctgatgatgcagacgcagtttgcactggctaaggaaagggatgtttcgcattaccgcgaaattttattcgctaacctggaagaactgaaaaggttgtcacgaatgaccagtgacatgctttttctggcacgttcagagcatggtctgctgcggctggataaacatgatgtggatctggcagccgaactgaatgaattacgtgagttgttcgagcccctggcagacgaaacaggaaagacaatcacggttgaaggagagggcgttgttgccggagacagcgatatgctccgacgtgctttcagtaacctgctttccaatgcaatcaagtattctcccgataacacctgtacagcgatacaccttgagcgtgacagtgactgtgtgaacgtgatgattacgaatacgatgtccggccaggttcccgctaatctggaacgtttgtttgaccggttctatcgcgcagactcatcaaggttctacaacacggaaggcgcggggctgggattatcaattacaaggtcgatcattcatgctcacggcggcgagctgtcagcagaacagcaggggcgggaaattgtgttcagtgtgcgtctgttaatggattaa

SEQ ID NO: 177759 - DNA, 435 bp, Klebsiella oxytoca
atgaaaaagatccttgtatcctttattgccatgatggctgtcgcttcatctgcctgggctgcagagacaatgaacatgcatgaccaggtaaataatgcccaggcgcctgcccatcagatgcaatcatccgctgaaaaaagtgcagttcagggggagagcatgaaaatgatggatatgagcggtcacgatcaggccgcaatgtcccatgaaatgatgcaaaacggcaattctgccgcccatcaggacatggctgaaatgcataaaaaaatgatgaaagccaaacctgagaacacccaagaaactgctaagccattttccgaaatgagcgagcatgagaaagccgctgttgtgcatgagaaggcgaataatggccagtcttccgttattcatcagcaacaggcggaaaagcatcgcagccagatcacccagaattaa

SEQ ID NO: 177760 - DNA, 981 bp, Klebsiella oxytoca
atgagccatcaactcaccttcgccgatagtgaattcagcactaagcgccgtcagacccgaaaagagattttcctctcccgcatggagcagattctgccatggcagaatatgaccgctgtcatcgagccgttttatcccaaggcgggcaatggccgacggccctatccgctggagaccatgctgcgtattcactgcatgcagcattggtacaacctgagcgacggtgccatggaagatgccctgtacgaaatcgcctccatgcgcctgtttgcccgattatccctggatagcgccctgccggatcgcaccaccatcatgaatttccgccacctgctcgagcagcatcaactggcccgtcaattgttcaagaccatcaatcgctggctggccgaagcaggcgtcatgatgacccaaggcactttggtggatgctaccatcattgaggcacccagctctaccaagaacaaagagcagcaacgcgatccggagatgcatcagaccaagaaaggcaatcagtggcactttggcatgaaggcccacattggtgtcgatgccaagagtggcctgacccacagcctagtcaccaccgcggccaacgagcatgacctcaatcagctgggtaatctgcttcatggagaggagcaatttgtctcagccgatgccggctaccaaggagcgccacagcgcgaggagctggccgaggtggatgtggactggctgatcgccgagcgtcccggcaaggtaaaaaccttgaagcagcatccgcgcaagaacaaaacggccatcaacatcgaatatatgaaagccagcatccgtgccagggtggagcacccgtttcgcatcatcaagcggcagttcggcttcgtgaaagccagatacagggggctgctgaaaaacgataaccaactggcgatgttattcaccccggccaacctgtttcgggtggaccaaatgatacgtcagtgggagagatctcagtaa

SEQ ID NO: 177761 - DNA, 270 bp, Klebsiella oxytoca
atgagaggcactcaatcgcgtgatgcagaggttttgtatcgtaaggcccaggagtatttcgatcgcatctcactaggtgaattgtcagaacaagaatcaaaagttcttgaggcattaatgcaggatgggggcattgtctgcgactcttcacgtgatgatgtcgttttgtcgttacaacgagagtaccttgccgctactactcgcgaggaaaagaatgttgtcattcagtctctgatatctgttctggcagaagatgtctctgaaaggtga

SEQ ID NO: 177762 - DNA, 1986 bp, Klebsiella oxytoca
atgtatcatctcgacaacaccagcggcgttcccgagatgccggaaccgaaagatacccagaccatttcgccccgttggttcggtgaaagcgaagagcaaggcggtattagctggcctggcgctgactggtttaatatcgttcaggctgagcttcttgcaattctttataaggcaggcctttctcccgacaagtctaagtacgatcaattggcccatgctattcagagctttgccgacggctcttctgacgagcttctcacattgttgggtcagaaaggggatgctctgctcggcaccagacttttaatggatggtgcaatccttcgtactcagcgagaaaaaaatctcgaaatcctttctgtgctggattttgacgcagaccctaccggggtgaaagacagctcgtatgcgtttcagagagctattcttgctgctcacgagatggggggaggacgtgtttttatccccacaccaagtcttcgatacaggatgacttacccggtatttgtactggatgatgtagaagtttttgggacgggtcagtcctgctttatcgactttgaaaaccctctatttcttcagggaagaggggcatttgttatgggttcaagttatgaaataaatcgggatgtggtccttgctaactatgcatccgggaactatcccaatacgcccacaatgaaccctgattatgttaatcctcagaaaatgcagtatttacgtgataatcctggattcattgaaaccagcaacgcctcacttcatgacgtcaacatcaaggccatctataccggctcgactaagaatgggggatatggcattaattttgttaatgcctcacattgcgttgcgtataacatctggggaagtggctggacgcaactcataggaatggggtctgatacgacgccagaaacaccatccaatgaccattgctatgcatggaatctgcatgttcttgaacctaaccaggataaaacttattactctctattttttatggcaaattcaaccaactgcaaggttacagatggttatcaatggtcacaaatccctgacggaacgcctaatggatctgcaggcgcaaccaatatggttgaagactgtgaaatcagaaatatttatgttccaaatctgggcagaacagcgtcttccgaagggattttactgaacaatgccaagggttgtactgtcgacaatgtctacattggcaatgccacatcagctgtttcaactttctacgatgtgagtacctttaatgacgcagataaacccaacattatatcaaatataagagcgaataagtgcacaagtatggtttcgctaagggctaagtatgcaaggttaaaagggcttgcagcttcgaactgcagctatgaactgaatctcgctaactctaacgccagtggcaacgttattttcgataagcttacagctgttaactttggtgcaggttatcttccgcttaattacatccagaataattcgctggctggctgggtgaaggcgactaaggtactacgtccgatccactgcctggtcaatccgctaactgatgttgttaactggggcgttaacaaacatcttgaaaccacaactgcagccctgaccctcttgtatcctatccctgattatatgaaggctatagcccaggtcagatgcttcttttcctttgcttcacgtagcgagactgctccaaagtcaaggataacgatcagcttgcgaaggattgccgggtataacggaaatattcatgaaaaccctgtaactgaaatttctaactacaaagaatcctccctgcttacacgtgtagatggagagctggtgacccaggctttcagtaccactactaaaggatttgttccttcagagggttcttcaaacggcgctgataacagcctggatcttctgattcagtggacaaataacgttgcaggaaactatcagaaagaaattgagattacctactggagaatttcacaatga

SEQ ID NO: 177763 - DNA, 876 bp, Klebsiella oxytoca
atgtcatttgaattttctcatagcccgcaggccatctggctttatcagtacgacgtcgatggcgtttatatcggctccgtttttatgactattccggcaggcacgggtttgcctgctaataccacgcacattccctgtaagccggaaaaaggccagaccggtatatttaaaaatggtgactgggaatatgtgactgatattcgcgggacacgtttctggaatattcacggcaccggttttgttatttcgaccctgagtgaatctctgccggaatgggctatcaccactgagccattggtcgccgatgcgggttatgttccgctgttcgctgatggtcagtggacgcagattgaagacaggaccggtcagatttactacgagatcgacggcaccaaacataccgtctctgacgcgtggtttacgctgccggagggttgcacgtttgtggccccacctgagggcaaaacaacgttcgtcacccgctggaacgggacggagtgggtttatgtcaaggacctgcgcggtcaggttatctggagcaccacgacccgcgagcccctgaccattaccgaaattggccccgttcccgatggctacaccctcaaaatgccgggtcagtttgatgagtgggatggctcagcctgggttaaaaatacagaagctgaacaggcttatctcatcactcaggctgaccgccagaaggcaaaacttctgtctgaggcgtcagagcagatttcactgctgagctatgccatcagcagcggccaggctactgacgatgaaaccgcgcaactcccacgctgggaggcgtatcgcctcgcggtgagtcgtgtggatatcactgcaatcgatattgtctggcctgagaagccgtaa

SEQ ID NO: 177764 - DNA, 336 bp, Klebsiella oxytoca
gtggcctccaccgacctcggaaccgtggcggccagtgactttgatcacggcacaaagcccaccagttcggataacgagcatgaccatgatggtggcctgttagcgccgggggacgtctgggacccggattatgttgtcgggtcagataatgactctcaccgcacgcggaacaagaccagcaaggcagcagctcacagccataccgtcgatatcggcattcacggccacaccgtttatatcggcccgcatgctcatgccgtgacgatcaacagcaccggtaatacggaaaacaccgtcaaaaatatcgcctttaacgccatcgtgaggttagcgtaa

SEQ ID NO: 177765 - DNA, 1077 bp, Klebsiella oxytoca
atggctacatttaatgtcccgacgctccgccagctcatccgcgctggtattcaggatttagagattgaactcgaccaggaattaccgattgtcggcgttgaacgtgcgttaaataccgcgttcagtggagctttacgcgacgtctacgattatcagacgtggattaaaaaccagattatcccgtcagagcagtctgccgacgaaaccattattgataccgcccgctatgaaggcgttattcgtaaggccgcatcctatgccagcggcccggtcatcttcaccggcacaaagccgctgacgctcgatacggagatgcagacgcagggcggcgtacgctaccacgtcaccgccaccagtgacccgtcagcgggcaaaatcaccgtcaccgtgcaggctgacgagacgggcctcagcggcaacctgattgcgggcgacgtcctgaccctgatttccccggtggccggagtgaacagcgacggcgtggtggcggatgccggtatctccggcggcgcagacgtcgagtccgtggccgaactgctgacgcgcctgctgtaccgcaagcgcaacccgccaaccggcggtgcgctgcatgattacgttatctgggccaccgaactgccgggcatcagccgggcatgggcctttgactgctggcacgggctgggtacggtgggccttgcgtgggtctacgaccagcgcactgacattatcccgaccggcaccgaccgcgaagccatgcaggtgtacatttttcgccatcaggacccggcgaccgggacttacgtcggcaagcccggcggtatcgaggtctggcctatcccgctgacgctcaagccggtaccgcttaacatccgcgtcatccccgacactgctgccattcgttctgcggtcaccctgagcctgcaggcgctgttccgctcagtttctccgggtgacaaattgaagctctccgccatccgcacggccatcggctcatcgacgggcgtcaccgactacgagctggacctcaccaccagtcaggccagcgagaactacgagctgttaacgctgggggctatcacatggcgcatcgtgtag

SEQ ID NO: 177766 - DNA, 453 bp, Klebsiella oxytoca
atgaccatcagaataaactggcacctgcccgctggcggcgatatcgagattgaacacaatggcctttcgtttgacgagggccttgtttctttggtgtatatctgcctgtttactgatgcgcgggcagataccagcgacgaaatacccgacggcaccgatgaccgtcgcggctggtgcggtaattcttacagcgattttgaatggggctcaaaactctggctgattgaccgtgaaaagctgaccgaagaggtcaggctccgcgcggagaattacgcccgtctggccatgcagccgttattgcgttacggctacgcaagaaatgcgcaggttattgcgactattccccgtattaactggctggcattaaccattattctcacccgcccggataaatccgagttaaccgtcgaaataaagaaacgctgggaggcggtagaaaatggctacatttaa

SEQ ID NO: 177767 - DNA, 1257 bp, Klebsiella oxytoca
atggccactaaatgggaagacctgcgtgatgcctcgttccggggcgtcccgttctttttccgcgacgtcgagggcgctggcggtcgccgcgctatcccccacgcttaccccaaaaaagaggtgggctggacggaagaccacggcgcggtgctgactcagcagcagattaacgcaatcctgcttggcagtgactacatcgaccagatgaaccgcctgctggcggcactcaataccgccggtcccggcgaactggtgcatccgtggttcggcgttcagaaggttcaggtgggccgcgttacgcatcgtctctccaccgaagaaggcggcattgtctacatttcctttgaggtgtacgaggctggcgagcagctgtttccgtccggcaccgaagacaccagcgccaccacgctcagcgcggcggataaggtcaaggaagcgctggccagcggggattattttgcggcgctcgatggcgtcggcagcatggtggacacgcttcttgaggacatggagggctttgtcaccagcctgccgaccctgccggatgcgctcagtgagtggatggaccgcctcaaccggtttaaggacctcgccggtattgtggccgccgctccgggtgaaatgatccgcgatatcaccggcctcatcagtgatatgaaagacctcgtctctgagcctccgttcgccctacgggtctacgaccagttgcgcgacaaatgggaaggcgatcgcgcagcacagtccgctaccaaatctctggtcgataacatcagcgtgaacaccgataccggctttgccagcagcgtcacaccggcatcgacgccggagaccactgcagcgatggagaccaatatcgaagacttccggcgtctggtcatcatttccacgctggtcgctcaggctgaagcggtggccacagcaaccttcgagaccggtcaggatgcgcagaataccggcgaccagctggctgagcgtctcggcgagaccgcagcggaagccgtcgaaagcggtctccgtgaattgtggcgctcccttcgcgagctgcggttcgcggtggtgaatgatgtgcgtatccgcagcatccagttgcctgagctgcgccgtgtcacgccagcccggacagtgccggtgatgctgctggcctaccgcgagaccggcgacgcggagagccgggatgagctggtgacccgcaaccggctgcgctatccctcctttattacaccttcacagacgattgagatcatcagcaatgactga

SEQ ID NO: 177768 - DNA, 1812 bp, Klebsiella oxytoca
atggcaaaccgcctcaccactgaaatactcatcaatctgtcaggtaacctgaccgcgaaagcccgccagtacggagccaacatgtccgagttcgcccgcaccaatcagcgggcaatgaacgtaattaaagctacgtctgcagcagcaggtcgtgccattgatgcggttggcaatcgctataccggcatgattgctggttttgccagtggtgcaatgttgcgtaactttgccgatacagatcgtcggctgacccgcttgggcatttctgccgataaaacaaaggagcaaattaccagcatttacagcgatgttcaggatgtctctatcaaaacccgtattgatgataaagagcttgtcggcttcctggaaacagtcaacgcaatgaccggtgatattgagttcggtatcaaaaacctcaagtctgctgcattaactattgcaggtacaggcagtagcggtgagtcagttggggcattattcgcacagttccagaagtacggaatcaacgacgataaaaactctacattagctatggatgtacttaaccggctaggtaaagaaggggcatatgagctgaaggatctggctgaaaaagcaggcccctccctttctctttatgctgctgctggcgggcgtggcgttaagggcatcaaggatgtgggtgtggtgatggagtcagcaatggatgcgacgggaaaccgtgatacggcggcgacgttagttgagaattttatccgcgaagtccagaaccctaaaattgcaacggcactagagaaaaaaggggtaaaaatcagggataagaacggaaagctgaaatactcactcccagaactactcataatgttgtctgaagggtcagccagaggagggaaaaaaagcggtaaaggtcaactcggcgaactgatggatgttggttttacgcagaccagtcttgatcttatttcaggtgtctccagccagaaaggtcaggaaaacctacgccgatacaatgccgttatagcagatggggcatcaatacaaaaagatgcaacctacgccgcacaggattttacatctgcactacaaagccttaatacgacttggcttaagttcgctaatggtaacttggctgagccagtgcaggagctggcagacgcgattaactcagtggatcagaagactgtccagaattggctggaaaccggcaagaatattgccatcgcggtcggtggtgttatcgccgcccgcaaagccttccaattaggtaaaggtgcatgggacttgttcggcggcggaaagtctaaaggtatccccaaaggtgtttcagatgtgttcggctcaggagtaatgccggtctatgtggtcaatatgggttcaggaggtatgggcagcggtcctgatatcggtggtcccggtggcggaaagcctccaggccggggtggtccaggtcgcgcttattccgcaatgggttcagcctggatggttggcccgctggctgcaacaatcccatttcttgatgagaaaccaaacattaccgatgatgacaaagccagcatggtcaaatgggctcaggaccgggccaaagaaccgtctgtctggtctcgcgttatggactttctccagccacctgcaggctatcaggacccgtcgccgtgggcgtctatgcagccgcaaaaccagccgggctacccgttcctgcagcaacctgagctgaaaggcagtatagaggtctccgttaaagatgatcgggttcaggtgaccaacgtcaaggtcaatgcccccggcgtcaccctgagcgcccagtctggcgtcagtaatgtggagcaggactga

SEQ ID NO: 177769 - DNA, 384 bp, Klebsiella oxytoca
atggctgagatgaaaatcactttaaagcacggttacatcgccggtaaaggcactgacgatgagatccgctacaaagaagtcaccttccgtgaactgacctcaaaagacgttattgacgcccaactggaagcggagcgcgtggtcatcggggaaaacggcaaggcggtggcttattgctctgaggtgctgatggggctggcactgctgcgtaagcaaatcctgtgggtgggtgaaatccccggtccgctgtcgcttaagcagctttacagcttccaccctgaagaccttgagctgctgtccagcagcgcgagcaaaatggatgacctcgtgacggagaccgctggccgggggcgacctgatgccgctggcgacggcgctcagtaa

SEQ ID NO: 177770 - DNA, 282 bp, Klebsiella oxytoca
ttgtttaacggtcggggtctcaataaaacgtggtggcgctggcaactcggcggcagaatgctgctttgtaacccagcgttgcagaaccagttctacacggtcgttatcgcctgcatatttattattcatgaagccgctaacgacgctggaagacagtccggtttcacgggcaacctgagcaaaagtaaaacgggtaccatcaacaaggttgcgcagaacctcgcgaatatcggaaatattcacctcagacataattctctccattatttgaagggtatttaa

SEQ ID NO: 177771 - DNA, 2079 bp, Klebsiella oxytoca
atgtttgccacggtgaatgaattagcgggcctgccgggtttaccgggaacgccacagggcatcagagccatgatgggcaaactggtcaaacagaatcagacgctggtccgtaagcgtcagggaagtaaggcgtttgagtatcacattgacagccttcctctggttgctcagaaagcgctgcgtgaccgtcaggttaaagagctgatgaacaatcaggatgcagcgttgcctgctcctgaacgttcagcggtgacggaaaagagtgatacccggttatcgctttaccgtgatcaccccgtgctgatggagcaaaagctcactggcttaaccagcgaccaacaaaagattgctgatgcccgtattgcgctggtatcggaagtcatgaagctgggggaaataccgggattcagctgcgccaaagccatcagggaaatcgtccgacggtcccgcagcggcgagttacctgagcatctggccacacaggtgacgttagccaatgccaaaaaaggttcatcacgcaccctgagcgagatctcccttaagcgctggatggctgatttcaaaaaagccagaacatcgactgagcgtctggtactccttgcacctggtaagcgccagcgcgtggagcctgaggaaattgcgtggttgcctgattttctggcgtattaccgtaatcccaatggtgtaacgatggctgaggcatacgaggattttattcatggctggtattcgcgatattcggatcagccggagatgcttttctctgctccgacctataacacagtgcgctatgcgatggataaactcccggaagtggtgaaacagcatcgccggatcaccggcagtgaagcccgtcagattgagggatttgtacgccgtgactggctttgcctgccggttaattacgtctggatcggggatggccacggcatgaagatgaaagtcgcctctcctgaacatggtaaccctatcacaccagaggtgacgttcattctggacgggagctgccgatatattgtgggctggagtctggctctgtcagaaagcgttattgccgttgctgatgccctgcgtcacggtattaagaataacggggtgccttatatctattattccgataacggtggcggtgagaccaacagcacgcttgacgctaatatcaccggtattttaccgcgtctcggagttgaccaccgtctgggtattcctgagaacccgcaagggcgcggcatcattgagatccttaacaaaacgctggggatgcgtatatcccgccaatttgcaacctactacggaactggcgcggataaaagcaccacacgtaaggtatcaaaatccctcatcgccgcgctgaacgcggtggataaagggcgtgagctgacagctaagcaggagcagaccctacgcgatttcccgtcatggaatgagctgattggggaaattgaagccggggttcactggtacaacaaccgcgcacacgagtcactgccactgaaagctaatggggagcatttcactccagcgcaatttcgtaagtacaagctggaaaaagaaaaaactgaaattgaatggctctccgatattgaacttcgccatatgtttatgccggagactgagtgctcagtcagacgttgcgaaattcagcttttcaataacctttattattccgaagcacttcgcgaagagcatggccgcaaggtccgtgttagttacgacattcacgatgctacgaagattatcgttcgtcggatggatggttcgctgatatgtgaagccatctgggacggcaacaagaaagcagcattccctgttacggcggaatactggcaaaaacagaaacgcatcaaaggtatgcgcgagcgtggtgagaaaaaagtccgtctggccgaggccgaaaatgtgctcaccctctccgaaccagcagggccggactggctggacagcaatgtctatcgccctgtcagccgggcggttcccgctatgcaggttgtgtctgaagaagaggaatacagcgaggatgaatatctgaataactcgctggatatgctggaatcaaataaacgtaaaaacgctatttaa

SEQ ID NO: 177772 - DNA, 225 bp, Klebsiella oxytoca
atggaaagaaatgaagtgcgtgactggcatcgcattgacattgtcgccgagcttcacaagcgcggcgtgacaatgcgcagcctttccaccagtgcggggttaagtcccgacacactgaaaaatgcgctggctcgttcataccctaaaggtgagcgcattatcgcgaatgctctcaatctggagccgtcatccatctggcccagccgctacagcaaggacttgtga

SEQ ID NO: 177773 - DNA, 570 bp, Klebsiella oxytoca
atgattgaagataaagaaacggaatttgcttttcatactgagcgaaaagaaagtcttgcagcccgactaagggaactagcagagaggcataaaagcctgagagccgcctcgcgagagtgggggatgtcgttctcaacactgaataactacatcaacaggggaactgagccatctttctttgctatggtcgatatagccgaaaaggaaagcgtaaccattgactggcttgcatatggcaaaaatgatgaagaatttgagttcacaataacggcggatggattacaaaaggttcgccacactccaggtcgagatacatggttgatgattttcgacaacttaagcatgggagaaagactggctcttttgaactactgtatcaaagctggcgctcctaatttagttaaactcgccactgaagttggagctacagaaagggagtttttagctcttccagcggaagacaaagctagggttatgagactttatgagcaaatgaaaaaagggtcatctgaaaatcgtgaagcgatagccaaaccaagcccgtccagaaccagcaagaaggccagttaa

SEQ ID NO: 177774 - DNA, 2220 bp, Klebsiella oxytoca
atgaacggggtgcagatccgcattcgcggtaaagtgcagggggtgggattccgccccttcgtctggcagctggcgcagcagttggggctgcgcggcgacgtgtgcaacgacggcgacggcgtgctggtgcgccttgtcggcggtgatgcgccatttctcgccgcgttaacccggcgctgcccgccgctggcgcgtatcgacagcgcggcagcggcgccttttgtctgggacgccgcgccgccaggctttaccattcgccaaagcggggccggaagcatgcgcacgcagattgtgcccgatgccgctacctgcccggcatgcctggcggaaatgaacaacccgcaggagcgccgctaccgctatccgtttatcaactgcacccactgcgggccgcgctttaccattattcgcgccatgccctacgaccgtccactgacctctatgtcgccgtttccactctgcacctcctgtgcggcggagtatggcgaccccgccgatcgccgtttccacgcgcagccggtagcctgcgccgagtgcgggccacggctggagtggcgcgggccgcaggcgcattcatttggcgaggcggctcttgaagcggcgacggctcgcctgatggcgggcgatatagtggcggtgaaagggctgggtggtttccatctgttgtgcgatgccggaaatcctgaggccgtcgcgaggctgcgggcgcgcaagcatcgcccggcgaaaccgctggcggtgatgctggcgacaacggcggggctcgatgaaccggcggtgacgctgctcacgtcccccgccgcaccgatcgtgctgctggataaaacgcaggtggccgggctgtgcgaccagattgcgccagggcttgcggaagtaggggggatgctgccgtctaatccactgcagcatttactttcgcaggcgctggcgcgcccattagtgatgacctccggcaacctcagcggtcgcccgccggcgttaaccaacgcagaggcgctggcggatttagccgggattgccgacggttttctgctgcataaccgcgagattgtgcagcggatggatgattccgtagtgcggcaaagcggcgagatgctgcgtcgcgcccgcggctacgtgccggacgcgctggcgctgccgccggggtttcacgatgcgccgcccctgctggccctcggcgcggatatgaaaaatacgttctgcctgctgcgcggcgacgaagcggtgctcagccagcattttggcgatctcgacgaggagggcgttgaggcgcagtggcggcaggcgctgcgcctgatgcaggagatctacgcttttacgccgcagcgggtggttgccgacgcccatcccggctaccgcgcttcgcggtgggcggcgtcgcttatgctgccggtggagcgggtgttgcatcatcatgcccacgctgccgcgtgcctggccgagcatcgctggccgctggagggcggcgacgtgattgccctgacgctcgacggcatcgggatgggggaaaatggcgaactgtggggcggcgagtgcctgcgggtcaactatcgcgagtgtgagcatcttggcggtctgccgtcggtggcgctgcccggcggcgacctcgcggcgcgtcagccgtggcgcaatctgctcgcccactgcctggcgtttgtccctgaatggcagaattatgccgacaccgccgcgctgcgccagcaaaactggccgctgctggcgcgagcaatcgagcgtggtattaatgcgccgcaggcatcgtcgtgcggccgtctgtttgacgccgtcgcctgcgcgctgggctgtgcgccgctagccctgagctatgagggggaggcggcatgccgtctggaagcgctggcggcgacctgcgaaggcgtggatcatccggtgaccctgccgtggcgcgaaggtaaactggacctggcgacgttctggcggcagtggctgagctggcaggcgggcccggcgcaaaaagcgtgggcctttcatgatgcgctggcccgcgggctggcggcgatgatgcgcgattgcgcgaacgcgcggaacattcacacgctggccttcggcggcggggtactgcacaaccgcctgctgacggcgcgattgaccttttatctggccgattttactctgctttttccgcagcagctgcccgccggcgatggcgccattgccctcggtcaggcgatcgtcgctgcggcccgcctgcaggcttaa

SEQ ID NO: 177775 - DNA, 2670 bp, Klebsiella oxytoca
atgattttggtgcgaccacgcctgtacaaacctgccagagccaatcttagcgtgcagaaaatggctgctataaagcgtcaatcgccgtctgtcagtaaaccggtgctgatgaccctgactttagtcagcgtgttaacgctgccgaagggctgggcggataactattttaatcccgcgtttttatcggacgatccgtccaggatcgccgatctttcacgttttgaaggcaacggccaggcgcctggcgtttatcgggtcgacgtctatctgaatggcgcctttcttgccacccgcgatatgaccttctacgaagcgaaaccctccgccaggacgccagccgcagacgactccgggctaagcgcttgtctgacgcctgatatgctcaaagagatgaaggtgaacgttgaggcctttccggggttgttaaagccctcttctcaagggtgcgtggatattgccgccgccattcccgcggctttcgcgcgctttgatttcacccagcagcgcctgaatatcagtattccccaggcggcgatgaagaacagcgccaggggctatattgcacctgaatactgggatgaagggatcaacgcgctattgcttaattacacgtttaccggtgcgaatagccgcgatcgcagcgagggcggcgttgatgcccgtaccctgtttcttggccttaacagtggcctgaaccttggcgcctggcgcttgcgtaactattccacctggaacgataacagcggcggcgagagcaataaaagcgactggcagcatatcagcacgtatgtagagcgcgatttgcgcgctctgaaaagcgaactgaccgcaggagatagctatacgccttccgcgatcttcgacagtttgccctttcgcggcattcagctggcttccgatgacaacatgctgcctgacagtatgaaaggcttcgcaccgaccatccacggtatcgctaaaagcaatgcccaggtgaccattcggcagaatggctacaccatcgaccagcgctacgtctctcccggcgcatttaccattgacgacctttactccacggccagcagcggtgatttgagcgttgagataaaagagtccgatggcagcatcactcgctatagcgtgccgtattccgctgtgccaattctgcaacgtgaagggcggttgaaatacgcggccacggcggcgagctatcgcggcgacagcagccagaaagaggacgttaagtttggccaggcgacgctgatatggggcctgccgcacggctttaccgtctacggcgggacgcagtttgccgatcattatcgcgcgctggcgttaggtacgggagccaatctgggcgactggggggcgatttccgtcgacctgacccaggcgcgcagcaccctggctgatgatagcgagcatcaggggcaatccacgcgttttctttacgctaaatcgctgaatagtctgggaactaactttcagctgctcggctatcgctactcaacatcgggtttttataccctcgacgagacggcgttgaagcgcatgtctggctataacggtccaaccgacgaaaatgaagaccagcgtagctggagcgattactacaacctctattacaccaaacgcggcaagattcagctgaatatctcgcagcagcttgggcgttttggttcgctttatgtaaccggtagtcagcagagctactggcataccggtgagaagaacacgctgctgcaagtgggctatagcgataccctggcgggcgtgtcatggagcctctcttataaccaaagccgtgccccgggagaggacaagagcgaccagcttattgccctgaatctctcgctgccgctcagccagtggctacatcacagcgatgatgttacccacaagcatcacaatatctacgccacgttcagcaccagtaccgatcggcacggcggcgtcagccaaaatgccggaataagcggtaccgcgctggcgcaaaacaatctcagctatagcgtacagcagggttatcaaaatcatggcgttggtaaaagcggcgccgccagcctcgaatatgatggcgccgaaggcaatgtcaacgtgggctataacaccagcaataacggcgattatcagcagataaattacggtctgagcggcggcatagtggcgcatgcgcacggcttaacgctgagccagccgctgggcgagaccaacgtgctgatcgccgctccgggagcaggcaatgtcaatattgatgacgagccgggcattcataccgatcgccggggctatgcggtggtgccttacgccacgacctatcgccaaaatcgcatggcgctggatgtgaactcgatggcggatgacgtggatatcgacgatgccgtcgtgaacgtcgtgcctacgcagggcgcgctggtactggccagctttaaagcgcgcgtcggcgaacgtgcgctcctgacgctgctgcacgacgggcagccggtaccgttcggcgcgaccgcctcgaccgatgcgtcagcggaggaggcgatcgtcggcgatggcggcgaagtttacctggccggtttgagcccccagggaacgctcaaagtgcagtggggccggggagcttcccggcagtgtctggtgcattatcaacttcccgcaacccggcaggccctggtgcgacaacgcgtggaatgccgctaa

SEQ ID NO: 177776 - DNA, 1416 bp, Klebsiella oxytoca
atgttacttcctgtgattatggcgggtggcaccggtagccgcctgtggccgatgtcccgtgaactctatccaaaacagtttctccgactgtacgggcagaactccatgttgcaggaaaccatctcgcgcctctccggtctggatacccatgagcctatggttatctgcaatgaagagcaccgcttcctggtggctgaacagctgagacagctcggtaaactgtcgaaaaatatcatcctcgagccggtgggccgcaacacggcaccggccatcgcccttgcggcgctgcaggccacgcagaatggcgatgacccgctgatgcttgtcctggcagcggaccatatcatcaataatcaccaggtcttccacgacgccattcgcgtcgcggagcagtatgcgcaggctgaccatctggtcaccttcggtatcgttccgaacacccccgaaaccggctacggctatatccagcgcggcaatgcgctgggggaaggggagcacacgccttatcaggtcgcccgctttgtcgagaagccggacctggagcgtgcgcaggcctatctggcctccggagaatattactggaacagcggcatgttcatgttccgggcgaaaaagtatctctccgaactggcaaaattccgcccggatattctcgaagtctgcacggctgcggtccgcgccgccgacagcggcagcgactttatcagcatcccgcatgaggtgttcagcacctgtcccgacgaatccgttgactatgcggtgatggaaaagaccgccgatgcggtggtggtggggctggacgcagactggagcgacgtcggctcctggtctgccctgtgggacgtcagcccgaaagatgagctgggcaacgtgctgaccggcgatgcctgggtgcacaacagccagaactgctacatcaacagcgacgaaaagctggtggcggctatcggcgttgaggacctggtgatcgtcagcaccaaggatgcggtgctggtaatgaataaaaaccgcgcccaggacgtgaaaaaggtcgtggagtacctgaaggccaaccagcgcagcgaatacaaacgacaccgcgaaatctaccgtccgtggggccgctgtgacgtggtggtccagacgccgcgcttcaacgttaaccgtatcaccgtcaagccgggcggggcgttctccatgcagatgcaccaccaccgcgccgagcactgggtgatcctcgccgggacggggcagataacggtcaacggcaagcagttcctgctgactgaaaatcagtcgacctttattcccattggtgccgagcactgcctcgagaacccgggacgtatcccgctggaagtgctggagatccagtccggctcctatctgggcgaagacgatattatccgtattaaagaccagtatggtcgttgctaa

SEQ ID NO: 177777 - DNA, 1377 bp, Klebsiella oxytoca
atgacacagctaacttgttttaaagcctacgatatccgcggtgaactgggcgaagaattaaacgaagatatcgcctaccgtatcggacgcgcctacggtgaatttctgaagccgaaaacgatcgtggtgggtggcgatgtgcgtctgaccagcgagtcgctgaagctggcgctggccagaggcctgatggatgcgggaacggacgtgctggatattggtctgagcgggaccgaagagatttacttcgccaccttccacctgggcgtggacggcgggatagaagtgacggccagccataacccgatgaactataacggcatgaagctggtgcgtgaaaacgcgaagcccatcagcggtgacaccgggctgcgtgatatccagcgcctggcggaagagaaccagtttgcgccggtggatgcgtcccgtcgcggcaccctgcgtcagatatcggtgctgcaggagtacgtggaccacctgatgggctacgtgaacctggccagcttcacccgtccgctgaagctggtggtgaactccggcaacggcgcagccggtcacgtgattgatgaagtggagaaacgttttgtggcggcaggcgtgccggtgacctttatcaaggtgcatcaccagccggacggccacttcccgaacggtatcccgaacccgctgctgccggagtgccggcaggacaccgcggatgcggtgcgcgagcacggcgcggacatgggtatcgcctttgacggtgacttcgaccgctgctttatgtttgataacgatgcagaatttatcgaaggctattatattgttggcctgctggcggaagcgttcctgcagaagcagccgggcgcccggattattcacgacccgcgtctgacgtggaatacggtggatatggtgacccgcagcggcggcacgccggtgatgtcgaagaccgggcatgcgttcattaaagagcggatgcgtcaggaagatgcgatttacggcggggagatgagcgcacaccactatttccgcgatttcgcctactgcgacagcgggatgatcccgtggctgctggtggcggagctgctgtgcctgaagaacagcccgctgaaggcgctggtggcggatcggcaggcggcgttcccggcgtcgggggaaataaaccgcaagctggagaatgcggcggcggcaatagcgcgcatccgtgagcgctatgaaccggatgccgtcaacgtggacaccacagacggcatcagtattgaatatccggagtggcgttttaacctgcgcagctcgaacaccgagccggtagtgcgtctcaacgtggagtcaaaagcagcgcctgcgctgatgaaagaaaaaacagcagagctgttacacctgttaagcggggaataa

SEQ ID NO: 177778 - DNA, 795 bp, Klebsiella oxytoca
gtgagagaattgttcacgacgatttatcgttatcggggatttatctggagcagcgttaagcgcgattttcaggcgcgctaccaaaccagtatgctgggcgcgctgtggctggttttacagccgctctcaatgattctggtttacaccctggttttttctgaagtcatgaaagccagaatgccggataacaccggtccgtttgcctacagtatctatctctgttcgggcgtactgacctggggactttttacggaaatgctggataaagggcagagcgtttttattaacaacgcgaacctgattaaaaagctaagctttccgaaaatctgcctgccgattattgtcactctgtcggcgatcctgaatttcgcgattatctttagcctgttcctgatctttattatcgtcaccggtaatttccctggctggctgtttttctcggtaattccggttcttctgttgcaggtgctgtttgccggcggcctgggcatgattttgggcgtcatgaacgtctttttccgcgatgttggccaactggtaggcgttgcgctccagttctggttctggtttacgccaatcgtctatgtcctcaattcattaccgggctgggcgaaaaatctgctgctgtataatccaatgacgcgcgtcatgcagtcttatcagtcgatattcgcctatcaccaggcgccgaactggtattcgctatggccagttctggctcttgccgttattttctgcgtcatcggtttcaggatgttccgcaagcatgcggcggatatggtggatgaattataa

SEQ ID NO: 177779 - DNA, 1215 bp, Klebsiella oxytoca
atgagctatatcagagtaaataatgtcggcaaggcctatcgtcagtatcactcaaaaactggccgactgatcgaatggttatccccctttaatactaagcgccacaatctgaaatggatccttagcgacatcaactttgaagtcgcgcccggcgaggcggttggcatcatcggcataaacggcgcgggcaaaagtaccttgctgaagctgattaccggaacctcaaggccgacgaccggaggcatagaaatctccgggcgtgtggctgcgttacttgagctgggcatgggattccactccgattttaccggtcgccaaaacgtctatatgtcaggacagctgctggggctgtcttccgacaaaatcaccgagctgatgcctgagatcgaagagtttgccgaaattggcgactatatcgaccagccggtacgcgtctattcaagcggtatgcaggtgcgtctggcctttagcgtggccacggcgattcgcccggatgtgctgatcatcgatgaggcgctctccgttggcgatgcttatttccagcataaaagtttcgagcgtattcgcaaattccgccaggaaggaacaacgctactgttggtatcccatgataagcaggcgatacaaagcatctgcgatcgcgccattttgctgaataaaggccgcattgaaatggaaggcgagccggaagccgtcatggattactacaatgcgctgctggctgataagcaaaatcagtctattaaacaggtcgaacacaacggcaaaacgcaaactgtttccggcaccggtgaggtaaccattgctgaagtgaacctgctggatgaacagcgtaatgtgaccgagtttgctgcagtaggggagcgcgtccacttgcaagtcaatgttcaggttaaggaagatattcctgaactggtggtgggttatatgatcaaggatcgcctgggacagcctgtctttggaaccaatacgcatcacctgaatcaggcgctcacctccctgaaaaaaggagaaaagcgctcattcatattctctttcgacgctaacctgggcgtaggttcttattccgttgctgtcgcgttacatacttcaagtacccatctgggcaaaaactatgaatggcgcgatctggcggtagtattcaacgtcgtgaatacggatcaaaaagagtttgtcggtgtgtcctggctgccgcctgaactggagatttcttaa

SEQ ID NO: 177780 - DNA, 1281 bp, Klebsiella oxytoca
atgggttcgtcgttttaccgttcatttgaagaacgacacaggggtacggtcgaagatattaaaggccgcctgagtttttatttaccttttctggcgcgcttaaaagcacgttatccggatggggtgattgccgatatcggctgcggccgcggagagtggctggaaatcctgaatgaaaacggcatcgctaatatcggcgttgaccttgatgacggtatgctggcacgcgcccgggaagctgggctgaatgtgcagaaaatggactgcctgaagtttctcgagcagcaggaagacgaaagccttatcgcgctgaccggattccatattgctgaacacctgcctttcgaggtcttacagcagctcgtcaagcataccctgcgcgtgttgaaaccgggcggtttgttgatacttgagacgccgaacccggagaacctgagcgttggagcctgttcattctatatggaccccactcatcatcacccgctgccgccgccgttgctggaatttttacccatccactatggattcactcgcgcgatcactgtacgtctgcaggaaaaggatgccctgaaagccgctgatgcggcgattaaactggttgatgttctgaagggcgtcagccccgattacagtattattgcgcagaaagacgcgctgccagaagttctcgccagcttcgagcctcttttcactcagcagtacggcctgacgttggatgccttaagcgagcgatacgacgcaattctgcaagaacagcaggcggcttcagccgcccggctggcggcgctcgataaatcctacgcccggaaaatgggtgaaatggcacagagtattcagctactgcagggccaggttggcgaattaaaccagttggtcgcgcacaatcaccagcttcaacagcaggtagccgatctgcataatagccgctcatggcgagtcacacagccgctgcgctggctctctttccagcgccagctgttgcgtcaggaaggggctaaagttcgctgccggcgtgcggcaagaaaaatattgcgcaaagggatggcgctctcgctggtctttttccatcgctatcctaaatcaaaggtgtatctgtttaagatcctcaggaaaaccggcagttatcaactgttccagcgcctgttccagcgcgtgatgctggtgtcgacggatccaatgatgatggcgaagtccagaagatacgatgtgggcactgaagagatgacaagtcgcgcgttgagtatttataacgaattaaaaaataaaaatacggagaaataa

SEQ ID NO: 177781 - DNA, 3639 bp, Klebsiella oxytoca
atgcgtattgtcattgatttacaaggcgcgcagacggaaagccgctttcgtggcatcggtcgttatagtgtttctattgccagagcgattatcaggaataatagccagcacgaagttttcatcgctttatccgccatgctgggggaatccatcgctgacgtgaaagcgcagtttgccgatctgctgccggcagaaaatatcgtcatctggcacgctgcgggtccggtgcgggcgatggacagaggcaatgaatggcgtcgggaaagcgcggagctgatgcgtgaagccttccttgaggggctacgcccggatgtcgttttcatcaccagcctgtttgaagggcacgtcgacgatgccgtcacatccgtgcataagtttagccgtagctataaagtggcggttctgcaccacgatctgattccgctggtgcaggcggaaacctatctgctggacgacgtttataagccctattacctgcagaaagttgaatggttaaagaatgccgatcttctgctgactaactccgcttataccgcccaggaggcgattgaacacctgcatctgcagggcgaccatgtgcgtaatatcgccgccgcggcggacccgcagttttgcatggcagaagttagcgcaagcgaaaaagagacggttcttggccactatagcattcagcgcgattttgtcctctatgcgccgggtgggttcgattcgcgtaaaaactttaaacgtctgattgaggcctattccgggctcagtgatgaattacgtcgcgcacatcagttggtgatcgtcagtaagctttccattggcgatcgtcagtatctcgaatccctggcctctgcgaatggcctgcagcagggggagttggtgctgaccggctatgtgccggaaaacgaactgattcagctttaccggctgtgtaagctctttatctttgcctcgttacatgaaggttttggcctgcctgtgctggaggcaatgtcgtgcggcgcgccggctattggctcgaacgtcaccagcattcctgaagttatcggtaatcctgatgccctgtttgacccgtattccgtctcctctattcgggaaaaaatgacccaatgcctgacggatgcgcatttcctggcgcgtctgaaagagatggcgcagcagcaggcgcgaaatttctcatgggataaggccgctgttacggcgctggaagcgtttgaaaaaatcgcagtgcagggaaaaagcgcagcacacgcttcgccagcggcgctggttcagcgcatcctcgccatttctcaagggcagcctgaagatcgcgatttacgtttatgcgcgacggccatggatttcaacctgaaaacggctgagctctatcagcttgaagacgatgccctaaactggcgcgtagaagggcctttcgatagttcatacagcctggcgcttgtgaatcgtgaatttgcccgcgcgctggcgggggatggcgtcgatgtgctgctgcactcgacggaagggccgggggattttgcccctgatgcggcatttatggcgcaggccgaaaatagcgatctgcttaatttttacaataaatgccggtcaattgaggcgggcaaaaaggttgatatcctcagccgtaatatctaccctccgcgcgtggcggatatgaatgcccgggttaaattgcttcactgctatgcctgggaagaaaccggcttcccgcagccctggatacatgaattcaatcgtgaactggatggcgtcctgtgtacatccgaacacgttcgtaaagtcttgatcgacaacgggctgagcgtaccggcgtttgtcgtgggtaacggctgcgatcattggctgaacaccccggcaaaacccctgaaccgcgccgcagaggggatgttccgtttcctgcatgtctcttcctgctttccgcgcaagggcgttcaggcgatgctgcaggcctggggcagggcgtttacccgccgtgacaatgtctcgttgaccattaaaacctttaataatccgcataacgaaatagacgcctggcttgcgcaagcgcaaagcgagtttgcagactatccgttggtcgaggtgattaaagcggatatgtcggccgaggagctgaaaggcctctatgaaagctgtgacgtgctggttgcgccaggatgcgcggaggggtttggtctgcctatcgctgaagcaatgctcagcggactcccggcgattgtcaccaactggagtggtcagcttgattttgtgaattcacaaaattcatggttggtagattatcagttcactcgagtaaaaacccactttggtctgtttgcatccacctgggccagcgtggatatcgataatttaacggaagccctgcagcaagctgcatcgacggataaatccgcactgcgggaaatggcggatgccgggcgtcagcgcattctatcgcaatttacctgggcggcagtcgccgagcgctctcagcaggctgttaagacgttgcgggcgcacattgatatcgctcaacaccgggcgcgcatcggctggttgacgacctggaacactaagtgcggtattgctacctattctcagcatttagtggaaagcgcgccgcatggcgcggatgtgatatttgctccgcaggtcagcgcggaagatttagttaatccagatgaagattttgttctgcgtaactggatagtcggtaaagagaacaactatctggaaaatcttcaacagcaaatcgatgcgctacgtcttgacgtattagtgattcagtttaactacggtttcttcaatcatcgtgaactggcggcgttcattcgccatcagcatgatgccggacgcgtggttgtaatggcgatgcattcgacggtggatccgcaaaaagagccggaatggaacttccgccttgccgaaatggtggatgcgctggcgctttgcgatcgattgctggtacattccattgccgatatgaatcgtctgaaagggctgggtctcaccgacaatgttgccttgttcccccatggggtaattaattattctgcaccgtcgccgcgcaataatccgcaggcattacccttaatcgccagctacggtttttgtttgccgcataagggattgatggaacttgttgagtccgtccatcgtcttaagcaggccggcaagccggttcgtctgcgtctggtgaatgcggaatatccggtgggtgaatcgcgcgatctggttgcggaacttaaagccgcttctcaacgtctgggcgtaaccgatctggttgaaatgcataacgattttctgccggatgatgaaagtctgcgcttactttccgaagccgatctgctgatttttgcctatcagaataccggcgagtcggcgagcggggcggtgcgttacggtatggcgacgcagaagcctgttgccgttacgccgctggcaatatttgatgacctggatgatgcagtctttaaatttgatggatgcagcgtggatgatattagccagggcatcgatcggattttacattccattcgtcagcaggattcatgggccagcgctactcagaaacgagccgatgcctggagggagcagcatgattatcaggccgtatcccgtcgcctggttaatatgtgtcaaggcttagctaaagctaaatattttaaataa

SEQ ID NO: 177782 - DNA, 1116 bp, Klebsiella oxytoca
ttgagagttttacacgtctataagacctattatccgaatacctacggtggtattgaacaggtcatttatcagttgtgccagggctgtgctcgtcgggggatcgcggccgacgtcttcaccttttccccggataaaaataccgggccagtggcttacgaacagcatcaggttatctataataagcaattaattgaaatcgcctcgacgccattctcactcggcgcgttaaagcgatttaataaaattaaagataactacgatattattaactatcatttcccgtttccctttatggatatgctacatctgatggcgcatcctaaagcgaaaactgttgtcacctatcattccgatattgtgaaacaaaagcggctaatgaaattatatcaaccgctgcaggagcaatttctttccagcgttgactgcattgtggcctcatcgccaaactacgtagcctccagccagacgctgcaaaaatacctcgataaaacggtggtcattcccttcggcctcgaacaaaaggatgtgcagcataatccgcagcgcctggcttactggcgagagaaagtcggcgagcgctttttcctttttgtcggcgcatttcgttactataagggattgcatattctgctggatgccgcagagcgcagtcgactgccgatcgttattgtcggcggcggcccgctggaagcggaagttcgccgtgaggctgaacagcgcggcctgaataacgtgatattcaccggcatgctgaacgatgaggataaatatatcctctttcatctgtgccgcggggtggtctttccctcgcacctgcgctcagaggcgtttggcattaccttactggaaggagcgcggttcgcccggccgctgatctcgtgtgaaattggcaccggaacctcgtttatcaaccaggataaggtcaatggttgcgtgatcccgccggataacagcgcagcgttggtcgaagcgatgaacgaactgtggcacagtgatgaaacggcagcgcgctatggcgcaaattcacgtcgccgctttgaggagatgtttaccgccgaacatatgattgatgcctacgtgaatctctacagcacgctgctggagcagaaaccctga

SEQ ID NO: 177783 - DNA, 2103 bp, Klebsiella oxytoca
atgccccgacccatccccctcgaacgttatcgcaacatcggtatctccgcgcatatcgatgccggcaaaaccaccaccaccgagcgcatcctgttttacaccgggatgagccacaagctgggggaagtacacgatggcgcggcaactaccgactggatggcgcaggagcaggagcgtgggatcaccattacgtccgcggcggtgagctgcttctggcccggtatggaccgcagctttgagccacaccggattaatatcatcgatacccccgggcacgtggatttcaccattgaagtcgagcgctctatgcgcgtactggacggtgcggtcatggtttacgactccgtgggcggcgtgcagccgcagtcggaaaccgtctggcgccaggcgaacaaataccacgtcccgcgcctggccttcgtcaacaagatggaccgacccggcgcggattttttccgcgtggtgcagatgatgaccgatcgcctgaaggcgaacccggtaccgattgtgatcccggtgggcgccgaagagcacttcaccggcgtggtggatctcatcaaaatgcgcgccattttgtgggatgacgccacccagggaatgaccttcagctatgcgccggtgcccgacgaactgctggaaaccgcccggttgtggcgggaaaaaatggtttcggcggcggcggaagccagcgacgaactgatggataactatctcgaaaccggcgagttgagcgaggcggaaatcgtcgccggactgcgtcagcgcacggtgaagggggaaatccaggcagtgctgtgcggcagcgcgtttaaaaacaaaggcgtgcagcggatgcttgatgcggtggttgagctgatgccgtcgccgctggatattccggcgattcagggcgtggatgagaaagggcagcccgctgaacgtcacccgagcgacgacgaaccgttctcggcgctggcatttaaactgatgaccgacccctacgtcggccaattgacctttattcgcgtctattccgggacgctgaaaaaaggcgatgcggtgtggaatccggtgaaaggcaagaaagagcgcattggccgcatcgtgctgatgcaggccaacgatcgccatgaagtggacgaactgcacgccggagatattgccgcctgcgtcggcctgaaggatgtcaccaccggcgacacgctgtgcgaccctgatgcggtgattacccttgaacggatggagttcccggagccggtgatttcgctggcgattgaaccgaaaaccaaagccgatcaggagaaaatgggtatcgccctgcagcggttggcggcggaagatccgtcgtttcgtctgcatactgacgaggagtccggccagacgatcatttccgggatgggcgaactgcatctggagattatcgttgaccgcatgaagcgcgagtttggcgtcgaggcgaacatcgggcgtccgcaggtgacctatcgcgagacgatccgcaaaacggtcaaagaggtggaaggcaagtttgttcgccagtccggcggtaaagggcagtacggtcacgtggtgctgacccttgaaccgctggcgccgggaagcggtttcgtgtttgaggacgcgaccaaaggcggcgtggtgccgcgcgagtatatcccttcagtcgaaaaagggctgcgcgaagcgatgggcaccggcgtgctggcgggatatccggtggtggatattaaggcgatcctgacgtttggttcgtatcacgacgtcgactcctcggagatggctttccggatggcggcaatattcggcttcaaggaaggggcgcgcagggccgacccggttattcttgaaccggtgatgcacgtggaagtggagaccccggaagagtacgccggcaatattatgggcgatctctcttcccggcgcgggatggtgcagggaatggaggagcggttcggcagccagattattcgcgccgacgtgccgctggccgagatgtttggctattccaccacgctgcgttcaatgtcccagggccgggcgacctacagcatggaattccaccactacgcggaagccccgcgcaacgtggctgaggcgattatcgccagccgcgccaaaggctaa

SEQ ID NO: 177784 - DNA, 1053 bp, Klebsiella oxytoca
ttgagaattaaatttaaatttgacgatttagcaataagactttatctatttgctcttgtgataattacacttgttccttttggacgtggcagcatctcaggtctagagccagcagtgccttttttaattttatcatttgttatttttgccatgagcaaaaaacatattgacagaaagaaatggctcgtgctttttatgttttttttgtgggctatgtggattattgcagggattgcttttagttacgtaacatatgataaacttgcagatcatgagtcctcatttttgaggtatgtaaggctgctggaaatgtattttccagcgcttcttgtatttgtttttatcaatgacttaactattgaccaaaagaaaacagtttacagattttttattttgctgttttttgttgtcacgatcgaggctgcatggggctggtttatgcaattagataacctcgtcgctacgcaaagatttagttatcctgggatgggttatatatatagggctggtggtgttgcgaacgattcaagtgcgtatggcagtcttgcattaattcttggtgtggcttctctgattggattgaggcataccagcaaaagcaaaaccttatatcttttaattgttctaggattggtgctaaacgtttatatatctctaacgcgaactcttgtcttcgcgctagctgtttatatattctttgatttaattaggttaagaagcttaagtctatttaaatttttgttctttgcagtcgtcgtctctggagttattatatatggcattagcaatgaatacataattgctttgatggataggattactggggctggacaaattgatattacctctggccgtcttgctacttgggccatagttccggatatattgggtgaaaatccaatatttggggttggataccgaatggcaacagacaagtatggtattgttcctgataatgtttttttatcatctttacttgaaaccggtgttataggtctggcgttgtatataggcctgcttatgtctatttgttattgtatttggctttgttga

SEQ ID NO: 177785 - DNA, 240 bp, Klebsiella oxytoca
atgtttgttgaactcgtatatgacaagcgcaatgttgaaggtttggctaatgctcgttctatcattctcaatgagttaacaaagcgggtgcacagaatttttcctgatgcagaagttaaggtaaaacctatgcaggcaaatgctcttaactcagacgccagcaaacatgataaagaacggctaaatcgcatgcttgaggagatgtttgaagaagcggatctatggctggtaaaagaatga

SEQ ID NO: 177786 - DNA, 570 bp, Klebsiella oxytoca
atgctgattggttatgcgagggtatcaaccggggatcaaaacctcgatttacagaaaaacgcgctgttacgcgcagaatgtgaacaggttttcgaagatacggccagcggaaagaatgccagacgaccagggttaaagcgtgcgctgcggcggctgcgaccgggtgatgtgctggtggtctggaaactggataggctggggcgaagcgtgcgtgacctgatcactctggtatcggagctgcaggcgcgcggggtaaatttccggagtctgactgattcgatcgataccagcacagccgccggccgctttttcttccacgtaatgagcgctctggcggaaatggaaagagagctgatcgtcgagcgtacccgcgccggtttagctgcggcaagggagcaggggcgcatcggtggccgtcgccggataatgaccacagaagttgtggatcgttgccgacgcatgctggagaaaggggctactcggcagcaggtcgcggatgtgatagggatcagtgagaagactgtatataaatatttcccatcagaaagtggcgtacctgagaagtcatga

SEQ ID NO: 177787 - DNA, 1944 bp, Klebsiella oxytoca
atgattaagtttagcgcaacgctactggccacgctgatcgccgccagcgtaaatgcggcaacggtcgatttgcggatcatggaaaccaccgatctgcacagtaatatgatggactttgactattacaaagatgccgccacggaaaaatttggcctggtgcgtaccgcaaccttgattgagaaagcgcgtcaggaagtcagcaatagcgtactggtcgataacggcgatgttattcagggcagcccgctgggtgactatatggccgcaaagggtctgaaagagggcgatgttcacccggtctacaaggcgatgaataccctggattatgtcgtgggcaacctcggcaaccacgagtttaactacgggctcgacttcctgcataaagcgctggcaggggcgaagttcccctacgtgaacgccaatattatcgacgtcaaaaccggcaaaccgatgtttacgccttatctgattcaggatacccaggtgaaggatagcgacggcaaaacgcagacgctgcgcattggctatatcggcttcgtaccaccgcagataatgacctgggataaagccaatcttagcggtaaggtgaccgttaacgacattaccgcaaccgcacgcaagtttgtcccggaaatgcgcgaaaaaggcgcggacgtggtggtggtcattgcccactccggcctctccgccgacccgtatcaggccatggcggagaactccgtttactatttaagccaggtgcctggggtcgatgccattatgttcggccacgctcacgccgtcttcccgagcaaagattttgccggtatcaaaggcgcggatatcgcgaaaggtacgctgaacggcgtaccggcagtgatgccgggcatgtggggcgatcaccttggggtggtcgatctggtccttaacaacgacagcggcaaatggcaggtcagcgcagcgaaagccgaagcgcggccgatctacgactcggtggcgaagaaatcgctggcggcagaagacagcaacatggtggcggtattaaaagccgaccatgacgccacccgcgagtttgtcggcaaaccgattggtaaatcctcggataatatgtacagctacctggcgctggtgcaggacgacccaaccgtacaggtggtcaatatggcccagaaggcctacgttgagcactacattcagggcgacccggatctggcgaagctgccggtactctccgccgccgcgccgtttaaagtcggcggacgtaaaaatgacccggccagctttgttgaagtggaaaaagggcagctcaccttccgcaacgccgccgacctctacctgtatcccaacaccctggtggtgatgaaagtcagcggtaaagaggttaaagagtggctggagtgctccgccggacagttcaatcaaattgatcccgccagcagcaagccgcagtcgctgattaactgggacggcttccgcacctacaacttcgacgtgattgacggcgtgaactaccagatcgatatcacccagccggcgcgctacgacggcgaatgcaacagcgtgaatccgcaggccgagcgaattaagcatctgacctttaacggcaagccaatcgatccgaacgccactttcctcgtcgcgaccaacaactatcgcgcttacggcggtaaattccagggcaccggcgaggatcatatcgcgttcgcttcaccggatgaaaaccgctcggtgctggcggcgtggattggcgcggagtcgaagaaaaacggcgagatccatccggcggcggataacaactggcgcctggcgccgatccacagcacagtaccgctggatattcgctttgaaacctcaccgggcgacaaggccgcggcatttatcaaagagaaagcgcaatacccgatgcgccaggtggctaccgacgatatcggctttgctatttatcagctggatttgagtaaataa

SEQ ID NO: 177788 - DNA, 261 bp, Klebsiella oxytoca
atgagccgctatcagcacactaaagggcagataaaagataatgccatcgaggccttgcttcatgacccgttattcaggcaacgagttgaaaagaataagaaggggaaaggcagttatcaaagaaaagcaaaacatgcggggcgggatggtcgggaggccagtggcaagaaagtgattaacttttttaccactggccttctggttttaaagccttttaagagcgattgttctgttcttttaacaggtcacgaatttcgctaa

SEQ ID NO: 177789 - DNA, 243 bp, Klebsiella oxytoca
atgattgatgcatttcatgtgatgtatatgtataaaaaaatccaaacagaagccgcaactaccgacatcaaagcactggagcagcttttacgaaagttcaggagggtagtcaacgaacgtcgtgaagaatactatcaggaaataggtgagaaaaaagcacgtaagttgaaaatgaaaagagcacaaagattgcttgagaaaatggcatgtgacggggtttcgccagaagatctcattgactga

SEQ ID NO: 177790 - DNA, 297 bp, Klebsiella oxytoca
atgaatacatttaagaataaatctactgaaattttttatgttgtgtcgttgcatatctatgcggagctttttaactcaaaggataaaacgaccagtaatatgattataacgcatgtaatggaccatgagtttatctgtaaactaatcgatctggcgatgaagaatgctgaaaaacatcttctgaaaaaagcatggaaaaagaacgctgctggaaaactggctgaggtggattttaaagaggttaagctggcattagccaaaatgcattacactgttctggcggaatccctatgctga

SEQ ID NO: 177791 - DNA, 291 bp, Klebsiella oxytoca
atgaaaatagaacttaatacgacagagcagtttattagtgaagccgaatgtttgtataaccattatatgaataaacgactacgaaaccagtcagtgtattcctaccattttctgaaaaataaggaggatatgaacgaagtgattgaaaatattatcgagaaaacaaaggtctgtttttatggggccgaaggtgaacaaaaagtggaacggatctccgggagtgttaactatgtgaaagtaaaacagcatcttcgtcagctttggattatctataagtgtgtataccgctga

SEQ ID NO: 177792 - DNA, 207 bp, Klebsiella oxytoca
atgaaaaataacattaaacgatttattcgggtgcctgaagtgcttaatcgggtaggattcagtcgcactaccttatatgagcgtattaaggaagggaactttccagacagggtaaaaataggtccaaggtgcgtagcttttgtcgagagtgagatagatgaatggattgaaactactattcgaaactcacgtcagaacgcagcataa

SEQ ID NO: 177793 - DNA, 846 bp, Klebsiella oxytoca
atgaaaagaagtgaaatcaggaaagcactggaagcatggtttgatgttgagcgctatgaggtgatagagaagctaagccttcaacagttttatgtggagattgagcggcgtatcttggcctacaggatgttgttgagccggaataccataccaacctttaatcgattattgctggatgactaccgctataaaattttgcgaggcgaaatctttttcagtggtgatactgccacccttggacatgagcttgccagaacctacgcagtaaaccctacgacacgaagccacgcgcaattttatgcgaaaacgctggcattaaccgaagccactcctgagctttccgcgttaagcgaatccgaatttctgtccgagtatctaaaagaaacatcgctgagaaaccttgcccgtattacggtcgatattcatctggaagaggcatcaactgaagaaatcattgaacatctgaaagtgctgatcccccaatggaagagactgctaaagatgaaagctcctgcggaacgggagtatcgtttcggcaaaagcacgttcagaaaaattattgaatatcgtcttatcccgatgatggacctgattttctggggtgaagacaatggcgtcaaaatcccgctttcgctgatttcctcgctgcttcacgaagacagcgacaacgatcgtgatgaaggaatgctaaaggcaacggactacccgctggcaatggcttttctgactgatgcaagctatctaaaatcgcttgaagattacatcatgcaaaacaattacttaaaagactcacctgttgataagcatgttgaggacgataagaagaagaaaaaagcagccaagtaa

SEQ ID NO: 177794 - DNA, 1089 bp, Klebsiella oxytoca
gtgactctgactccgacagcgactctgactccgacagcgattccgactccgacagtgactcggattcggacagcgactcggactctgacagtgactccgactccgacagcgattcggatagcgacagcgatgccgactccgacagtgactcggattccgacagcgattctgactctgacagtgactcggactccgacagcgattccgactccgacagcgattcggattcggacagcgattcggattcggacagcgactcggattccgacagtgactcggattcggacagcgattcggattctgacagcgactcggatagcgacagcgattccgacagtgactcggactctgacagtgattcggattccgacagcgattcggattcggacagtgactcggattcggacagcgattcggattccgacagcgattcggactctgacagcgattccgactccgacagcgactctgactcagacagcgactcggactctgacagtgactcggattccgacagcgattccgacagcgattcggactctgacagtgattcggattccgacagcgattcggattcggacagtgactcggattcggacagcgattcggactcggacagtgactccgactctgacagcgattccgactccgacagcgactctgactcagacagcgactcggactctgacagtgactcggatagcgacagcgattccgacagtgactcggactctgacagtgattcggactcggacagcgattcggactccgacagcgactcggactctgacagtgactcggattcggacagcgattccgattctgacagtgactctgactccgacagcgattcggattcagacagtgactcggactctgacagcgactccgactccgacagtgattctgactctgacagcgattcggattcggacagcgattcggattctgacagcgattcggactctgacagcgactcggattccgacagcgattccgactccgacagcgactcggactctgacagcgatattgaggccaaccccgatagcaacagcccggacgttgtcgcgctggaaggtaacctga

SEQ ID NO: 177795 - DNA, 1212 bp, Klebsiella oxytoca
atgagcatgccagatattattgaattagctaatgggcaaaaagttaaaggaacgttcagctcccatgagatgcagcgccgactgtcgggattacgggccaccatggaagcagacagcattgatgcagttattttaacctcgattcataatattaattactacggcgattttttatattgtagttttggtcgccagtatgccttggtagtgacaccgagccagtcatttttaattaccaccaatatcgatggaggtcagggatggcgccgcagctacggtgcaaatatcgtttacacggactggcagcgcgataattattaccgtgcagtacgtaaagtggttcctgataatagccggcggattgcactggaaggcgatcatgtaacgatcgaacagcgcgctaaattttgccattacctttctcagacacagtttattgatattgcaccggcgacgatgcgtatgcgcatgattaagtctgccgaagagattgcgctgattaaaattggtgctcaggtcgccgacctcggcggcgcggcatgcgtcgcagcgattgccgaagatgttccggagtatgacgttgccctggcagccacctcggcgatgacccgggaaatcgcgaaacgcttgccgcatattgaattgcgcgatacctggacgtggtttcagtctggcctgaataccgacggtgctcaccatccggtgacgacccgtcgcctcaagcaaggggatattttatcactgaactgttttcccatgattgccggctactataccgcgctggagcgtacactgttcctcggtcagcctagcgatgagcaattgcgtcactgggagatcaactgtgaggtgcaccgccgtgggcaggcgctcattcgccctggcgcccgttgttgcgatatcgccgcctcgctcaatgaaatttatcgcgagcatgacctgctgcagtatcggacttttggctatggtcactccttcggcgttctgagccactattatggccgcgaagccggtttagaattacgcgaggatattgaaaccgttttagcgccgggaatggtagtctcaatggaaccgatgatcatgctgccagagaacatgccgggacacggcggttatcgcgaacacgatatcctggtagtcaccgaaaatgcagcagagaacattacccatttcccttatggtcctgagcataacattatagaaaaatag

SEQ ID NO: 177796 - DNA, 954 bp, Klebsiella oxytoca
atgatgcaacgaaaaccaggtttgccgtctctcgacggtttacgctactttgatgccgcagcgcgcaatctcagttttacccgtgccgcgcaggatctttttcttactcagagtgcagtaagccaaaaaattcaatcgcttgagcagcaacttggctatctggtctttcaccgcactcccgcgggactacgcttaaccccgcagggtgaacaactttttatcggagtgcgccaggcctttgccatcctcgaaactacgttgcaccaaaccggtgaagaaacccttgagggcaccataaagattcgggttatgccgtcctttgccaccaaatggctgcttccccgattgcatcagttttatgagcagtaccctatcagcctggaaattgatgccgatatgacgcccgccaattttaaatctgacgcggtcgatatcgccatcactcctttttgggttgatgataaaaatctaattcaacggcatctgttcaacgatgtgatctatcccgtgatcagcccggatttgttgaaaacacggcatctgcgcagttacagcgaactctgtggtttgcgcttactgcatgattccatgccgcaaaatgcctatagcacccattggcgctcctattttgcccgcctcgggctctatgacctgaatgtcgaggcgggaaccggattttcccgcgccgacctcgtactccaggccgcctgcgccggccaaggaatcgccttaagccgtcactctttgtgtgcgacggaagtgagcaatggcgcactgattcgcccttttaccgatatcgtcgaagacggacaggtgtggttaacctgcccgcgtaataatgagaaacggccacgcgttcaggcgttgattaactggctgacacaagaaaccgcacgtcatattgcagagcgaacgcaaattctcggtgaatatacgctgcataaggccggctaa

SEQ ID NO: 177797 - DNA, 849 bp, Klebsiella oxytoca
atgaaaaataaactgtggctattactttctatgtctgccttacaactttcaccattattgatatctacggcccaggctgatttactggatgatattaagcaaaaaaaagaaatagtgattgccaccgaagcgcgctatgccccttttgaaatgcttgaagatggcaaaatagtcggtctgggaaaagatattctcacggaagtgatgaaaggattacccggggtgaaagtagttcagctggatattccatttcaagggattttgcccggcctggaaagcaaacgatttgactttgtggcaacttctttaaccatcactcgcgatcgtgaagcaaaatttgcttttaccgctcccttttctgacgccagcgtggccattctgaaacgcaaaggggatagccgcattaatagcgccaaagatctccagggcatgattgtcgccagccaggccggggcgccgcaaattgcggtgctaaaagaatatgaagcatcggtacttaaacccaccaccggtcacggcgttaaagaaataaaagcctttattgattataacgaagcctatgcggcattagcggcgcaccgtgttgatgcggttgtgcaatcgctgccgaacctcgcgccgttggtaaagacccgtggtgatacgtttgaaattgtacgcccaccgtttggcccggccacttggtacgcatgggccggaagaaaggatgcggatagcgcctcactggtcaaatttatcagcgacggcattgtgcagttgaataaatcgggaaaactggcgcagctacaaacgaagtggctgggtttttctatggccgttcctgagcaagttccgaccccggcaaactaa

SEQ ID NO: 177798 - DNA, 672 bp, Klebsiella oxytoca
atgtttgatatttcagtggtgtttccctatttccctcagctattaattggcgtgctcagtactctggctgtatcgctgagcgcgattgtcataggattgatcctcggttggttaatttgcctggggttaaactctccgcggcgtctcgtgcgttgtttttgcaaaacctatgtcagtttttatcgtggaacgccgttactggtccagttgatattaatattttatgctttgccaacagtagggatcacgctttcaccattgctggcggcggttgtggctctctcattaaataccgcagcctttcaaggagagattcttcgggctggctttaaaatgttgcccaaaggccaactggaagcggcacgagattttggtttttcagcggcgcaaacgctgttttatattcagatgccgcaggtgttgcgcgccatgatcccggctttgattaatgaaaccatcgatattatcaaaaactcggcattggtctcggtggtggcggtccatgagttgatgagagtgactcaaacgctggcctcaaccacctatcggccgctggagttttatacggcatgcggtctcctttattttctgacctcgtgggggctgagtattgttggcaccaggttagagaaaaaccgctcatcttcggctcaaagggtattagcacaatga

SEQ ID NO: 177799 - DNA, 663 bp, Klebsiella oxytoca
atgaatgttgaaatacttttcacctataaagatgccattgccgccggtattttaatgaccctaaaaatgagtctcggcggtatcctgctggggctggcgatcgggctatgtttttttcttctcgaaagacaaaaaccggctttatttaatgtgatatatcatgcatggattaatgtgtttcgcggcacgccgttactggtgcagctctttttagtcttttatggtggaccctatataggtattaatctcgaggcgcaacaggtcggggtactgtgcctgggatgttatggttccgcttattttgcggaaatatttcgtgcgggtcgcaatgctgtctcaggtgggcaagttgaagcggcggcagacctggggttaagtccatggcaaatatttactttcattgtctggccgcaaatgctcgctcgcattatccagccattggttggccagagcgtcattttggtaaaagagtcgtcggtgctatccattattacggtcggtgaactcaccaataccgccatgaccattgctaaccagacctatgcgatggttgaaatctacgccttaatggccattgtctattgggggatcgcgatcggtatctcccgtctgggtaataaaatagagcgccattattcttattctcaattaagccgaggttaa

SEQ ID NO: 177800 - DNA, 819 bp, Klebsiella oxytoca
atgcgtgattatgctattgagattaacaacctcaataaacattatggcgaaaaccatgttctacgtggcatcgatgtcagcatttctcccggagaagtcatctgcgtgattggtggctcagggtcgggtaaatccacgctgttacgctgtattaactttttggaagattatagctccggcagcattctggtgaatggcgagaacgtcggctatgaacctctcggcggggaaaaacgccggcgtttaagcgacaaggaaaaccgtcaggctttacgcgacgtctgtatggtctttcagcagtttaatctgtggccgcatatgacggtactcgataacgtagccacgccgttgcggcgggttaaaaaggtctcctgtgaagcagcctactccgaagcgaaaacgcaactggcacgggttggtctggctgacaaagccgatagctggcccgcgatgttatccggtggtcagcagcagcgcgttgccatcgcccgggcattgaccatgaaacccgccattatgctgttcgatgaaccgacttcagcgcttgatccggagctggtcggggaggtgctaaaggtcatccgcaatcttgccgatgatggtatgaccatgatgattgtgacccatgagatggggtttgccgctaaagtctccgatcgggtgctgtttcttgccgatggctgcattgaagagcagggagcaccggcgcaactgttccatcagccgaaaagcccgcggctgcagtattttttgtcgtcgtggagtgagcgccagtcgggggctagattacctgaaagggcattgaaggagtcagcatga

SEQ ID NO: 177801 - DNA, 966 bp, Klebsiella oxytoca
atgaagcaagggattacatttggcgtactcgctggcgcatgctggggattcatcttcctgccaccggtactgctacccgagatctcaccactgctgttaacctgcggtcgctttgctacctatgggatactggcggcaatattacttatacctcaatggcgcaacattgcccgtgtatggcatcatcgcgatctgctgacgctaatccgtctttcgctgatgagcaatgttttctattttctgctcgtcgcggtggccgtacagcaggtcggtattgccgcgacatcgttagtgataggtttaattccggtgatggttccggtgcttggtcgcagggaccagcatgctccgcccttcaggcaattattgctgccgatgacggctatcattgctggtgtggtgctgattaatctgcatgcgatacaaacatcatcgcaccaagttacagaaggaaaacggcagatgctggggatcctttgtgccttcgctgcattactgtgctggagccgttacgctgtcgagaactcccgctgtctgaaaaacctcccttacaccagtaaccagtggtctctcctgataggcctgtgtacgggatgtgtttcggtactgctatggctcatcgccagtatattcaggttttctgcagttgacttgtcgttaccggaacacacccaaacgctcttttggataacgaacatgatgttagccgtggtctcctcatggctgggatatctggcgtggaatctctgttcccggcgtcttccggtatcactgacagggcagatggtggtttttgaaacccttttcgcgctgctatatggttttatctattcacagcgcattccggatctccaggaaagtgccgctattacgctgttaattggtggggttatgtttacgttacattaccatcagcacaatcatggcggcgacgtgagtaatacttcagaagtcaatcggagttga

SEQ ID NO: 177802 - DNA, 660 bp, Klebsiella oxytoca
atgcaatgcctacaccgctcccgtcagggatttatagaagagaaaacagcaacgtataatcgcctgcgaggattgatatctgaattcggcgtcatcgcgccacaaagtacagattccctgcgacacatggtttctgcacagaaagattctttaccacttcaggttcagcaatgtgttgatgatttgctggagcacgttgctcgcatcgaagccaacatagctgaatatgatcggattttgtcccgcatggccaaaacagatcatcgcagtcaaaggctgatggaattgaagggcgtaggccccacaacggcctgtgcgctggtcgccagtatcggtaacgcacatgattttaagaatggacgccagctggcagcctggctgggccttacgccatcgcagtacagcagctgcggaaagtcgaatcttggcaggataacgaaagctggcgattcgtatctgagaacatttctggttcaggggggccgctcggtactgatcggggcggagaaaaagactgattcattcagtcgttgggtctgttcactgatcgagcgcagaggatactggcgtgccgttgtagcgatcgccgtcaaaaacgcaaggctgtgctgggcatcattgcattacggtgatgatgtcaggctgtactcagccagctaa

SEQ ID NO: 177803 - DNA, 1014 bp, Klebsiella oxytoca
atggcggttatcacggctcgggtttcaccgctggcagagctggtttacagcatgctaccgcgccctaaaatcacggaaattctcgatgaggtaaacagctggacgatatttacccgacatttttcgcatataaaaaatgacattacccgtcccgatacccgcctgctcctcaccaccatccttgcggatggtatcactcttggcctgaccaaaatggcagaagcctgccccggtagcaccaaatcatcactcgaagatattcaggcatggtacatccgcgatgaaacctattcagctgctcttgctgagctggtaaatgcacaggggaaaagtccactggcggcattctggggcgacgggacaacgtcatcatcagatggacagaatttcagaacaggcagctcatgccgctacgcagggcaggttaacccgaaatatgggcaggagcccggacgtcagttttatacccatatttcggatcaatacagcccgttttacacctgcataatcagtcgggtcagggattcaacccatgttctcgatggcttgctgtaccacgaaagcgacctggaaatcagcgagcattacaccgatacagctggtttcaccgatcatgtctttgccctgatgcatctgatgggatttgcgttctgtccgcgaatcagggatctccacgacaagaagctgtttatcaaagggaaagctgaccaatacccggcgcttcagtcactgatatcaacgaccagcctgaatctgaaagagatcgaaattcactggcgtgaagtgctgcgtctggcgacctcgataaagcaggaaaccgtgacagcgtctctgatgctgaaaaaactagccagctacccgaagcaaaaaggacttgccaaatcactgagagaaattggccgcattgagcgaacgctgtttatgctcgactggttccgcgatcctgcactctgtcggcgagtacaggcggggctgaataaaggtgaagcccgtaacgcgctggctgttcactga

SEQ ID NO: 177804 - DNA, 852 bp, Klebsiella oxytoca
atgagacagaggctgatggaactcatcgagcagcatgccagcgctggcggctggcaaaacgtataccgccataattcacaaacacttaattgtgagatgaatttcggtgtttatcttccacccaaagcagcaacagaaaaactgccggtgctgtactggctctcgggtctgacctgtacggagcagaatttcatcaccaaatcgggtatgcagcattatgccgccaggaacaacatcatcgtcgttgttcctgataccagtccccgtggagagcatgtcgcagatgctgacagctacgatctgggccagggtgccggcttttatctgaacgcgacggaacatccgtggagtacgcattacaggatgtatgactatattctccatgagcttccggctgttgtcatggagcatttacctgtaacatcaaggaaatcaatatccggtcactccatgggagggctgggagcgctggttctgtcgctgcgaaatcctgatgaatacgtgagtgtatcggcattttcaccaatagtgtcaccttctcaggtgccatggggacaacaggcattcaccgcgtacctgggtgaaaataaaaaaacgtgggagcactacgatcccgtcagtctcattttacagggtgcgaaattaccagaaatttttattgaccagggattaagtgacgccttttatgaagatcagttacgcactaaaagtcttgaaagagtgtgcaacgagatgaacatcaacacatcattccgatatcatactggttacgaccacagctattatttcatttccagctttattggtgagcacattgcttaccatgccaacaggctcaggctgtcagcatga

SEQ ID NO: 177805 - DNA, 399 bp, Klebsiella oxytoca
atggcaacacctgtaatttctggtaatgacgttttttctcacgtcttcatcggtgcatccgatgttgaaaaatccgctgatttttacgatgctgttctcggtacgcttggcatcaataacctcggcccgtttggcaatggctgggtactttatggtcgcgaaaagccagcctttattattgcacgtccgggcaacggtgaagcgccatcggccaacggcgttactgtcggctttgcagctgcaagtccggaagaagttgatgctttccacgccgcgggccttgccgccggagggaaagatgaaggtcagcctggcccgcgcagccatctccctggagcctatgcagcctacctgcgagaccctgcaggtaacaaaatcacggcttatacgttcatctga

SEQ ID NO: 177806 - DNA, 1110 bp, Klebsiella oxytoca
atgaaatcacgtgctgccgttgcatttgcaccagggaagcccctggagattgttgaaattgatgttgcaccacctaaaaagggcgaggtgctgattaaaaatacccacaccggtgtctgccacaccgatgcctttaccctctccgggaacgatcctgagggcgttttcccggtggttctcggccacgaaggggccggtgtcgtcgtggaggtcggtgaaggcgtgaccagcgtgaagccgggagaccatgtgattccgctttacaccgccgaatgcggggagtgtgaattctgtcagtccgggaaaacgaacctctgtatatcggttcgcgaaactcagggaaaaggactgatgcctgacggaaccacccgcttttcttacaatggccagcctgtttaccactacatgggatgctccaccttcagtgagtatacggtagtggccgaggtttctctggcaaaaattaacccggcggcaaaccatgaacacgtctgcctgctgggctgtggcgtgactaccgggattggcgctgttcacaacacagcgaaagttcagcctggagattctgtcgctatttttggtcttggcgcaatcggtctggctgccgttcagggggctcgccaggcaaaagcaggacgcattatcgctatcgacaccaacccggccaaattcgaacttgcccgtcagttcggtgcaaccgactgcatcaacccgaacgaccatgacaaaccgattaaagatgtgctgcttgaaatcaacaaatggggcattgaccacacttttgaatgtatcggtaacgtcaacgttatgcgtgcggcgctggaaagtgctcaccgtggctggggccagtccattgtcatcggcgtggccggcgccgggcaggagatatccacccgtccattccagctcattaccgggcgcgtatggaaaggttctgctttcggcggagtgaaaggccgtacgcagcttccggccatggtagaagatgccatgaagggtgaaattgaactggagccatttgttacccacacgatgacgctggatgaaatcaatgaggccttcgatcttatgcatgaaggtaaatccatccggacggtaatccgttactga

SEQ ID NO: 177807 - DNA, 276 bp, Klebsiella oxytoca
atgcccagtactcctgaagagaaaaaaaaggtccttatccgtgttcgccgcattcggggtcagattgatgctctggaaagagcgctggaaaatggtgctgaatgccgttccattcttcagcagatagctgccgttcgcggagcagctaacggtcttatggcagaggtgctcgagagccacatacgggaaacctttgaccagaatgacagctacagccatgaaatcagtaaatccgttgacgatacgattgaactggttcgcgcctatcttaaatag

SEQ ID NO: 177808 - DNA, 993 bp, Klebsiella oxytoca
atgaaaatgagtgtgacaggctatccacatacatgcgtcttcacccctgggccgcaccaaacagcagctgcaattggcaacacgggtgtgaaagtggtgtcgacaccagcgttgatcgctctattggaggagaccagtgccgatgctgtagcaaaagacttaccgtccggctgggtgagcgtgggaacccatgtcgacgtacatcatcataaacccgcctggccttatcaggaggttcgctgtacggcgacgttaattagcgcagacgagaaaaggttgcagtttttcgtacaggcgcatcaagcgggagcattgatcatgagcggtaagcatgaacgtgctctagcgccactcagccgttttgaacgtgctgatggtaaactgccagagggagctccgctggagtttttctttgattttcacagcccttggtgctacctcgccttcccccgcctaagagaaattgccgctgcgtacggaagaatgatagtactacgtcccttccatctggctaatttgattgaccgcataggtggacgtagaccgttggatgcctcgccagcgtttgtcaactggttcaaacaagatatgcaggactgggcgcgcattcgccggctgccactgagttatcatcctaagttcccgttgcggccttcacgtgcgctgcgagctaccctgtatgcagttgaagaggggctgggagaagcattcgccttcaaggtgatgcaggcgtattggtcacaaagtctggatattagcgatgttgccatcttaggcgacttagccacttcagtagggctggataaaaatgcgtgcatctcctccatcggcgatgaagcccggaagctagccatagtatcgaacacagatgaagctattgctcgcggggtatttggtgcaccagcagtgtttgccgatggcaaactgttctggggaaatgaccgccttgatatgatggacacttggctggcatctgcgggagagcgctgctga

SEQ ID NO: 177809 - DNA, 1590 bp, Klebsiella oxytoca
atgaaatatattgttgacccattttccgaaaaaacgtcgcttaatacgccataccgtttactgcgtcattatgcagaaaaatggcctgataaagaagcgctggtattcgatgctggtaatcaacgaatgaccttcagaggttggcttgacagtgtcgacaagttggcgctagagctaagtcgtcgtggtgtaaaagcgggtgaccctgtggctctgttggcagaaaatcgtattgagtggccagttgcccagattgcaatttcggccttaggtgcgatactggtgcctgttaatacacatttccgtgataatgatttacgccacgttctcgatcacagccaagtggttgccatcttgctgtccgaacgttttcgctccagcgaatatttagccatggtacgagcgattcatcctcaactccctagcctaagagacattattaacttcgatgatatggaatatgaagcagtaatgcgccaacccgttttggctgaactgacggagtgggtatggtcccccagagagttggctagcatccaatatacttctggtactactggacggcctaaaggcgcagaactctgtatggaagggataatgatgaatgcctggggcaccgtgcagcggctggaagtgacggcgatggatcgctggacatccattattccgctcttccactgtgcaggttgcatcatgaatattctggcatgcctgacagctggtgcgacatatttgggtatgcgtgctttcgacgccggacaaatgctttcgctgatagaacgggagcgctgtacagttctgacgggagtccccacgtcctacttagcgatgttagagcatccggacagaccatatttcgatctctcgtctttgcgtaccggtacctgcggtggtgcagactgcgatccgagacttctggaacagtgcgcgcgggcgtttcctattaatgggttggttcaggtttacgggcagacggaagccagcacactgatagcgttagattactggcaaagtccccagcgctttgccaccgctggcttgcccttacctggagttgaagtgcaggtctgcgatccgaataccggagtggtactcccccacggggaaatcggccagctacaggttcgtgggccaatggtcatgttgggatatcatcgagatgcggaggaaaccgctcgctgcatcgatcctcaaggctggatgaatacgggcgatctcggtcggctaaacatcgatggtagggtcgaactggtaggaggacgcctgcgcgatatgatcattcgcggtggtgaaaatatctatcctgtagagatagaaaatctgctgcgtgagcatccgtcgatcactgaagttgcagtcttcgctctacccgataaattttacggcgaagtggtagccgccgctattgagtccaccaagccgttatccaaagatgaaataagaaaagcctgtgttggaaaaatagctggttttaaacatcctgctcgggtctttaccatcgtagaatggccgatgacgtcaagcgggaagatcctaaagcgcatgttgaaaagcgcagcccttgatgggcaactgaaggagcttttatga

SEQ ID NO: 177810 - DNA, 1407 bp, Klebsiella oxytoca
atgaaacattccactagcactgtaaagcacacggttatagaaagacggtcaatcgattatgttcctgataatgagcgcttcggcagcgctatgggacagtttacattatggctaggggttaaccttaatattaccgctattgtgaccggcgcgttggccgttgtattaggcggcgatgttttctggtcattaatcggtttatttataggtcagatattaggcagtatcataatggggctacaggccatacaagggccagctacaggactgccgcaaatgattcgaagccgtatgcaatttggtgtttatggcgcggtcatccctcttttactggtaagttttttatatatagggttctctgctggaggcaccttgctggcaggacaggcagtggctaaaattttgaatgccgcagaatggcagggtatcgttttattcggtgtcatcacgatcttggttgccactttaggctaccgcgccatacattctttagcacggatcgcgagtgtggtcggcatcattgcatttatttacatgttcgttgcattattagctggccataatattagcagtcttctagaacagagaaaatttattcccaaccagtttatcctttccatttcactggcggcggcctggcaaattgcttatggcccctatgtcggagattattcacgttacctgcctacggatacatcaaaactgaaagtgttctttgccgccgcctctggaacaacgctgggctctcaggcagccatgacatttggtgttttttccgccgctattgccggagtggcatttaccggacatgaagtagaattcgttgtaaatctgggggcatccggtctcgtcgcatctttgctttactttgtcgtaggcttcggcaaaataaccatgatgacattgaatgcgtatagcagttatatgtcgagtgcgacgctggtgaatggtttcagaggaaaagcaaccgtctctgtcggtcatcgatttatttatgtatcagccatgattttgttagctgtttccattgcgttatggggctcgggaagcttcattcacgctttttcttcttttttattatttctactgacctttatttctccctggagtgcaatttgtctggctgactggcagtgggggcatcgttcaaaatgcgacctgcaggcattaaacgatccacaaggaatatatggccgctggaactggagtgtaatttccatttacttcattggcttattaatggaacttccttttgtttccagcagtatttacactggtccgattgcaagcttgttggatggtgcagatatctcttggttagttggcctgattggcaccggcatagtgtattacatttacagcagaatattgccccccgcttctatgaaaatacaggctgctgattaa

SEQ ID NO: 177811 - DNA, 123 bp, Klebsiella oxytoca
atgaaaaaatcacgattcaccgaagagcagattgtttttgccctgaagctggctgatccggtgaagtccgtgccggaggcctgccgtaagcaggatatttatgatcccacgttttatacgtga

SEQ ID NO: 177812 - DNA, 1368 bp, Klebsiella oxytoca
atggcagtctggttggcagaaaaagcgcttttgtctgatggctgggcaaataacgtcggcataaccgtgtccgaagaaggcatcataaccgcgctggaaaagaacgcagcgccgagtccgcatgcgacgcgcatcaaaggggtcgtcgtgccgggtatgccaaacctgcactcccatgccttccagcgggcgatggccgggttaacggaggtcgcgggaaacccgtcggatagcttctggacctggcgggatctgatgtacaggctggtagataaaataacgccagaacagctggaaaccatcgccagctatctgtacatcgaaatgctcaaagccgggtacacctcggtcgccgaattccactatctgcatcacagcagcagcggcgcgccttatgaagagcggacggaattagcgctgcgtatcgccagcgcggcgaaacataccggcatcggcctgacgctgctgcccgtcctgtacagttacgccgggtttggcgcccagccgccctccgttggacagcgccgctttatcaacgatagcgacagctatctgacaatgtacgagtcgctcacatcgcggctggccggcgagccaatgcagcgtaccggtctgtgcttccactcattacgggccgttacgccggagcagattggcgccattctggcctgccatcctggccagcagccgattcatattcatattgctgaacagcaaaaagaggtggatgactgcctggcctggtccggcgagcgcccggtggagtggctgtacaaccatctccccgtggattcgcgctggtgcctgatccacgccactcatctgacgcctcaggaaacgatgaagatcgccgcatccggtgcggtggccggcctgtgcctgaccaccgaagccaatctcggcgatggcatattccctggcccacaatatctggagcataacggcgtctggggaataggttccgacagccatattagcgtcagcgtcagcgaggatttacgctggttcgaatacgggcagcgcctggtagcccagcgacgcaaccggctcatcgtcccaggcgagcctcacgtcggcaacgtgctgtatcaaggggcactacgaggcggcgccagagcgctgggccaaaacattggccagctaagtgtaggatatcgggccgatcttgtcgtattggatagccagaatccctttatcgccagcgcagaagaccagatgttgctcaaccgctggatcttcgcctgctcatctaatcccattaccgcggtgatgactggcggacgctgggtgattgaggatggacatcaccatcaagaagaatctgtctcacaggcatttattcaggtaatgaaacatcttgcagtctga

SEQ ID NO: 177813 - DNA, 762 bp, Klebsiella oxytoca
atggcgcgtaatgacttgtcaaattcggattccgtggatgagatacttgaacatcccgcccccttttatgaaagggtaaaggtcatgatcaaaaccaagatccacagcggggcatggcccgcgaattaccgtgttccctctgaaagcgaactggttacgctgtttggttatagcaggatgacgattaaccgcgcgttgcgagaactgaccgcggagggcttgctggtgcgaatgcagggggtcggtacttttgtcgccgaaattcgcggtcagtcggcgttgctggacattaacaatatcgctgacgaaatcgtcagccgtggccatcgccaccacgccagagttttcagactgacggaaatcgaagccgatgcccagcaggcgttcagctttggcatgcagcagggttgcggtctgtaccattcgctgatttgccattatgaaaatggcgtaccggttatgctggaagaccgactggtgaatatgcaggttgtgcctgactacctgcagcaggattttacacgtatcacgccgaacgcctatctctcctcaattgcgccgattgttgaaggcgaacacgttattgaagcggtcaacgtcacgcgggccgagtgtgtttacctggaaattgatgaacatacgccttgtctgctggtcaatcgtcggacgtggaccggccgtcaggagaagaaaatcgtcaccagcgtgcgcctggtctatcccggtccgcgttaccgtctggaagggagcatgcgcaaatga

SEQ ID NO: 177814 - DNA, 558 bp, Klebsiella oxytoca
atgatccgtctgctccctgccgggttgtatacggaaatgccctggaaaaacggcctgggcgtgacgcgcgaagtggcccgctatccggaatcgggagaatatgaatggcgtatatccctggcgaccattcgccagcctggtccgttctccacatttcccggctacctgcgcaatatcagcgtgctggaaggcggcgggatgtacctgacaatcgatgggcagcgcagcgcattgattgcgcctttccaggcgctggggttcaacggcgcgagcggcgtatcctgtgagattgtcggcggcccgctgctggattttaatgtgatttaccgggaagccgctctgcgggcgacggtgagctggtgcggggcgggaacgtggtcgtatcagggcggactgcggatattgtttaatgccgggcccgcgttgcgggtgagcgtcggcgaccaacgctatttactggaacattacgacagcctgctggtggatgaagcggtggcgctggttatccaggactctccgggcgtgcgtctggcccgcatcacgctggttcccctttaa

SEQ ID NO: 177815 - DNA, 228 bp, Klebsiella oxytoca
atgtcagcatgtggaggttgccgccgcacgcatagcgcttcaggcggtagaaacgccgtggacaacgtcgccatcgaactgctgtgcgcctgtcaggcgctgaagttccatcgcccgctgcgtgccgccgtgggcagcgaggcgacgctggagagagtgcgtcaggcgtgccgtttcgggataaagatacgctgctctaccccgatatacatgcgctacgcgccctga

SEQ ID NO: 177816 - DNA, 687 bp, Klebsiella oxytoca
gtgcaggtagtaataggggtaattctggcgccccctgtagcctggggcattcaccacctgccatcggtcgagtcggcgatcgttaacctgtttggcatactgtataccattcggtcactggcgctgtttgtgctgctgcccccgctgctccacacgcagattctggaccccattaatgttgttgtcgcacttgccatcggcagctttgcgctactggtttgcaccgtctgcgacgggctggactccgtatcggccgatacccgtcagtccgcggcagcgctcgggtataaacccgcccagcagtttttccagaacgacccgccgctggccgtgccggtgattcgttacggtctgtgcgttgccgtggtgtttaaggtcagaatcgtttccgtcgcggcattaattggcacaccacagctcggctcgctgtttaccctggggcttcctgctgcaatttctgactcccatcatcggtgggatcgcggacagcatcattctggcgctgctgcaggatatgctggtggtttacgccactcgtcaactcagcaactggcaacctcagagaggataattatgcttcagaactcgcttagtatacgctgtatcccccagatccgcggtgcgccaacggcgcttgccgttgcgattgcccagttgagcaccgcttcccagccccgttgcgactaa

SEQ ID NO: 177817 - DNA, 276 bp, Klebsiella oxytoca
atgaccatcgaccgctggctgctggttacccaaaacggcaaagcgtttggctggttcgacacccatcagccggcaacagcaattacccacgacaacatcaatctgggggcgacgttccaccagcaagggagcccgttgcgccatttactggacgctgcacagagctcgcccaaccaccgggccgtgatcgtcgatgaacggcaaatcctgcaggggaccatccacctcaatcaagtactcgacatgtgtaaatccacgcgccaggagggagcatga

SEQ ID NO: 177818 - DNA, 306 bp, Klebsiella oxytoca
atggacgaaccgttcagcgcggtcgacccggtggtccgcgaacagctgcaggaagagtttttgcgtattcagaaagaggtgagcaaaaccatcattatggtcactcacgatattgatgaagccatgaagctcggtgacctggtcgcggtacttaaacctggcggcaagctggcgcagatggcctctccaggcgaactgctcaatacgccgcaaaacgcctttgtgtcggactttatcggcaaagacagaggctatcgcaaactgagtttccacgccgccgacacagaaaccgggttacgcaactag

SEQ ID NO: 177819 - DNA, 1677 bp, Klebsiella oxytoca
atgagtaaacaagcaacccgttttcgcaatattgaaatcagagccccgcgaggcactaagctgaacgcaaaaagttggttcacagaggcgccactgcgcatgctgatgaacaacctggatcccgatgtcgccgaaaatccaaaagagctggtggtgtacggcggtattggccgggcggcccgcaactgggaatgctacgacaagatagtggagaccctgaagcagctcaatgatgatgaaacgctgctgatccagtccggtaaaccggtgggggttttcaaaacccacgacaatgccccgcgggtgctgatcgccaactcgaacctcgtgccgcactgggcaaactgggagcacttcaacgagcttgatgcaaaaggtctggcgatgtacgggcaaatgacggccggctcatggatctacatcggcagccagggcattgttcagggcacttacgaaacgtttgtggaagccgggcgccagcactataacggtagcctgcgcggacgctgggtgctgactgcgggtctgggggggatgggcggcgcccagccgctggccgcaaccctggcgggagcctgttcgctgaatattgaatgccagcagtcgcgtatcgacttccgtctgcgtaccggctatgtcgatgagcaggcgagcgacctggatgacgccctgacccgcattgcccgctataccgcaaaaggagaagcggtatccatcgcgctgcatggcaacgcggcggaaattttaccggagctggtaagacgcggcgtgcgcccggatatggtgaccgaccagaccagcgcacacgatcccctcaacggttatctgccgctgggcatgagctgggaagactaccgcgctcgcgcgcagtcccacccggtggagacgatccacgcggcgaaagcctcaatggccgaacacgttaaagccatgctcgccttcaggcagcagggcattcccaccttcgattacggcaacaacatccgccagatggcgaaagagatgggggtggaaaacgcttttgacttcccaggctttgttcccgcctatattcgtccgctgttctgccgggggattggcccattccgctgggcggcgctttccggcgatccgcaggatatctaccgcaccgacgcgaaagttaaagcgctaatacccgatgatgaacacctccaccactggctggatatggccagagagcgcatcagcttccaggggctgccggcccggatctgctgggtcggcctgggacagcgcgcccggctgggcctggcgtttaacgaaatggtccgcagcggcgagctgtcggcaccgatcgtgatcggccgcgatcatcttgactccggctccgttgccagccctaaccgcgaaacggaagcgatgcaggacggctccgatgcggtctccgactggccattgctgaacgcgctgctgaataccgccagtggcgcgacctgggtttccctgcaccatggcggcggcgtagggatgggcttctcccagcactccggcgtcgtcattgtctgcgacggcagcgatgcagcggcggaacgtattgcccgggtgctgagcaacgatccggccaccggtgtgatgcgccatgcggatgcgggttatgacatcgcgattgaatgcgccagagagcaaggacttaacctgccaatgattgcggattaa

SEQ ID NO: 177820 - DNA, 1392 bp, Klebsiella oxytoca
atgaataataacaacacaacatacatcgaaacacgttctattgaacccatccctgacggtgaacgccacggtagcatttttagccagttcaccctgtggctgggggctaacctgcaaattaccgccatggtcactggcgcattaactattgtattcggcggggatgttttctggtcgctggccggtcttatgctggggcagattgccggtgggattgtgatggcattgcatgccgcgcaagggccgcagctggggataccacagatgatcagcagccgggtacagttcggcgtctacggcgcctgcctgccgattctgctggtctgcctgatgtaccttggctttatcgccaccggggcggtgctgtccggccaggcgatctcagcggttttccatactacggaaaccagcggcattctgctttttgctgccgccacgctggttatcgcctacgtcggctatcggttgatccacctgttgggtaagctggcaagcctggtggggattatcgcgtttatctacctgctgtggaaaatcagtgcctttccggctattggcgacctgctgagtatccgaccctttagctggagtacgtttttaaccgccaccggccttgcggcttcctggcagatcacctttggcccctatgttgccgattattcccgctatctgccgcgcagcacctctcccgggaaggtctttttcgccgtcgggagcggttcggtgattggcgcgcaaatcgccatgaccgtcggggtgctggctgccgctctctctcagggaaaactggtcggtcatgaggtggactatatcgtcggcctgggcggcaccggcgcgattgccacgctgttatatctgagcatcgcgtttggtaaactgacgatcaataccctgaatgcctacggcagcctgatgtgcctggcgacggtgtacagctgcgggaagcagcgagtgcgcgtaagccagtcggtacgtctgctggtgctggcgatgattattaccctggcgaccgctatcgcgattatcgggcaacactctttcctgtcggcgtttaaatccttcctgttgttcctgttgactttctttacaccgtggagcgcgattaacctggtggattactatttcttcaaccatcaggcgatagacatggaggcgctgaacgatccgaacgggaaatatcgggcgtggaatgtgacggggcttggggtttatctcgttggagtggcggtacagacgccgtttattgatagtggattctattccggcccattcgtgaagatgctgggcggtatcgatatctcctggctcattgggctggcgcttccggcggggctctactatgtcctgcgcaaagcgccgtccgcggcggctgtcgccgccatcagtcgttaa

SEQ ID NO: 177821 - DNA, 1209 bp, Klebsiella oxytoca
atgtataccctttggcaccactgccggatcgccaccatggccgcagggcattatcagttgcttaacgatggcgcgatgctgaccgacggcgcagtgctgttatgggtcgggaaccgggcagaaatgccggacttgcccgttgcgcagcaggtggatttgcagggcagggtggtcacgccgggactggtggattgtcatagccacgcagtgtttggcggcgaccgggcccgggaatttgaaatgcgtctcaacggggcgagctatgcggagatcgcggccggcggcggtgggatcgccagtacagtcaacgccactcgacaggccagcgaaagccagttgctggagagcgcgcggcagcgtatccgggagctgtgccgggacggcgtaacggcgctggagatcaaatccggttacggcctggatctggctaacgaacgtaaaatgctgcgggtgatccgccgtttaggcgacatagtgccgctgaccgtgcgcagtacctgcctggcggcccatgcggtgcccgtcgagtatcaggagcgggcggatgcctggattgactatatttgcgaacgactgctgccggaactgcatcaggaagggctggtggatgcggtggatgcgttctgcgaacacctggcattttcgccctcgcaggtggagcgggtctttcagaaggcccgggaactggggctgccagtgaagctccatgctgaacagctaacgctacagcatggggcggcgttggccgctcgctaccatgcgctgtcggcggatcatctggaatatttgtgcgaagaagatgtcgccgcaatggcacgccatgggacggtggcggtgctgctgccgggcgcctattacttcctgcgtgagaaacagctaccgccgctggatctgctgcgtcagtaccgggtgccgattgccctcgccagcgatttaaatcccggcacctcgccggtgttgtccctgcgtctgatgatgaatatggcctgtacgctattccgcatgacaccggaagaggcgttggctggcgtgacgcttaacggcgcgaaggcgctggggctggatacagtttgcggttctctggaagccggaaaagaggccagcttcgtggcgtgggatatcgctcatccggcggagctaagctactggctgggaggctccctttcgaaacaggtgatttatcaaggtaaggaggtttattgtgattaa

SEQ ID NO: 177822 - DNA, 810 bp, Klebsiella oxytoca
gtgattaaggcgtttgatttgcggcaggggaacctgcccctgctggtcagtatgccccatccgggaacgttattaacccccgaagtcgaccagggactcacgccgagggcgaagcgtctggaagataccgactggcatgttcccttgctctatcagaccatcgcggacatgggggccagcacgttatgcgcccgctattcccgctatgtggtggatatcaatcgcccggcggatgataaaccgctttacagcacggcgacaaccgggctgtttaccgatatcttttttgacggcgaagccctgttcgtgccgggcggtgcgcctgacgcggcggcgaaggacgcgatcctaaaacaggtctggcagccttatcaccaggcgcttgccgctgaactggcacgcctgcgtgagaaatttggctatgcgctgttgtgggatgcgcactcgatcaaatccgtggtgccgcgcttgtttgaagggcgcctgccggatctgaactttggtacggcggacggcgccagctgttcgacgcagctcagccaggcgctgctggcaagctgcagtgcgttcccgcagtatagccggatactcaatggccgctttaaaggcggatatatcacccgtcactatggcgatcccgtcaaccatattcatgcagttcagctagaaatggcccagtgctgctatatggatgaggagagctttgcttatcttccggagaaagggctgcaggcgcaacaactgctggagaggttgattaatactgcgttgcagtggggacgagaggagtacggcaagcccggaatgtga

SEQ ID NO: 177823 - DNA, 213 bp, Klebsiella oxytoca
atgagccggcgtggcaactgctgggataatgcggtggccgaatcgttctacagttcactgaaaaaagaacgtatcaggaagagaatatacaaaacccgggacatggcccgggcggatattttcgcttacattgaagtgttctacaaccgtaaccgacgccacagccacctcggtagcgtcagtccggaggcctttgaacaggcctcgtcgtga

SEQ ID NO: 177824 - DNA, 297 bp, Klebsiella oxytoca
atgcatgacaagcaagagcgaccgaagcgtagacataaggccaaaatctcgttagcagaaagcgagatgctcaggtgttcagatggctttgaattcgtctgcgagaagagtgaaaaactgcgggtcacgttcgcgctggacttctgcgaccgtgggggcatagactgggcagcaatcacgggaggttatgacagttcgacggtgcgggatgtgattctgaaagcgcatcggcgacatgttgccggacacaccagtgcagtggctgacggacaacggttcagcgtataccacgtatga

SEQ ID NO: 177825 - DNA, 1557 bp, Klebsiella oxytoca
atgagaattaaaaagcctcaccttcgtccgatagtcataaccttgtccgttggtggtatttttttgacttctatttttatgatagttgtcattatgttttatcaacacgaaaatatagaaaaagatttgcttgatgctaattcatcgtacgctatgaaaatgtcggatgtaatgagcagttatattgaaatggctcagggcgaactagcatatggcgctaagaaaattgaatcaacgactgatgttgaatatcttaaaaatgaggctgataggctaagactgcagtccggcatgtttaattcagttattgttgttagtaatggcgctgttgttctggcaacttctccagaatcacttgatttagttggtgttcacttgaactcaagtgtcagtaaattggctattgagggcaaaaaggcatttatatcgcaaccttacaaatcagttgctgggaatttgattgttttgttgtcacatcctatttatgataagagtggtaattacatagggtatatcggcgggtctatatatctaaaaaaacagagtttatttagcgatgttttgagtaggcatttttttaatgacgacactgaaattaccatcgttagtgatgatggtaatgtgatctttaataaagataacagtgttgttggtcgaccgatggttatgcctgatgatttgaaatcaaagttagcttcgtctgaaagaggcgatggtacctttttttcttcggggcataagtatcttcttggttatgctcatatgaaaaatactgactggaatgtgtttgtttatagtcatgctgacaacgtgaccactattcttattaattatgctaaaaatgtgcttgtgctgctagttgtaataatagttgtgttttcaattgtttcatatttcattgcatcccaaatctcaattcctttagaaaatcttgctatatctaccaatgctaaagatatagagtcctcgctgacttatattaaaggtatcaatgcttggtatgccgaagctgaccgccttaaaaaggcacttttaacgaatgtaaaggtaatgatgaaaagggttaacactctaaatgaagtggcagtaaaagatcccctaaccggtgtaaataatagattggggttttcgaataaaacaaaggattacacgcaaggctcaggggcttcagttattgctattgatgttgacttttttaaaaaaataaatgatttcttcgggcatggggtcggagatgaggtgcttatttctttggctcatgctattaattcttgctgccgtagtgaagatattgtttgccggtttggtggtgaagaatttgttatttttctgccgaatacttcagtggtaacagcagagcgtattgcggagcgtatcagaagtgttattgaaagttctgtttttactaatgacttgcgtgtcaccatatctgctggtgtagcaacgcaaactgatccccttagtgggatcgactttttgctgaaaaatgctgatgatgctctttatcaagcaaagggagaggggcgtaataaagtggttgtatatagtgctatttga

SEQ ID NO: 177826 - DNA, 483 bp, Klebsiella oxytoca
atgaatactgagaattgggcatcactggagaagagattcagctctgaaatagcaaactggcgtttaggaggtaacgtaatctgtatggctataggtgatctgggtaaatttaaggggaaagatacatactatcttaaaccacttcagatagcattgatgaatgttgatgaaaactggatcccggcagactcgagttatgagctgaccatgctaaattatcttcataaacatgagcggtcatttatcaaacccctgagatacgatgcttctaataatgatgttttcccagatttttgtctgacggatattggggggcatgaactatttcctattgaggtatttggtatggatactgcttcatatttggcgcgtaaggcgatcaaagaaagttactataatgaacgatatggaaaggatggttgggcatcatgggttgcaccggctggccccctaccccatttgcccgataagggctgcagttaa

SEQ ID NO: 177827 - DNA, 936 bp, Klebsiella oxytoca
atgaacaaaagtacaattgcattgatgatggccatgctttcaggtactgcttatgctgaatctacgcagttaacgccaaatttctcaccggaaagtgtaactgtatctacctccgccgggatgttaagcggtaaatctcatgaaatggtttatgatactggtacaggaagaaaggtcagccagctggactggaagatcaagaatgtagccattttaaaaggcgacatttcctgggatgcatattcgtttctgacactgaatgcacgaggctggacatccctggcttccggggctggtcatatggacgactatgactggatgaacgataatcaatcgggatggactgaccactcatcccaccccagcacgaacgtcaactatgccaatgaattcgatctgaacgcaaaaggctgggttttccagaatgaaaactataaagcgggtgtaatggctggttatcaggagactcgattcagctggactgcaaccggtggttcctataactacgataatggtgcatatactggagaattccctgctggtgaacgtggaattggctatagccagcggttttccatgccgtacattggccttgtaggtcagtatcgtattaatgattttgagttcaatgcattgtttaaattcagtgactgggttcgggcgcacgataacgatgagcactacatgcgggatttaactttccgtgagaagacgaccagttcacgttactatggcacttcaattgatgccggatattacgtaactccgaacgccaaagtatttgctgagttcacctacagtaaatatgaggaggctaagggagggactcagattattgatactaacagtggcgagtccgcctccattgggggagatgccgccgggatatcaaataaaaactatacgattacagcgggcctgcaatatcgattctaa

SEQ ID NO: 177828 - DNA, 483 bp, Klebsiella oxytoca
gtgagagctgaaacgaaagaagctatgcggatgtttttggggggacgttgctacacggctaaacaactcgagaaggactatctctctgaggtggcaggttacagcgacgaccgctgggaagcgccgcaaagagctgcccggctggcggcagcggtaaaacgctacaaaacctcagagatgctgcgttttatttttgccaccatcgcgtatgatcccgacccggatctgaccccgcttgccgtgaggcggctgtgtcaggccttgttcggcagaaccggtagccagtggcttatagtggaaattttcggggtgaagggacggcagcaccgcagcgatgacagcactccggaggccgttgaaaaaatggcaaccagatatcgtcacgccgcagggctgcactgggcggcaactctggcggaaattgagcgggtaaagcgcaactatcagacccaggttaaggcatccaggaagggagaagggtaa

SEQ ID NO: 177829 - DNA, 315 bp, Klebsiella oxytoca
atgcgaacgacaagtatcaccctgtgtctggttttggcgagttttggtgtatccgctaaaatccttgcagagccagaccttactaaccaggcaaataaaacgtgtgctaaacgagatgtactggaactgaaagtccctttagaagccaataatccctactctcccacatggggtttagacaagggcatggtgcaggccacaattgacgcactgaaagaaaatccagacatcgccccgactgactctgtagcctgccaacaggctgcaataaaacagtatcgggctgggcaaaaacactacagtaagctcaggtag

SEQ ID NO: 177830 - DNA, 204 bp, Klebsiella oxytoca; identical to SEQ ID NO: 94232

SEQ ID NO: 177831 - DNA, 1401 bp, Klebsiella oxytoca
atgctgaacaaaatcgccaaccgctggaaaacccatcaacagcagcatacggcgcgcccggcctacctgctgattgccgatatcattgccgatggcatcaacagcggagagtttcagccccgcgaccgcctgccgccgctgcgcgatctggcggccctgctggcgattaactacaccacggcgacccgcggttacgccgaagccaggcgacgcgggttgatcgactctcgtccggggctggggagctttatccgcggcaaagtaccctcggtaccgctcaacggcggcagcagctatgagatgaccatgaactcgccgattgagccgggagaggagctggcgcaggcgatcgccgcaggggccattaacctatttacccagaaaaatattctggccctgctgcgctaccaggattttggcggcctcgcggataataaagcgatggcgaaagtgtggctggagaagcaactgccgccggtcagcatcgacgagattctggtcgcgccggggatccacagcgcgctggtggggctgctgacgctgctgtgtcgccacggcggcagcgtgtgcgtcagcgatttgatctatcccggactgaaagccatcgccagccagctaaatattacgctgcaatccctcccctgcgatgaggacggcccgctgccgcgcgcgtttgaacatcagtgccagaccggcaatattcgcgcgctctacgtcaacccgacgatccagaaccccaccaccctgaccctgccgttacgtcggcgcgaggcgctggcggacgtcgcgctgcgctacagcatcccggtgatcgaggatgaggcgtacgccgcgctggcgatgcagcatatcgcctctttcagcgagctgattcccgaactgacctggtatcttaccgggatgtcgaagtgcttcggccccgggctgcgcacggcgtttgtcaaaggaccggggaaacgcaatacgcagctgctggcgggggcgctgcgggcgctgaacgtcatggccagtccgctgacaaatgccctggccgcgcagtggattcaggaggggacggcggaccgggtattgcagtcggtacgcgccgaatcggcgatccgccagaaaatagccgccgacattctcaaggagttcagctatcgggcaaccccggagggcttccacctctggctgctgctcccgcggcattttaactggaaccctgcggaaatggcggtgcagctgcgcgatctcggggtcagcgccgtctccagcgccgccttctgtaccgataacaacccgccggacgccattcggatttgcctcggcggcgcctggtcgcgggaagtctgtactgaaaatttacataccttggcccacgtgatgcgcaacccgctgaactttggcagcgtgattttgtag

SEQ ID NO: 177832 - DNA, 483 bp, Klebsiella oxytoca
atgccaaaagtcacattaccagcccaccagaccggtgatttcctggtcgattatgaagagaaagtctttgaggacgtaaaagccgagccggggcagaaggcgctggtgacgttccacaccgtcgctttcgaaggttcgatcggcttcgtcaatatgctgcaggccacccgtctgcagcgcaaaggtttcgccacctccatcctgctgtacggcccgggggtgatgctcggcgtgcagcgcgggttccccaccctcggcgccgaagctttccctggccatcagaactacgccaatcagctgacgaagtttatgtccgaaggcgggaaagtctacgcctgccgctttgccctgcaggcgttgtacggccacggcgaaccctccctgctggaaggcattcgccccatcaacccgctggatgtactcgatctcaaactgctccacgtgcgggataacgcggtcatcatcgacacctggacgatgtaa

SEQ ID NO: 177833 - DNA, 1002 bp, Klebsiella oxytoca
atggctgaatcacgcattattcgtgcggcggcagcccagattgcaccggaccttcatgaggccagcaggacgctggcccgggttctggaggcaatagacgaggctgcggagcagggggcggagatcatcgtttttccggagacgtttgttccctactacccctacttctcgtttattaccccggcgatcagcgcgggagccgcccatctcaagctgtatgaacaggccgtcgtggtgccggggccgatcacctgtgccgtcggcgagcgcgcgcgtctgcgcggcatcgtggtcgtcctgggggtaaacgaacgcgatcgcggcacgctctacaatacccagctggttttcgatgccagcggcgaactggtgctcaagcggcgcaagatcacgccgacctaccatgaacgcatgatctgggggcagggcgacggcgccgggctgaaggtggtggataccgttgtcgggcgggtgggcgccctggcgtgctgggaacactacaacccgctggcgcgctatagcctgatgacgcagcacgaagagatccactgcagccagtttcccggctcgctggtcggccccattttcgccgagcagatggaggtcacgattcgccaccatgctctggagtccggctgctttgtcatcaatgccaccggctggctgagcgaagagcagatcgctgaactgaccccggatcccgccctgcagaaggggctgcggggcggttgtcacaccgccatcatctcgccggagggccgtcatctggcgccgccgctgacccagggcgaaggaatactgattgccgatttggatatggcgctgattaccaaacgcaaacggatgatggattcggtcggccactacgcccgcccggaattactgagcctgcggctggataacacgccggcccgctatgtcgtgacgcgtgaaacagaacccgaaaccggaggaggtcgcgatgcagaacataccgtccacgcgccagcagctgattactga

SEQ ID NO: 177834 - DNA, 1110 bp, Klebsiella oxytoca
atgcagaacataccgtccacgcgccagcagctgattactgagctgctgactcagggggttaacgtcattaacccgcagcaggagcacgtcagccgccacggcggcgccgggccatcggatcatcaggcgatgaacattgacggcgtgacggtgatggtgccgatatacacccacgccgcccatcgctcgccgtggcaggtgaagcacgaggcgtccggcgccgcccggctgtttaacaacgccatcccggtgcgggagattagcttcgccagcaaacccaggttttacgatcggcaaacggcggacgggatcccctattcgcacattgccaccctgcacggcaccgacgtgctggcgaccaccatcctacagacctgcattcgctatgagaaccgggcgaaggcctgccagttctgcgccatcggccagtcgctggccgccgggcgcaccattgcccggaaaacgccggagcagctggccgaagtggcgagggcggcggtggagctggacggggtaaaacacatggtgatgaccaccggcacgccgtcgggcagcgaccgcggcgcgcgcattctggtggaaagcgccctcgccattaaagccgcggtggacctgccgctgcaggggcagtgcgagccgccgggagacgcgaaatggtttacgcggatgaaagaggccggtatcgatgcgctggggatgcacctagaggcggtgacgccggaggtccgcgcgcgcatcatgccgggcaaagcgcaggtcagcgtcgagcagtaccttgaggccttcgccgacgcggtagcggtcttcgggcgcgggcaggtcagcacctatattcttgccggcctgggggacacgccggaggccattctgtcgctatcgcaaacgctgattggtctgggcgtctatccgttcgtcgtgccctttgtgccgatcagcggtacgccgctggagcaccatccggcgccggacagccggtttatgtcctcgattttacaacctctgggccagatgctgaaccaggcgcatttgcgctccagcgatatcaaagccggctgcggccgctgcggcgcctgctcgtcgctctccagctttgaacaggccacggcctaa

SEQ ID NO: 177835 - DNA, 564 bp, Klebsiella oxytoca
atgaatgaatatgccggatataccattaaatgggtcacgctgccgtgggagcgcgagcaggcctatacgctgcgtcggcaggttttttgccgcgagcaggggctgttcgccgatgacgatcgcgatgagatcgatgaccacgcccacctgctggtggcgctgggctgcgtggccggctggcacgaccgggtggtcggcacggtgcgcatccatcagcagtcgccgggagtctggctggggtcgcggctggcggtggacgccgcctatcgccgccaggggcagctggggccgacgctgatccgcctcgcggtatgcagcgcgcacgccctgggctgcgaggcgttttatgcccaggtccagcatcagaacgaaccgctatttcgccgcatgcgctggcaaatcctggagtggcttgagctgcgcggcgtcaggcatgcccggatgcaggccgatttagcgttttacccgccctgcgacgatccccggagcgggatggtgatcccgacctcgcgccgtccgcgaaccgctgacgccgcggcttttctgacgggggggcgcgtatga

SEQ ID NO: 177836 - DNA, 963 bp, Klebsiella oxytoca
atgaatccgagcctgccggcgctgatcgcgcggttacacgcctttagcggcatcgcgcataagcgcgacatccagcaggtggcgcgcgagctgcgcgacgcctggcccaatccgtgtcccaacggcgatgactgcgcgctgatcccggacggcagcggctacaagctgctggcgatagagggatttatcaaccgctttgtggcagaagacccgtggtttgccggctggtgcggggtgatggtcaacctgagcgatatcgccgcgatgggcgggcgtccgctggcggtggtcaacgcgctgtgggacgaggcgcagccgcacgcggcgcagatcttacaggggatggccgcggcctcgcgcgcctatcaggtgccgatcgtcggcggacataccaacctgcgcagcgatcggtcgcagctggccgtagcggtgctcggcgaaacggccagtccgctcagcagcagcgcggcgcaggccgggcagacgctgatggtcgccatcaatctgcaggggaggtggcacccgccgggaaataactgggacgcggcgacccgcgcggatcccgccgaactgcgccgggctctcgcgctgctgccggagctggccgccgaggggagcctctgcgctgcgaaggatatcagccaggcggggctggccgggacgctgacgatgatgttggagagctgcggcctcggcgccgaggtgacgcttgagcagatcccgatcccggcggatatcgacctggagcagtggctgtgcgcctttcccagcttcggctttctgctggcggtggacgaggcgcgctgccacgaggtggcgcagcgcttcgccgcctgcggtatcgcctgcgccgcggcggggcattttacccgcgagcaaaagctgatcctgcgctaccgggagcagcgcgcgtgttactgggatctgacgcagcagccgtttaccggcatgactcaccaatag

SEQ ID NO: 177837 - DNA, 291 bp, Klebsiella oxytoca
atgcctgcaatgcattttgtggtgtgctggcctgacggcagcaaagaaacctgttattcgccatcaacggcgattgagaaatacctgttggtcaaccatccctacgcgctgaacgagtttgtgcaggtgaccacgcgcgcgctggatgaggccagcgaaagggtcaacgcgaagtttggctattactgctccagcgcgcaggatcaatcggcggcgatcgtgcaaaaggcggcgcagttcagcccggagcagagagtcacggtagaaaaaatcacccccattacagcctga

SEQ ID NO: 177838 - DNA, 1266 bp, Klebsiella oxytoca
atgaatacgaactcctatcctgtcgtcattattggcggcggtcaggccggtcttgccatgagctggagcctgacgcaaaaaaacatccgtcatattgtgctggaacgccatcgtctggcctgggcctggcgggagcagcgctgggataacttctgcctggtgacaccaaactggcaatgcaagcttcccggcttcccttatgacggcgacgatccccacggctttatgctgcgggacgacattgtggcctacgtcgaacgctacgcccggagcttcaacgccccgctgcgcgaaggggtcaacgtccagcgggtagtgaagcgcgacggcgggtttacgctgtttacttccctcggcgagctgcaggccgaccaggtggtggtcgccgtggggaactaccatcgcccgcgctttccggagcttgccgcccggcttcccgagcgcatcgtgcagatccattccgcgcactacaaatccgcgcagcagctgccggaaggggaggtgctggtggtgggctcggcgcagtccggcgcgcaaatcgccgaagatttacacctcgcgggacgccaggtgcatttatgcgtcggcagcgcgccgcgggtggcgcgtttttatcgtggccgcgacgtggtggactggcttgaagatatgggccactaccgcctgacggtggaggatcatccgcagggcgaggaggcccggcgcaaaaccaatcactatgtgaccgggcgcgacggcgggcgcgatattgatttacgcgcgtttgcgcttcagggaatgcgtctgcacgggcgtttgctggcgtatgccgatggcaaactgcacaccgctgacgacctgcgggccaaccttgatggcgctgatgccaccgcgcaaaaaattaaagacagcatcgatgcgtggattgcccggcagggcattgatgcccctgtcgaagcccgctaccaggcgccgtggcaacccgatgggcctactgagccgatcgatctggcggcgatctcggccattatctgggcggtcggcttccacaccgacttcagctggatcgaggtcccggcgttcgatgagaaaggctatccgcgccatcagcgcggtgtctcggttgaggcgggcctctatttccttgggttgccctggctctggacctgggggtcggggcgtttcgaaggcgtaggcgatgacgctttgtggcaggcggagatcatcgcgcgccgcgccgggcatatcgccgcgcaggaggccgtcgatgcgaacagtgcagagtga

SEQ ID NO: 177839 - DNA, 1671 bp, Klebsiella oxytoca
atgcgaacagtgcagagtgagcacgatccctttctgcgcgacttctggcgggaagagtccgcgcggctttactgggaaacggattttaccgaggtggtggaaagccttgacggcagcccgcgctgccgctggtttacgggcgggcgcaccaatctcagcttcaacgccctggaccgccatttagcagagaagggggagaagtgcgccattattcatcgcgactatctcgggcaaacgcaccggcttagctatcgcgagctttggcagcaggtgaataccctcagcagcatgatgcaaagctggggcgtgaagccgggggaccgggtactcatcgccctgccgatgacgccgctggtggccatcgctatgctggcgtgcgcgcgcattggcgcggtgcatgtcgtgctctattccgccgtcacccatgaggctctgatgcagcgcatcgccgtcagccagccggtgctgctgttgcatagccgcgagcagcgaggccgtaaggaactgcccgttatcgccgggcggatggccggactgcgggtggtagatacgcacagccgggcgtttggagagctgttggcacgacatcgtggcagcgtcgtgccctgtacctggcttgcggcctccgcgccttcgcatctgctgtttacgtcggggactacaggaacgccgaaagggatcgtccgcgacacgggcggttacgccgtggcgctgctggccagccttgcacatctctttcggctgcgggacgacgagattttctttactaccgccgacgccggctgggtgaccgggcacagctacgggatctatgggccgctgctggcggggctgacgacggtgctctgcgaggttaactcgccgggagaatactggtggcagatggtagaaacccttggcatcacccggatgctgaccattgccggggcgatccgcatggcccggcggcagggtaagccgcgcgccgatctgacctcgctgcgcacgctctatctcgccggcgagccgctggataacgccaccgatgagtgggtggccgcacagctgagggtgccctgcgagaaccattactggcagaccgaatccggctggccgctgcttgccggctccggtagagcgctctcgccggtattcacgcgcgcggctgaggtggttcatcccgccagcgggaaaacctgcgcgccgggagagacgggcatgctggtgattaacagtacgcttggcccgggcgggatgtcgacgttgtggcagaatgatatccagcacgaccagtactactggtcgtatcggcagcgacagtggcgctatgctacccacgattgcgcgataagggttggtgagcggattattattcaggggcggatggatgacgtgatgaatatcggcggcaagcgcatcgccaccgcagagatagaaaatgccctgatggggcttgagggggttgtcgaggtggttgccgccgggacggcgcactacctgctgggggaaatggtggcgctgtttgtggtcaccgatatcgccgaccctgcgcagcaggccgcgctcaaaaaaaacatttgcgcccggctggtggctagatgcggtcgcttcgccgtgccgcggcgcatccacatcacctcggcactgcctaaaaccttctccgggaaggtgatgcgccgcatactggcttag

SEQ ID NO: 177840 - DNA, 285 bp, Klebsiella oxytoca
atgggcacaccacgatttacacctgaatttaaggaagaagccgtccgtcaaataacggaatgcggttattccgtcgccgaagtatctgaccgtctgggtgtttctgcacacagcctctacaagtggctacgggctatcaaacctgataacagcgagcagtatgcccggggtatactggaagctaaaagcgagaccctgaaacttcgggcgcagctaaaacgaaccgaagaaaaatgggatatcctgaaaaaggccgcgcggtactttgcaagggagcccggctga

SEQ ID NO: 177841 - DNA, 255 bp, Klebsiella oxytoca
gtggtatcaatgttcagctcaatgcttccagaacagtcgcgcgtgatacatggtccatttggttttggcatggatactgagattgaatttattaagaagcgaaacagtgctgacgaaggttatctcgttatttttcttaatcagcaagactcttactcatggttaaaacttatcgcgggtgattcacctgaaaaagcaattgcgtacaattttgacttcatccctgatctggagagtgaacatgaaactaaatga

SEQ ID NO: 177842 - DNA, 243 bp, Klebsiella oxytoca; identical to SEQ ID NO: 94246

SEQ ID NO: 177843 - DNA, 465 bp, Klebsiella oxytoca
atgagaaccagtaaattgaatatgattttaaaagaagaaattgttttgggtatctacagctggcttcatatgactccggtcagcatgctggtaagaaacataaccagcgatcagggaggggattacgcgatcgtccgctttaccgtcgatagccggggggtccagatggggcctaaggcacagggccagcttctttgttcattcgggtttaatgtaaaggaatcctgtgaggccgacccaaaagacggtccaggcctcataaaggccgaaatgatgaacggtgttatgcagctggtaccggaatgcattgagctcacagacagtcaaacccaggcaatcaggaaagaagtaactgtgtttaacagggtttgtgctatgcaactcctgggggggcatgggaatgcaaggtctctgtgggagaaagaaattcttccccggatgaaagtgcgcagacaactacattga

SEQ ID NO: 177844 - DNA, 408 bp, Klebsiella oxytoca
atgagcaaagtgcattgtattagtggtattacctggaaaaactccgatagcgcgtctttcaaagtatatgcctgcattgctgctgtattcagccttggcctggtcacagctaccgtcaggaactatgaaattctacaactgactgttccgtatacctggtatgttttcttcactgcattctggcttctgttcccgtcctttacggtctctttccgggagcgggaagggcgtctgtttacctcgatgggtttttacgggttaaaactggtcactctcgaccgccctgtctccgatgggtactggctggtcacgatggagaaaaaccgttatcgcctcgtcagagtatgccgggacgggcgacgccagcctgtatggctgacgtttaagtctttaccagagtttgtttaa

SEQ ID NO: 177845 - DNA, 960 bp, Klebsiella oxytoca
atgaatactgactttgcccattacaacgaagagcaactacgcaaactcggtgagctgcacagtttactccgtcacagcgatatcggctcatcttaccttgcctcgctcccggagccccgtagtgttgaggagttgaatccgccacatgaaatcaatgtgactcattcggtacccgacgtcgacaccctggtggatatttaccggcagcagcgggttgataaagtccatgtcagggatgagcattattcaaccaaaatcacccgaaaataccccgggttcgttgtggtcagaaacaatcatgatcaggtgatgtcgctggtgggtgaaatcaaccggcttcgtgacaaatttgctgatgctgtaaaagctatcactcattaccaggactcccggtcagaaattctgcaccaggtttacccgtggctggtgactttacaggtgtcccgtaatatccggatcgttactgagcaaattcgctccctggggttcacctggcaaatccctgtcattcataaatttacccggctggaaacggttatcgaccgcttacgcagggagataactgagctccagccggatatcagtctgacaaaacaggatgttgaacggctgaaacaggaacgaaccgaagaaatcatgatgctgtcgttgctcaatgatgaagtgagtcatgacgatgaaaatttgagaaaatttcggcttatccgggaaagtaactttccggctgttaacgtcaatatccggtacaccagtcctgaagatccagatgatgttcatgggccgtacaaactcaactttcgcgcgcctttaccattaattttgttcagcgaaccgggccggtttaatccgttaaaaaattacgtaaaaggtgaaaggcagaagcgcggcgattttaatgaaaaatatcgttctgtcctgccccgtatagggctggtggaagtcatcagggagtcaaaatga

SEQ ID NO: 177846 - DNA, 759 bp, Klebsiella oxytoca
atgagccggattttaaccgggatttgtgaagctgatccggccaggaggttatacaaagtggccgtcagtaggggaaacacttttctgtctgcaaaagaacgtttccgtgtacaggtctgtttcaaaaatgccataacacatccagatgaagatcggctgctggccgagctgttgactgttcatcacttcctggctgacacctctattttatggcatatggagcaaaaaacttatgcatgcaccacgacatgggccaccacgtccacatggctgccagagatatatcagcgtcaggccagcacgcccaatgtggtaaagattatcaaatttatgcacgcccggtttccaggccttaaaacggttgcagaaacaaatgagcagggttacgaacaggcgcttaccagtgtggattttgaaattccttactggccggtgctgccgaaattcgaatctgatataggaacgatacaggtaacgattgccgggatgatccgttacacagaaacgatgagcaataaagattgtaaaacccctctcgacttaatgataaaaagttttaagtcagggttgatcccgatagagaaaatgccgttgagtaagactgaaaggcttatgcctctgaatatcaacaccgctggtaagatatttacacacgcgacatggccgagatgtcgttacattttcgtaccggatgaggcgggagtaatgaaactggttaacgtggtcaaattaagattaaagcctctggaggaaaaatga

SEQ ID NO: 177847 - DNA, 324 bp, Klebsiella oxytoca; identical to SEQ ID NO: 94241

SEQ ID NO: 177848 - DNA, 318 bp, Klebsiella oxytoca; identical to SEQ ID NO: 23442

SEQ ID NO: 177849 - DNA, 1137 bp, Klebsiella oxytoca
atgacagataaaaccaaactggttgctatctcacgaaccgatgacatgagcgctctggatgcactcaagctcttgcggtttcgccggtacaatacggccagaagtcagttaagggtcacgagtgtctggtctgcatggtgcgccaggcacggtctgacccccttcccggtcacagcggttgatgtcgagcgctatattaatgggctgaatggatccgttaaaatggcgactatctctcattttattgcatgcctttcaagcgttaacagcagcctgggttttccagacttccgcaacgttctgataaaagcactggttcaggtatggcgggcgcgggagaatgagaaaaaaatcgtcaccggtcaggcccttccatttcttatatccgatctcaatattcttcgccggtcgctgcataaaagcgatgacctgagagacatacgggaccttgcaatgatatgggttgggtttgaaaccctgctgcgtaacgtggaaattcgaaggattaaaaccggcgacctgaaatggcaaaatgacacgtcctgttaccttctggacgtcatgcggaccaagacaagcctttcaagtaacctgacatttcagctctcaccacaatgcagtcagcatgtcagacggttgattgagacggtggaatacaccgataccgaaaccttcgggcaccgttttctttttcagcctgtaaacatccatacaaaccgatatttcccgtccaccagcagtaagctatcacggggaaaatccatagacaggatgctggtcaaagcaggattcagtgaggggttactgacgcagctacagaatgaatcaaaggtatcacgggaagatgttggtatgctgtcctctaattcactgaaccaggcatttgcacgcctctgggggattgccgggaaggtcggcgacagtaaccgacagtccgggcggtaccggacatggacaggacacagtgtgcgtgtggggggagccatagagctgtttaaggccgggtactccctggaaaagattaccgagatggggaactggtctgatccaaagatggtcttccgttatatccgtggatatcttgccagtgaaaaagccatggtaagctttatgcgtaatcatctggacgacttatag

SEQ ID NO: 177850 - DNA, 255 bp, Klebsiella oxytoca
ttgttgaaaagcccaaatgcgcacagtagcctgagagaaacctatctcctgaagttcagaaagtgcagtacgactgaaacccttgaccgagtgtttgagcgtatcctggataaattaaatgatgaaggtggggatataaataagataaccagcctgaacggagcttatgatcaccgcagggctgagatctacatgaaaaaaaactatgacaaaatacctgcttccgtgtggcatctcatccccgatgagatatga

SEQ ID NO: 177851 - DNA, 1062 bp, Klebsiella oxytoca
atgcgacgtaatgcacaaaaatggatcccgtttggatttgatacggattcaaataaaattgttgatatcgccagcgttgaaaatgggctttcgtgtaactgtatctgcctcatctgtgggacctccctgattgccaggcagggtcaaaataaaaaatggcattttagccacagcacagaagtaaaaggggtttgtagtgagctcacactacaacatataaaaaaatacataaaggtgaaaatacaggaaaaaaaataccttgctctccctcatcttctgcagggtaaggagaaagggatagttaacctcaaaaatctcgctggtggtgggattgtttgtggccttaatgctgacctcacagggatatgtaacgatacgacaatcgggatatttattaatgatacgtcggaggatatccagcccaatccagacctgttagcgcaaacagaccagctggcgctggtggagatcgatgccgttcggattgaaagtatcatcgctccatatcgtgagaatggggaaggcataaagatgatggatgcgatagaaaagttacttttcacctcagatgaagccaagcggtggatctaccatcccttaatgcagacagcaccaccacatactttacatcagtacaaacgccacctgaatgccagcggcaaccagctgctttctatgattccggtagatctacccatgaatatgaattcgttgcctctggcacctgcacagcaatggcaacatttacgatggacaatagaaatactcgctaaacttacccggccggatataccttcagggagtaccgtttttgatgaactggtatcctatgcaccgaggatgctggattcctgggaatctataaacgtacccgcgtatgaacgttggtacgattattacatcagtaaaaggggagagggaggactgaatgaggcggagcaggaatacattagcttcatagttaaaatcgcgaactggaacgtgtctatacataacttaccagagtttgatcgcgagagagctttccatgattggtttctcactcatgatcccaataagtga

SEQ ID NO: 177852 - DNA, 900 bp, Klebsiella oxytoca
atgtctaacaaaatcaatgagtcatacctaaatgtagaagaaataaatcagactactggtgaagttatcacactttcttccacatcggagaccagtgtacagacagttcctctgatgcgtttgggggtctttgttccaacattaaagtcgacgaacaaagcgatcgctaagaaaagcaatgtcggatcaaacatcaacgcgtcagacgatcttaggcatctggagctagccaaatccgaagggtttgaaaggattaccatttcaggtccaaggctagacatggatacggatttcaaggtttggacaggaatcatatcggtactgaccgataatgaactcgagtctaacgaggatgggactatctcgatccgatttactgagtttgctatgcgatgtggtttttctcgtggacgtctgaaggctgaatttcgggaaaaaatcaaagattcgctcaggaaactgatgtctaatgttgttgaattctccaaggacagaggcacaaacattgaagtcactaaatttgttcagctcattggtgagtcaaccgtggacattggtaatgacaaagttatcctcactccgtcgaaaacgcttaaggatctgtatgttggtgaatacaagatcctgcttaagctgagagcccttaaagcccttgcaaggaaagagtcagcccaggccctttatacgttcattgaggctctgccacctaatccgatccctgtcagcattgagaggttcaggaagcgtttgtccctcacttccagacctgctcttcagaattcaacggtaagaaaagcacttaagcaactggaggatattggataccttgaataccaggagcttaaggaaggcaacaagatagcgtttcaaatcatcaagagaaatccctccctgaagtag

SEQ ID NO: 177853 - DNA, 558 bp, Klebsiella oxytoca; identical to SEQ ID NO: 86000

SEQ ID NO: 177854 - DNA, 372 bp, Klebsiella oxytoca; identical to SEQ ID NO: 85999

SEQ ID NO: 177855 - DNA, 501 bp, Klebsiella oxytoca; identical to SEQ ID NO: 85998

SEQ ID NO: 177856 - DNA, 327 bp, Klebsiella oxytoca; identical to SEQ ID NO: 91887

SEQ ID NO: 177857 - DNA, 357 bp, Klebsiella oxytoca; identical to SEQ ID NO: 16840

SEQ ID NO: 177858 - DNA, 402 bp, Klebsiella oxytoca; identical to SEQ ID NO: 16839

SEQ ID NO: 177859 - DNA, 2967 bp, Klebsiella oxytoca
atgccccgccgttcgatcctctccgccgccgagcgcgaaagcctgctggcgttgccggacaccaaggatgagttgatccgtcactacacgttcagcgaaagcgacctctccatcatccggcagcggcgcggcccggccaatcggctgggcttcgcggtgcagctctgctacctgcgctttcccggcgtcatccttggcgctgatgagccaccgttcccgccattgctgagactggtcgccaaccagctcaaggtcggcatcgaaagctgggacgagtacgggcagcgtgagcagacccgacgcgagcacctggtcgagctgcaaacggtgttcggcttccagccgttcacgattggccactaccggcaggctgtccagttgctgaccgagctggccatgcaaaccgacaagggcatcgtgctggccagagccttgatcgagcacctgcggcggcagtcggtcattgtgcccgccctcaacgccgtcgagcgggcgagcgccgaagcgattacccgcgccaaccggcgtctctacgacgccttggctgagccgctgacggacgtgcatcgccgtcgcctcgacgatctgctcaagcgccgcgacaacggcaagacgacgtggctggcctggctgcggcaatccccggtcaaaccgaactcgcggcacatgctggaacacatcgaacgcctcaaggcgtggcaggcgctcgacctgccctccggcatcgagcggctggttcaccagaaccggctgctcaagatcgcccgcgagggcggccagatgacgcccgccgacctggcgaagttcgagccgcagcggcgttacgcgaccctggtggcgctcgccatcgagggcatggccaccgtcaccgacgaaatcatcgacctgcatgaccgcatcctgggcaagctgttcaatgccgccaagaacaagcatcagcagcagttccaggcatccggcaaggcgatcaatgccaaggtgcggctgttcgggcgcatcggccaggcgctgatcgaggccaagcaagcgggccgcgatccgttcgccgccatcgaggccgtcatgtcctgggatgctttcgccgagagcgtcaccgaagcgcagcggctcgcgcaacccgaggacttcgatttcctgcaccgcatcggcgagagctacgccacgctgcgccgctacgcgccggaatttctcgacgtgctcaagttgcgggccgcgcccgccgccaaggacgtactcgacgccatcgaggtgctgcgcagcattaacagcgacaacgcccgcaaggtgcccaccgacgcgccgaccgagttcatcaagccgcgctggcagaagctggtgatgaccgacaccggcatcgaccggcgctactacgaactgtgcgcgctgtcggagctgaagaacgcgctgcgctccggcgacatctgggtgcaaggctcgcgccagttcaaggacttcgaggactacctggtgccgcccgcgaaattcgccagcctcaagcaggccagcgaattgccgctggccgtggccaccgattgcgaccagtacctgcatgaccggctgacgctgctggaaacgcagctcgccaccgtcaaccgcatggcgctggccaacgagctgccggacgccatcatcacggagtcgggcctgaagatcacgccgctcgatgcggcggtgcccgataccgcacaggccctgatcgaccagacggcgatgatcctaccgcacgtcaagatcaccgaattgctgctggaggtagacgaatggacgggcttcacccggcacttcgcccacctgaagtcaggcgacctggccaaggacaaaaacctgttgctgaccacgatcctcgccgacgcgatcaacctgggcctgaccaagatggcggaatcgtgccccggcacgacctacgccaagctggcctggctgcaagcctggcacatccgcgacgaaacctacggggcggcactggccgagctggtcaacgcgcagttccgacatcccttcgccgggcattggggcgacggcaccacgtcatcgtcggacggccagaacttccgcaccggcagcaaggccgagagcaccggccacatcaatccgaaatacggcagcagcccagggcggacgttctacacccatatctccgaccagtacgcgccgttccacaccaaggtcgtgaacgtcggcgtgcgcgactcgacctacgtgctcgacggcctgctgtatcacgaatccgacctgcggatcgaggagcactacaccgacacggcagggttcacggaccacgtcttcgcgttgatgcacctgctgggcttccgcttcgccccgcgcattcgtgacctgggcgacaccaagctctacatcccgaagggcgatgccacctacgaggcgttgaaaccgatgatcggcggcacgctcaacatcaagcacgtccgcgcccattgggatgaaatcctgcggatggccacctcgatcaagcagggcacggcgacggcctcgctgatgctcaggaagcttggcagctacccgcgccagaacggcctggccgtcgccctgcgtgagctgggacgcatcgagcgcacactgttcatcctggactggctgcaaagcgtcgagctgcgccgccgcgtgcatgccgggctgaacaaaggcgaggcgcgcaacgcgctggcccgcgccgtgttcttcaaccgcctgggggaaatccgcgaccgcagcttcgagcagcagcgctaccgggccagcggcctcaacctggtgacggcggccatcgtgctatggaacacggtctatctggagcgggccgcgaacgccttgcgtggccacggtcaagccgtcgatgacggcctgttgcagtacctgtcgccgctcggctgggagcacatcaacctgaccggcgattacctctggcgcagcagcgccaagatcggcgcgggcaagttcaggccgctacggccgctgcaaccggcttag

SEQ ID NO: 177860 - DNA, 1008 bp, Klebsiella oxytoca
atgctaatcccacaaccctatttactttttcttggcgatgttaccgatcccctcgcggcaaaaacggcgcgcggtattcatatctggcgaccggaacagtgcgttggcgaaattaaactgccgggctgtacggtcagcctggggctggatgaacttgatatcgccagcgccaaagcgcgcggcgcgaaaacgctggtgctgggcaccgccaacgcagggggatatctgcccgaacactggctggatacggtgaaaagtgccatcaaagccggcatgaacgtggccagcggattacatcatcgtctggtagatgggcccgagctggtcacgctggcagagacgtttggtgttgcgcttttcgatttacgtcatatgcgtccgaagctgagtgttggcagcggtaagaagcgttcaggcaagcggatactcacggtggggaccgactgctcagtgggcaagatgtacacctcactggcgctggaagcggcaatgcgtgcgcgcggaatgaaagcggattttcgtgccacgggacagaccgggattctggttgcaggggaaggcattgctgtggatgcggtaatcgcggactttattgccggtgcggcagaagccctgtctcctgccaacgatgatgatcactgggatatcgtggaagggcagggatcgttgttccatccctcttacgcgggcgtcagtatggggcttatgcacggtgcgcaaccgcactggttggtgatgtgccatgaaatgggccgtccgcatatgcgccatttgccgcatcaaccgatggttagcctgaaagactgcgtggaagccaatctgcgcgccgcccgggtgaccagtgagtccgttcaactggctggctttgcgattaacacctcaaactacacggaagaagacgcgcgcgcctattgtgctgaaatctgtgccgaattcggtttaccggcaaccgatccggtgcgttttggtatcgatgacatcgccgcgctgcttcaggagcggggctga

SEQ ID NO: 177861 - DNA, 966 bp, Klebsiella oxytoca; identical to SEQ ID NO: 150543

SEQ ID NO: 177862 - DNA, 1866 bp, Klebsiella oxytoca
atgacggacacacgactcacttcttctgccacacgtgctgacggtgcatcaccggtgcttgctgttcagaaccttagcgtctcatttcgtggacgcagtggtgagaatcaggcgctgaaaggcatcagtttcgccatttatccaggcgaaattgtcgccgtggtgggcgagagcggctcaggtaaatcagtcacgtcgctggccgtgatgggcttgctggcgagcagcggccgtatcgatcgcggcagcatgcagtttcgcgatcgccgcggagaagttcatgcgttagaaacgctggatgacagtcagcgccgcacgttgcgtggccgtgaaatggcgatgatctttcaggagccgatgacctcactgaatccggtgctgcgtatcgatgatcaactcaccgaagcgttacgcgaccatcatcagtgcgacaagaaacaggctcatgcgcgcgtacgtgaactgctgcgacaggtacgtattgccgatgtcgatcgcgtcatgaaaagctatccgcacgcgctgtccggcggaatgcgccagcgcgtgatgattgctcaggcgctggcctgtgatccgcaactcctgattgccgacgaacccacgacggcgctggacgtcaccgtacaggcgcgcattttacatatcctgcgtgagttgcaacgcgagaagaacatggcggtgttgtttatcacccatgatatgggcgttgtggcggaaattgcggatcgtgttgtggtcatgctgcgtggcgaagtggtcgagcagggcaccgtgtcagagatttttgccgccccgcagcatgcatataccaaagcgttgctggcagccgtgccaaaactgggcgacatgcgcgaatacgcgtggccgcaacgctttcctctgttgggtgcacaacaggtggcgcaacacgaacagctgacggcgcgctacgacagcgaaccgctactcgatgtacgtgggttaaaagtgtattaccccatccgcagcggcatcttctcgacccatacgcatcatgtgcatgcggttgagcagattgatttcagtctgtggccgggtgaaaccctggccatcgtgggtgaaagcggctgcggtaaatcgaccaccgggcgtgcgctgatgcgcctgatcgccagtgaggcggaaagcatccactttgaaggaaaggaaatctctcatctgaaagagacggcattccagccgctgcgccgtgaaattcagatggtgtttcaggacccctatgcgtcactgaatccacgtctgacggtggggtttaccattgccgagccgttgctgttgcatggcatggtggactcactggaacaggcttctccacacattgatgcgctgctgacaagcgtcgggctgttgccggagcacgcgcgccgttatccgcacgaattttcgggcggtcagcgccagcgtattgccattgcccgcgcgatggccctgaaaccgaaagtgattattgctgatgaagccgtatcggcccttgacgtttcaattcaggcgcaggtggtgaatctgatgatggatctccagcagcaaacgggcgtagcctggatattcatctctcatgatatggcggtcgtcgagcgcattgccaaccgcgtggcggtgatgtacctcggccagattgtcgagctcggaccgcgccagtcggtctttaatcaaccgcaacatccttatacccaacgtctgctggcctccgtgccggtggcagatcccgagaaccgtcagcctcgccgttttgatgacagcgaaatcccttcgccgttgcgaaaggtgggcgaaacggtcacgaaaccccgttatcggcaggttgcaccgcaacactgggtcgctgacggcattgcattgcgataa

SEQ ID NO: 177863 - DNA, 1542 bp, Klebsiella oxytoca
atgaaaacgctgttccgccgtacttcactcgccctcgccttaacgacgacactggtcatgaccgcgcaggcacaggatctgcgcatttcaatgtatgccgatattacggggctcgatccgcacgatacctcggataatgtcagctactcggtgcaaagcggtatctttgagcgcctgtttcagtttgatccccagatgaagctggagccctggctggcgaccggttacacctccaacgacagtgcgacggaatttacgctgacgctgcgtaaaggcgttaccttccaggacggtacgccttttgatgcggaagcggtcaaagcgaaccttgatcgtctggctgaccagaaaaaagggctgaagcgcaacagcctgtacaaaatgatcgataaggtgacggtgctggcacccgatcaggtgaaaatctcactcaatcagtcatttggtgcttttattaacacgctggcgcacccttcggcggtgatgtggagcccgtcggttctgaaacagtatccggacgaggcccagttgcggctgcatccggtggggaccggaccatttaaattcgtaaactggacaccgggcaaagcggtcacgctggcgaagtatgacggttactggcggcagggctggcccaaagtcgatcaggtgatcttctcacccagtccggaagatgcgacacgggttgccgcgttgaaatcgggtcaggtggatgccatttggcctttgccttcggatctgatcgcggcggtgaagcaggacagcaacctcgcgattcagcgcgatccgagcatctatctctattacatggcgatcaatacgcagcataagccactggccgatgtccgcgtgcgccaggcaatcaactatgcgattgaccgtaatctgtggttgaaggtggcctttgccggtttgggtaaaccggccacctccgcgatgccggaaggggtgcagttctatgagaagcagagcgatcccgattaccactatgcgccggataaggccaaagcgttgctgaaagcggcgggctacccgaatgggctggatctcaagctctgggtcaccaatgcgaccgccagcgtgcgcgccgcccaggtgctgaaggcgcaactggccacggtgggtattcgcgccacggtgacaccgatggattccggaacgcgcaacgcgaagctgtggggcgttcaggacccgaaaaaagccgaatttgacctctattatggcggctggtcgacgtctacaggcgatgccgactgggctctgcgtccgctgttcgccaccgaatcctgggtacctacctcgtacaatgtctcctatttcagcaatcctgatgtcgacaaggcgattgctgccgggctggcgacggccgatccggcaaaacgtggtatcgcctatgcacaagcgcaaaagctgttgtggaaagaggcccccgtggcgttccttggcacgccagacaatctggtaggcaaacgcagcaccctgaacggcgtttcgatgctgcctgatggcaatctgttgtttactcaggcgtcgtttaaataa

SEQ ID NO: 177864 - DNA, 933 bp, Klebsiella oxytoca; identical to SEQ ID NO: 150540

SEQ ID NO: 177865 - DNA, 870 bp, Klebsiella oxytoca
atgagtcatcaatcgcctcaggttattcgctcgccgtggcgcgatttcctgcatgcttttgtgcgcaatcctctggcgctggtttcaggcggatttgtcctgctgctgattctggtggcgatctttgcgccctggctggctccctgggatccgatggcacccgactggatggcgttatcctcgcccccttcggcagcacactggatgggcaccgatgaactggggcgcgacctgctcagccgtattatctatggggcgcgtatttcgctgtatgtcggcgtgctgtccgtgacgctcggcatgattgtcggcgtcgtgctggggttgctggcgggctattacggtagctgggtcgatatgctgatcatgcgcggtgctgatgtgttattcgcgtttcccggcatgctgctggccattgcggtggtggcgcttctgggaacgggcctgaacaatgtcatcatcgccgtcgcggtgttcagcgtgcccgtctttgcccggattgttcgcgcctccacgctgtcattgagacaggctgcctatgtggaagccgtgcgctgtgccggtgcacccgaccgaatcattatcctgcgccatattctgccgggcacgctttccagcgtcattgtttattttacgatgcgcattggcaccagtattctcacagcggcaggcttaagctttattggcctcggaccggagccggatgtgcctgaatggggcaatattctggccatgagccggagcatgatgatggcgggcgcgtggcacatgagcgtgtttccggggctggcgatttttatcacggtgctggcgtttaacctgctcggcgacgcgctgcgtgacacgctcgacccgaaacttaagggctga

SEQ ID NO: 177866 - DNA, 1044 bp, Klebsiella oxytoca
atggactttcaacaactgcagtgcgaactgctgctggatcgctggcgtaacgagcgtcagttggggcagccgcgtagcgcatgcggccccactaatcgcatcagcgatgtggctggtgtgcgcgtcggccacgtcacgctggctgagggagagctgcagactggcgtcaccgctatcgttccgccgggtgataacctgtatctcacgccgctgccgtgcggagctgaagttctgaatggctttgcgaaaccggtcggactgacacaggtcgaggagctgggtgtgttacacacgccgattctgctcagtaacacgctggcggtgggcacgctgtttaccgcgctggtacgggatgccatccgtcgtaacccggaactcgggcggacgctgccgacggtgaacccgctggccctggagtgcaacgacggctggctcaatgatattcaggcgctggccatcagtgaggcgatggcgcaggaagcattgcatacagccgcagcgcacttttcccgcggcagcgttggcgcaggacgcgggatgagctgttttaatctgaagggcgggatcggcacggcctcgcgtgttattccgtcgctcaatgccacgctgggagtgctggtgctggcgaattttggcgcgctcagcgcgctcacgcttgacggtgtgcgactcggtgaagtgattgcaacgctgctggcaggagaggcaccgcaacgtgatgccggttctgtcatcatcgtgatggcgacggatgcgccgctggatgcgcgtcagttgaagcgtatcgcgaagcgtgccggtgccggcctcgggcggctgggcagctactggggccacggctcgggcgatatcgccgtagcgttttcaacgcaaccgctgccgcaaccgccgcaggacgccatgctggagccgctgcttgccgccgcggcagatgccaccgaacaggctgtactcgatgccttgttgagcgcagagcctgttaccggctttcggggtcaccatcgcccctcactgactcagattctggacaggttaaccacatga

SEQ ID NO: 177867 - DNA, 822 bp, Klebsiella oxytoca; identical to SEQ ID NO: 150537

SEQ ID NO: 177868 - DNA, 912 bp, Klebsiella oxytoca; identical to SEQ ID NO: 150536

SEQ ID NO: 177869 - DNA, 180 bp, Klebsiella oxytoca
atggcttatgtaccggagcgctatgcacagcacgggctggatacacagcgcctggtaaccgtgctggacgactggacaatcacctcgcaaggtatcgcactctattttccacaaaaccggcacatgcccgtcgcgttacgactgtttgtcgacaccgtgaaagccacaacgcgcatctga

SEQ ID NO: 177870 - DNA, 324 bp, Klebsiella oxytoca
atgacggcttacagcgaagtaaaccggaaaaattctgacgttaatttagccgtgcgcagcgcgccagctcaggcagagagaagaaaactaaagcgccgagcgccagtgctgctcgccgaggaagcgggagttgaagagggatactgcagggtgataagaaatatacatcctgaactgattgtccataaaattacaattatccgcggtattgcttctcatcatttgcggatgaaaattgtcctctgtagttatacacacgcagatttgtaccataacgccacatttaactcaaagtctttgcagttctttacctcggatatttga

SEQ ID NO: 177871 - DNA, 879 bp, Klebsiella oxytoca
atggcgttgtatgtgtcgccgattgtctcagggaaagtaattcgttcccgtggcggcagcacgtcagaatttaccccgggctatgtgaagccaaaacacgaagttaatccacaaatgaccctccgccgcctgcctgatgaagatccacagaatctggcagaccctgcttatcgccgtcgccgcatcattcttcagaacatgaaagatgaggagctggcgattgcacaggtcgaagagaagcaagcaattgaagctgtgctctatgggaaatacaccatgagtggagaagcatttgagccagtagaagtggatatggggcgaagtgccggcaataacatcattcaggcgggggcggcagcatggtctggccgcgataaaaaaacctatgatccgaccgatgacattgaagcctatgctctcaacgccagcggtacgatcaacattatcgtgttcgatccgaagggctgggcactgttccgctctttcgatgcagttaaggagaagctggatactcgccgtggctcgaattcggagctggaaactgccctgaaagacctgggtaaagctgtttcttataagggcatgtatggcgatgtagccattgtggtttatgccggtcagctcgttgaaaatgacgtcaaaaaaaatgctctgccggacctgtctatggtactgggtaacacccaggcccgtggtctgcgcacctatggttgcatccttgatgcagacgcccagcgcgaaggtattaacgcttcaacccgctacccaaaaaactgggttcagacaggagaccctgcacgcgagttcacaatgattcagtcagcaccgctgatgttgctggctgatccggatgagttcgtctccgtaaaactggcctga

SEQ ID NO: 177872 - DNA, 420 bp, Klebsiella oxytoca
atgaccaaagaagagttgatcgcccgcctccgagagctgagcatcatgctgaaccgtgatgtgagcctgacaggatcaaaagaagaactggcactccgcattgcagagctggaagaggagcttggggatgatgccgacgatggtgacgacagcaatgaaactgctaccggcaatacggcatccgccggtgaggagaaggatcgccacgtgcagggtaacgcattaactccggcgccccaggaaacacattccgcatctggtgatctggtcgcggtgaaaacgcgcgcgacattacacctccaagcgttgcacgccgtaaaaaatgaaaaggtgagtcttgttttgccaggaactaccgttcgtgtcagcgccggggatgcagaagagctgattgctcgggggctggctgtcgaaccatag

SEQ ID NO: 177873 - DNA, 354 bp, Klebsiella oxytoca
atgaccgatttcaataatattttcgatgcggcaatatctctggcggatgaaattatcctcgaaaagatggccgtagtagccagggtaacctcgggtttttataagggaagtgatatttctggtgttttcgacgatcccgaaaatatcggctatgcaggaaatggggtcaggatagaggggaccagtccttcactatttgttaaatcagtagccgtcagtgagttaaaacgcttcgatttgctaatcgttaataacgccacatactgggttgatcgcttaagtccagatgattgcggaagccgttatatctggctggggacaggtacaccacctgccagtaacaggaggggatag

SEQ ID NO: 177874 - DNA, 555 bp, Klebsiella oxytoca
atgtctattcaggggttggcagagctgaaattacgacttagtgagataagcaaaaccgcagttccgcgagcgacatcccaggcgatcaaccgtattgccggacgagccataagcaaaagtgtatccgtagttacaaaggatacgaaaattccacggaaacttgttcgcggtcgagcgcgattacgcaaagctacttccagaaagccgcaggctattatcagagtaaatcgcggaaacctaccagccattaaattggggcctgccagcgtgagattgtcgcggagaaaacgcgataaacgaggggtgagaagtattttacatgtaggtcgttttcggtttcctggagcattcattcagcagttggctaatggtcgctggcacgtgatgcaacgcgagtcaaagtcacgctacccaattgatgttgtcaaaatccctcttaccactcccttaactactgcatttaaaaatgcagttccagcgttgatgcaatctgatatgcccaaagaaatgcagtatgcactgcgcaaccagataaggatgatagtgaaacgatga

SEQ ID NO: 177875 - DNA, 393 bp, Klebsiella oxytoca
atgaaacattcggatattcgtaatgcagttattgatgccctgagcagtattgatgcgaatgctctgtttgacggtcgcccggcattatttgatgagcaagatttccctgctgtggcggtttatctcacagatgcgcgggcaactgacagagaagttgatggcgatatctgggaggcaacattgcatgtcgaagtgtttcttcccgggcaagtgcctgattctgaactcgatatgtggatggagtcgaaaatttatccagtaatggggaacgttcagtccctttctgtactactggaaaccatttctcccgatggttttgattaccagcgggatgaagaattggtcgcatggagttcggcggatctaaaatactcaattacttacgaaatgtga

SEQ ID NO: 177876 - DNA, 396 bp, Klebsiella oxytoca
atgacttatcttaaaaaagacacattaaatccagatggtgagaatatttcgctgtttgaattgtcggcttataaccgaatgaaatatattgaattcatggttgaagaacgaaaatctttacctactgacggactctcttctgaagaaaattttaaactagccaccttattggctatgcgcgatcaggccatgttggttgctttatccctgagtgaggcagaagaagagaagcgtgagggggaagatattttccctgaaataatgcgaaaatatccaccgggattacttggtggtgcagccttaatggttcgtatgctttcaggaatggtccctccagtaattaatggctctgaagaaacagaagaagaggaagcaccggatctggaaaagtcctaa

SEQ ID NO: 177877 - DNA, 474 bp, Klebsiella oxytoca
atgtcagatatttattatccacataattatatacccggcccgacatacgataattatggatttgaatcgactgatcctatgattcgtaccgacagagtgggggggcttgccaggcagcggagaaaatatacttctgttccgactgaaaacacagttgtctggcagtttaagagtgatgcacatgctcaggtctttgaatcgtggtttcgtgatgtattaacggacggcgcggcatggttttatatgaagtgtaagaccccagtcgggcttaagttttttaaatgtcggtttaatggggtgtataaaggtccatcgtatattaaaccggggctgtggcgttattcagcaacccttgaattaagggagcgaccacttgcccctgtcggttggggacattatccagaatggctggccgggcaatctctccttgatattgcactaaataaggagtggcctaaacatgacggtaattaa

SEQ ID NO: 177878 - DNA, 483 bp, Klebsiella oxytoca
atgacggtaattaaccggctgtatgcgtcatccggtcctgaagtcattattggcacacttcagattaatgtgggtgagcagtcgtattatttgtgtgaaggttatgaggatataaccgctatgaccgaggatggtgcggaggtgaagttttttgcctgcgcaatatcattctctcttccggcaaggaacgatgatggtacacaggatctgaagttttctttgtgtaatatcgatggtgttgtttctaccgctatacgtgaggccgccgataccttaaaggaaggtacaataatttttcggaagtatatttccactgatctttcgtcacccgctgaaccgccatctgtgatgccgattaagggcggttcctggaaaccggtagtcgttaacattacagctggcttcaaaaacgtccttgattatgcctggcctcgcaaccgcttcactttgccttatttccctggtctccgttacacccgatag

SEQ ID NO: 177879 - DNA, 381 bp, Klebsiella oxytoca
atgctgaatattgataaatatctggctgtccgctggcagatgggcggacgggtttttcctgtgcttgattgctacggggttgttcatgaagtgcggcgcgatctcggactcactgactggcccgcttttgaaggcgtggtaaaagagggcgatgaaatgcacaccgcttgcaataacttccgtccaaacgttgttcgatgtgctccctgccctggtgcggttgccgcctgctatacgggaggagtaatcggtcatctcggtgtcgtggtggagctgggcggcctgctgtatgtgatggagtgcaatccccgccgtaacgtgacgatcctgccgttgacgcgatttgagaagcagtatctgaaagtggagtattaccagtga

SEQ ID NO: 177880 - DNA, 3066 bp, Klebsiella oxytoca
gtgactattcgtgtatacccatcccgtttaccgggcgaaccgctggaaacgcatcagcatcgggtcatgacagttcacgactggatgtctgaaaatgtagaaaattatcgtctggatatgcggcaacgggttgcctttgaggtcaacaacgtctccatacttccgcaggaatggccgttctgtgtaattaatcctgatagtgatgtaagggtttatccgatacctggtgaagccgtatcgggttcggttatcgccgcctgggtcgctgcggccgtcgctgctgcatcagctatttacgccatcgttatgatgtctcaaatggacaaagggggatattcatccagtaatggtacgtcccttgatctcaatccggcaaaggccaatcaggcaaaattaggtgatcctattcgtgaggtgcttggtcgctcacggatatatcccgattatgtcgtgcagccggtcacccggtttcatcctgacgatccaacccgcatgaccgtagagatgatgttatgcctgggcatggggaatttcgctttcacaaatggcgatattcgcattggcgctacgccagtcacagccctcggcgattcattctcttataacgtttattcccccggtgcggatgtatcaggcgatcgccgtagtgaaaactggttcaacagtacagaggttggcgggacatcaagcggttcaggtctggatatggcccagacatcccccgattctgttgatattaatgccgacagtatggcagtttctggcgccacggtgaccttcaacgggcttgatgatgataatgacgacgacgatgacggtaatgcattgccggaatcgtgggtgatcggagccattgtaactatcattgcaccggctaactatctggtttcgacatcatcaggttatagcgttctgaccggcgatacgctggcggaaatcaatcctcttgtcggcatggccgtcacgctggagattggtggcgcagagtatgatctggtgatcgcatcttatacaccgaaacaggatgctgttcctggtgtcgggggaacgagtgcggcgttgcgtgggaatgcagcgccgaccacctacgatttctcagtaacaggccagacgtttaccctgacgtggcatgcgaccacgtataccgtttcgctagtggagaactacggaactatgtccgggttgctcgcggcgattaacggcgggctgaccgggtcggggttggtcgcccatgatgacggcggcgtagtgcgcattgttgagatatcgagtccgtggcgtggtggctccatcacatcatcatcacttccggtatctgtcttcggggataaccctgattttacgtcaggcacggcatcaagcgggggcagccctgcgattacgtctaatgtcacattcgcatatggaagtgctgtaggcacagctttctctggaattcctgaaggtacgcagcgcctttccttggctcaccgcggtaacgaataccggattgctgatgctgacggcacgacggcaacagttcagcgcgtgattgaaggagtggttgatccatcatggctcggcttctcgcagcgcacgatgatcgactaccaggctaccggtataaacgacaacgatacctggctggggccttttcttgtgtgcccggaaaatgaagtggtggatgccttcgaagtgaatttctcgtttccgtcgggcatctgtgggtttgacagcaaaggcaaaaagcggatcaggcactgtgagtgggaaatacaataccgggtgtatggtgctggtgctggatggacgagtaaacaaggcgtctatgctctgcaaaacgttaatggactcggctttactgagcgggttgatctttcggtaccgggcttggttgaagtgagatgcagaaggcgtaatgagcagggcagcaataatgcccgcgattcaatgtactggcaggcgctgcgtgggaggctactggcgcgaccttcttcttatgccggcgtcaccctcatgggggctacggtcgagacaggcggaaaactggcggcgcagtcagatcgacgtgtaaacgttgtagccacccggatttatgattccggcacatcccgtagcatttcaggcgcgctttatcatgtcgggcgatcgctgggtcttgaaatggactcggcagcaattgacgcgctcgaaagtgcctggtggacgcccgacggtgaaacgtttgattttgcgacaggtgacagtatatcagcgctggaaatgttgcagaaaattgcgaatgccggaaaggggtatttcctgctgaatactcaaggtttagcgtccgtcgggagggaaggaattaagccatggactggtgccattaccccacatgaaatggtagaagaactccagacagatttcagtgcccctaacgacgatgattatgacggcgttgacgtgacctacatcaatggcgcgacatgggcagaggaaaccgtacagtgccggacgccggataatccgacccctgtaaaaacagaggcgtttaccctcgatggtgtccttgatcagaatcgtgcttatcagatcggcatgcggcggctgatgaaataccgcctgcagagactggttcacaagaccacaacggaaatggacgcgctttgctataacgttggcgatcgcattgtactgactgatgatattcctggtagtaacaccatctcgtgtctaattgacgcgatgacaacagttgatggaatgacaacgtttagtgtttctgagcctttagactggtcattcacaaatccacgggtatacatcaggtaccaggacgggacagcttcgggactgctggaagcctctccgggtggtgactatcaggtcttagtgccgtatcagcttgagttcgaagggattcagattgatgatcctatcatcgaaccgccgcggttaatcttctgcagttcagagaaggatgtgtatcacgccattgtggcggaagttgccccgcaggatgacggcacattcgaggtaactgcccggcaatatcgtgaagaattctacgcatacgacgacgccacataccccggcgacgtcgcgtaa

SEQ ID NO: 177881 - DNA, 546 bp, Klebsiella oxytoca
atggaggtgaacaaaaaacagctctccgatatttttggtgtcagcattcgtacgattcagaactggcaggatcaggggatgccgtttgtacgtggtggtggcaaaggtaatgaggttctttacgattccgctgccgtgattaagtggtttgcccaacgtgatgctgacatcgaaaacgaaaagttgagaaaggaagttgaagagctccgtaaggctggtgaatctgatctgcagccaggaacaattgattatgagcgctaccgtctgacccgctcgcaggctgatgcccaggagctaaaaaacgccaaaagttccgctgaggtggtggagacagcattctgcacgttcgtgctttcacgcgtggccggcgaaatagccagtatcctagacgggatccccctgtcggtgcagcggcggtttcctgagctggagaatcgacacattgatttccttaaaaaggacgtaatcaaagccatgaacaaggcagctgcgctggatgaaattataccggggttgctgagtgaatatatcgaacagtcagattaa

SEQ ID NO: 177882 - DNA, 420 bp, Klebsiella oxytoca
atgtttaatcgtaatgatctgaccctttctctcttctacgcttcctccacgaatgatgacgatgaaaaagtcgcgacactgaccgttcaggtgaacaataccgacatggtggccatgcagagtaataagctgcagtgcatcactgataagaccggtaagaaggcttattccgttagcgagcagatgatcaccaatggctctgatccgctgctggttgcccttgaggactactggcgccggcacactgagacggtcgtgaccggatttctgaacgatgttggcgacttcatcgcagggaacatcagccagtcttcaacgttcctcggcttcaatgggctgaaggttttcgaaagtgagcctcttacggctcggatccccgaggatgtgctgcaggccgacgggggcgcattcgcaggctga

SEQ ID NO: 177883 - DNA, 333 bp, Klebsiella oxytoca
atgcaaaatatcaagattgaatacgttaatggcgtgctggtggcgctggagcgggacggcgtgtcttacgcgcatctgcctgtttcagctatccatttcgaccataccgctaagatattcccgcacctcaagattgagattgaagctggtggcgcaccattcgtacctgcagcaccagcgcaaccacaaccgaaagagtcagaacagccaccagctgtcgtggaagaagtgcagccagaaaaagaaggtgagctcttgccgccgaatgatactgcgccacgaacggcgcgtcgcccccgtcatcgcaaccgtaaccgcaacaggagccagtaa

SEQ ID NO: 177884 - DNA, 186 bp, Klebsiella oxytoca
gtggatgtgctaattgatagtgccacggaaggctatatcttcctcgctctggctatgtggcgcgttctgattgtggtattcgttgggatggccctctcattttatggcgtacaaatgcgtagaactgcagtcacctttttgatgctagctgcggtagtagggattgcgggttcgatttatacctaa

SEQ ID NO: 177885 - DNA, 231 bp, Klebsiella oxytoca
atggttactcaaaaacttatcgaaacatacatgttagttaatgaacataagcgcctgtcgcgtgtgaaatatgagattttttctggtactgacaacacaatttacgcattgattactgtttatgcatatgaacctgtttttcacattaagggctatgactcattgacattaaacgagagcgtagacacaagggcgcaggttgaggagcattttgcggcctattattcctag

SEQ ID NO: 177886 - DNA, 468 bp, Klebsiella oxytoca
atgagcagatccgcagagattgtgtgtgctgttgtaattgtcgccctgtccattatagggtggctagccaatcactaccactgcaagtaccagcgggagcagaagcgcgctgataccgccgagcagagtcttaagctggcgaacgagaccatcaccaacatgcagacccggcagcatgagattgctgcgctggatgcgaagtacacgaaggagttagcggatgcgaaagctgaaaatgatgtactgcgtcgcaggcttgatgctggtgggtgggtgctcgtcaaaggaaggtgcccagtgtcagcctcagccaaaaccaccggctccgccagcatgggcgatgatgccgccgtcgaactctcttcagttgctggacgaaacgttctcggtatccgggctggaatcatcagcgaccagacagccctgagggcgctgcaggaatacatcaatacgcagtgtttgagataa

SEQ ID NO: 177887 - DNA, 420 bp, Klebsiella oxytoca
atgaaaaccagtaatgtttcccgcggtatacgcaacaacaatcccggcaatatccgctggggtgatgaatggcaggggctggtgccaaaagcacagcgcacagataaatcattctgccagtttatgtcaccggaatacggcatccgggcgatgattatcatcctgcgcaactatcagcgtaagcatggtctgaacacggtaagcggcattatcaagcgctgggctccgccgaatgagaacaacacacaggcgtatatcaacagcgtggctcaggcaacgggtgttacccccgaccaatgcattgataccagtgacagccggttcacggtgaagctgttacaggccatcatcaagcatgagaacggtaatcagccgtacagcttcgatacctttgttagcgccgtcgaactggctggttag

SEQ ID NO: 177888 - DNA, 336 bp, Klebsiella oxytoca
atgaaaatgaacgagaaaactcctgacttctgggcagaggtactgaacggcctgaaaaactcctggccccagatatcaggggcgttgtttgctggcctcattgcctatggacgcctgatatatgacggtgccacccgtaaaaacaaatggattgagggcgtcctttgcggcgctctttctttatgtatcaccagtgcgcttgatgttgtcggccttccggtatcggtatccccatttgttggcggagtgattggtttcgttggagtggacaagctgcgtgaaattgccattagcgcacttaagaaacgggcaggagtgaatgatgaaaaccagtaa

SEQ ID NO: 177889 - DNA, 183 bp, Klebsiella oxytoca
atgaaatcgactgacctgataaaggaattgatagccgccggatgtgaactcaaaaggcaagggaaaggcagtcaccagatatggtggtcgccgataacgggaaaaacattcccggttccacaccctaagggcaacctaccgatcggcaccatcaaatccatcaagaaaacggcggggatctaa

SEQ ID NO: 177890 - DNA, 432 bp, Klebsiella oxytoca
atgttcttttcagtgggcgttgagacgccaaaagatgaaaacaccgcctacggtatgattgttcctgcgttttcagcttatgagatgggttgcttctccgccgctgatacacaggaccagatcgcgccaatggttaaagaagccattctcttaagcgttgagtgcctggtcgaagatgcagggcgcagcgtcgatgaaatcaaagacgccggctatatggtgtatgcagctaacccagaatataaggactttgacagctggttcatggttgaagttgatttgtctgagttcgaaggcaagccacaacgtatcaatatttcactgcctgatacgctgattaagcgcatcgataatgctgtaaagggtaacgccagctatcgagacagaagccattttctggctgaagctgcccgacacgaactgaagcagtga

SEQ ID NO: 177891 - DNA, 603 bp, Klebsiella oxytoca
atgacaccacgtcaacgccggaaccatcgtgcaggattagaaaccgtctcgaaggcaacgcgtaaaagctggctgggtcgatttaccccgctcagcggaattcagtctgcctggattaaatcccttctcaccgtatggggggagggggtaagaggtggtatggcgccacgaaaaccaaccgaacattcctgctggcggggattaaagggaggacgatggtcagataaagtacttgagcgctttacggccgccatcgagcaggctcgccgagaagggtttagcgggccacaggctttaaatcgtgctcgttctattttatggccccagcccaccagcactttgatagataccgcccttcatgatgacgatgttgaattcattgaaagatgcgtactggaagcatttgaatccggcgatcccgtttatttagtcggtgtaagttattacaccacacgaaagaaaatttctgatatcacgcgcgaattacagctggtggcaccgtggttaacggatggagaggcgagaaagcgtgttcgctggtgtcttgagatattcagagcaaaagcatttctttcagtaaagcgagaaattcataaattatag

SEQ ID NO: 177892 - DNA, 1062 bp, Klebsiella oxytoca
atgagagccctgctaactccggaagtggtgccacgcttaggcgtggtgctgtttaagccaggtaaagaactgatgaggcttttccgcaacgggagggtgctaatcgagtctgagccaaaaagtatggcggggctggaggctggtgccgttcctgacgcgcgccagccactgcgtgaggattcggagcttcttccgtttttcctgaatgagcgcgttattaatgctgctggcggaataaatgctcttgaactttggcttgaacgtactgttcaacattgccagtggccacactcaatttatcaccatcatgaactggtgacattcaggcatgcaccaggtgccataagggcatgctggcattgcgataacgaacttcgtaatcagacagcacaaaccctcgacaagctggtggtgttaaacgtcgcagactggattataagcacagtactgatttatctgggctacaacagcgagcggatgctttccctggctgaattgtgctggtgggcggtctgtaaaggggtaggaagtgaaatatcagaggaaatggcgcggcgttctctgcggatgaaaagggaggggttcaaatctgtctaccgggaaagcgagctggttcctacagttcaggccaccagcattctgactgagcgactaaacagtgtagtcgtaccagcaccagattttcctgcagctacaccagcagtgccagaaccggcgccagtaaaacccgttgtaggcgtcatcgtagactctgaagctccggccacgtttttcgcccgtccgaaacgcatccgctgggtatcccctgattttcttacctgggtaaagactcaaccctgtatgtgctgcgggcagcccgccgatgatgctcaccatttgattggctggggccagggcggcgtcggtacaaaggctcacgatatttttacgatcccactttgcagaaaacatcaccggcagctgcatgaagatccgctggcattcgaacgtgaacacggcacccagcctgtgctgattattaaattgctggaccgggcttatgcgctcggtgtactggcgtaa

SEQ ID NO: 177893 - DNA, 1848 bp, Klebsiella oxytoca
atgcgtgagctcatcgttgataattttgctggtggtggcggtgcctcaacagggattgaaatggctacaggtcgtagcgttgatattgctatcaaccatgacgaaaacgctgtagccatgcatcggactaaccacccggacacgcttcattattgtgaaaacgtttttgatgtcgacccagttgctgcgactggtggaaaagctgtcggttttgcatggtttagccctgactgcacccactattcaaaagcgcgcggtagtaagcccgttaagcgtgaaattcgtggtttggcctgggtatctgtccgttggggattggatgtgcgcccccgggttatggctctcgaaaatgtggaagagtttaaaacgtggggaccattactttcctgtgaaatgcgtcccgatcctaagcgttcgggtgaaaccttccgggcatttgttggaatgctatccactggaataccagcggatcacccagcgctttacgaatgctgcgacttcctcggtatatcgccggatagcaaagatgccaaacgcctgatcgccgggttgggttataaggtcgaatatcgtgaactgcgcgcaagtgattacggtgcgccgacgatacgtaaacgattcttcatgttgatgcgttgtgatgatcagcccattgtctggcctgaagcgacgcatggagatccaaaatcagcagcggtaaaagctggaaaactggctccatggcgaacagctgcagaatgcattgactggtctattcctgttccatctatattcgatcgtaaaaagccgctagctgaaaacacgttgaagcgtatagcgcgggggatccaacgatttgtagtcgatagcgctgagccatttatcgtgaaatgtaaccacacttcgactagcgggaaatatgattgtttccgcggtcaggagttaggcgcgccgattcagacgataaccaaaaaactcggctatgcgatcgccgttccgagattggtaccgtttatggctggaaatggggggagccagtaccaggcgaaaccgcgctctatcgacaaaccgcttcacaccatcctcaagcaatcaagagcctgtgtggttgcgccggttgttgctcgtcagtttggtgccagcatcggccaccgggcggatgaaccaagcgcgacgattaccgcaggcggtgggggaaagtcacagttagtatcggccacacttattcagatgggctatggcgagcgcatagggcagtcgccgcgtgtgctaaatctgggtaagcctttgggaacagttgtcgctggtggcaataaatttgccgtaacaacggcgtttttggcgaaacactacggcgggaactataacgggccgggcgttggtcttgttgagccagctcattctgttaccacagtcgatcatcatgcattaatcacctctcatctggtgaaacttcgtggtacctgccgtgatggccaacgtagcgatgaacccatgccaacaattactgccggcgggcaacatgtcggtgaagttcgcgcgctgttggcggctaatgactatgatgagcgccgggcggatcaggttaaagaattcctgaattcgtttggaatcagtgaactggtcactattaaaggcgttgtttaccgtattgttgatattggaatgcgcatgctgcagccgcatgaactctatcgcgcccagggattccctgaagggtatgttattgatcgcgactaccgcggcaataagtattcaaaggaaaagcaggtcgctcgatgcggtaatgcagttcctcctcctttcgccgaggcactagtgagagcgaatctccccgaaatatgtaacgtccaaagggaggtagcatga

SEQ ID NO: 177894 - DNA, 468 bp, Klebsiella oxytoca
atgtttattcgtggtcgtattggattcgctctcccggtatggtttgtgccggccgacgaaaagcagaaacccaccagcgctttctttgcgggggccattgcggtattcgataaggcctggcgcggtgagcgttttagctatatcgatcgcgcagagctggaagcgaaagggcgggcaagtatggcgctggcgcagtttgcagctgggctggtatctccggcgcgggatgtagctccgactcctgcggctaaaccagccgctgagcctgttattgaatctcgcatctggccgctggaggtcaatctggcattcggacaggtagacggcgccgccgatctggaagagccacaacagaacaaactgaaatcccacatcaaccagctatggctggagcgtacatcaatcagcgagatcatcaccattgccagtgggctggtcagtagcatgcagggggtaagccatgcgtga

SEQ ID NO: 177895 - DNA, 522 bp, Klebsiella oxytoca; identical to SEQ ID NO: 101469

SEQ ID NO: 177896 - DNA, 954 bp, Klebsiella oxytoca
atgaatccttcgttaaccgattcccgccgtcaggcgctgcgttcagcttcccactggtatgccgtgctaagcggcgagcgcgtcagcccacaacaggaagcgcgctggcaacagtggtatgaacaggatcaggataaccagtgggcctggcagcaggttgaaaacctgcgcaaccagcttggcggtgtgcctggcgacgttgccagccgggcgctgcacgatacccgcctcacccgccgccacgtgatgaaaggattactgctgttgctcggcgctggcggaggctggcaactctggcagtcggaaaccggcgaaggtctgcgggcagattaccgcaccgccaaaggtgcagtcagccgtcagcaactggaagatggctccctgctcacgctgaatacccaaagcgcggcggatgtgcgttttgatgcgcatcagcgcaccgtccggctctggtacggtgaaatcgccattactaccgcgaaagatgcgcagcaacgccccttccgcgtcctgacccgtcagggccaactcaccgctttagggacagaatttaccgtccgccagcaggataatttcacgcagcttgacgtgcagcagcacgccgtggaagtgcttctcgccagtgcccccgcgcaaaaacgcatcgtgaacgctggtgaaagcctgcagttcagcgcctctgagtttggcgcagtgaaaccgctggatgacgagagtacaagctggacgaagggcatcctgagcttcagcgataaaccgctgggtgaggtgatagccacgctaagccgttaccgcaacggcgtgctgcgctgcgatcccgccgttgccgggctgcgcctgagcgggacgttcccgctgaaaaataccgatgcgatcctgaacgttatcgctcaaacgcttcccgttaaaattcagtctattacgcggtactggataaacatttcaccgctgtaa

SEQ ID NO: 177897 - DNA, 2325 bp, Klebsiella oxytoca
atgacgccgttacgcgtttttcgtaaaacaacacctttggttaacaccattcgcctgagcctgctgccgctggccggtctctcgttttccgcttttgctgcacaggttgatatcgcaccgggatcgctcgacaaagcgctcaatcagtatgccgcacacagcggaattaccctctcggttgacgccagcctgacgcgcggcaagcagagcaacggcctgcacggagattacgacgtcgagagcggcctgcaacagctgctggacggcagcggactgcaggtaaaaccgctgggaaataacagctggacgctggagaccgcgcccgcgccaaaagaagatgccctgaccgtggtcggcgactggctgggcgatgcgcgtgaaaacgacgtatttgaacatgctggcgcgcgtgacgtgatccgccgtgaggatttcgccaaaaccggcgcaaccaccatgcgtgaggtgcttaaccgcatccctggcgtcagcgcgccggaaaacaacggcaccggcagccacgacctggcgatgaactttggcatccggggcctgaacccacgcctcgccagccgctcgaccgtcctgatggacggcatccccgtcccctttgccccttacggtcagccgcagctttcactggctcccgtttcgctcggcaacatggatgccattgacgtggtgcgcggtggtggtgcggtgcgttacggaccgcagagcgtgggcggcgtggtgaactttgttacccgcgccattccgcaggactttggtatcgaggcgggggtggaaggtcagctcagcccaacctcttcacaaaacaacccgaaagagacgcacaacctgatggtgggcggcacagcggacaacggttttggcaccgcgctgctctactccggcacgcgcggcagtgactggcgcgagcacagcgccacccgcatcgacgacctgatgctgaaaagcaaatatgcgccgaatgaggtgcacaccttcaacagcctgctgcaatattacgatggtgaagccgacatgcccggcggcctgtcccgcgcggattacgacgccgatcgctggcaatccacccgcccgtatgaccgcttctggggccgtcgcaagctggcgagcctgggctaccagttccagccggacagccagcataaattcaacattcaggggttctacacccaaaccctgcgcagcggctacctggagcaaggcaaacgcatcaccctctcgccgcgtaactactgggtgcgcggtattgagccacgctacagccagagctttatgatcggcccttccgcgcacgaagtgggcgtgggctatcgctatgtgaatgaatcaacgcatgaaatgcgttactacaccgccaccagcagcgggcagttgccgtccggctcaagcccttacgaccgcgacacgcgttccggcaccgaggcgcacgcctggtatctggatgacaaaatcgacatcggcaactggaccatcacgccgggtatgcgtttcgaacatatcgagtcataccagaacaacgccattaaaggcacgcacgaagaggtgagctataacgcaccgcttccggcgttgaacgtgctctatcacctgactgacagctggaatctttatgcaaacactgaaggctcgttcggcaccgtacagtacagccagattggcaaggctgtgcaaagcggcaatgtggaaccggaaaaagcgcgaacctgggaactcggtacccgctacgacgacggcgcgctgacggcggaaatggggctgttcctgattaactttaacaatcagtacgactccaaccagaccaacgacaccgtcactgcacgtggcaaaacgcgccataccgggctggaaacgcaggcacgttacgacctgggtacgctaacgccaacgcttgataacgtttccgtctacgccagctatgcgtatgtgaacgcggaaatccgcgagaaaggcgacacctatggcaatcaggtgccattctccccgaaacataaaggcacgctgggcgtggactacaagccgggcaactggacgttcaatctgaacagcgatttccagtccagccagtttgcggataacgccaatacggtgaaagagagcgccgacggcagtaccggccgcattcccggcttcatgctctggggcgcacgcgtggcgtatgactttggcccgcagatggcagatctgaacctggcgttcggtgtgaaaaacatcttcgaccaggactacttcatccgctcttatgacgacaacaacaaaggcatctacgcaggccagccgcgcacgctgtatatgcaggggtcgttgaagttctga

SEQ ID NO: 177898 - DNA, 903 bp, Klebsiella oxytoca
atgttggcatttatccgttttatttttgcaggcctgctgctggtgatcggccacgcctttgccgccacggttcaggacgaacacggcacgtttacactcgataaaacgccacaacggattgtggtgctggaactctcgttcgccgatgcgctggccgccgtggacgtcagcccgatcggtattgccgacgataacgatgcaaaacgcatcctgcccgaagtgcgtgcgcacctgaaaccgtggcagtccgtcggaacgcgcgcgcagccgagcctggaagccattgctgccctgaaaccagacctgatcattgccgacagcagtcgccatgcggggatttacaccgccttgcagcaaatcgcgccggtactgctgcttaagtcccgcaacgaaacctacgctgaaaatttgcactcagcggctatcatcggcgaagtggtaggtaaaaaacgagagatgcaggcgcgtctggaacaacataaagagaagatggcgcagtgggccagccagcttcccacagggacacgcgtggcctttggcacatcacgcgaacagctattcaacctgcatacccaggagacctggaccggcagcgtgctggcttctctggggctgaacgttcccgctgcgatggcgggcgcgtccatgccgtccatcggcctggagcaactgctggcggtcaatcctgcctggctgctggttgcccactatcgcgaagagagcattgttaaacgctggcaacaagatccgctctggcagatattaaccgccgcgcagaagcagcaggttgcttcagtcgacagtaacgcctgggcgcggatgcgcggtatttttgccgcagagcgaattgccgctgacacggtaaaaatcttccaccatcagccgcttaccgatgtgaaatga

SEQ ID NO: 177899 - DNA, 999 bp, Klebsiella oxytoca
atgaccgcgctaaaacacccggtgctgctgtgggggcttcccgttgcagtacttattattattttctggctgagtctgttttgctactcggccattcctgtttccggagcagacgcaatacgcgccctgctgcctggacacacgccaacgctaccagaagcgctggtgcaaaaccttcgtttgccgcgaagcttggtcgccgttctgatcggcgcaagcctggcgctcgcgggcacgctgctgcaaaccctgacccacaacccaatggcctctccttcactgctcggcattaacagcggcgcggcgctggctatggcgcttaccagcgcgctgagtccgacgccggttgcaggctattccctgtcgttcatcgcggcatgcgggggcggcgtgagctggctgctggtcatgaccgcaggaggcgggtttcgtcatacccaggacagaaacaaactgatcctcgcgggtatcgcgctgtcggccttttgtatggccctgacccgcatcaccctgctgctggccgaagatcatgcttacggcatcttttactggctggcaggcggagtgtcccacgcccactggcaggatgtctggcagctcttgccggtggtggtcactgcagtccctgtcgtgttgctgctggcgaatcaactgaacctgctcaacgtcagcgacagtaccgcccatacgctgggagtgaacctgccgagactacgtttgatcatcaatatgttagtgctgcttctggttggcgcgtgcgtcagtgtggcaggtccggtggcgtttatcggcctgctggtgccacatctggcgcgcttctgggcaggcttcgatcagcgcaacgtactgccggtgagcatgctgctgggggccacgctgatgctgatggcagatgtactcgcacgcgcgctggccttccccggcgatctgcccgcaggcgcagtgctggcgctaattggcagtccttgctttgtctggctggtgaggaggcgaggatga

SEQ ID NO: 177900 - DNA, 957 bp, Klebsiella oxytoca
atgaaaattgcgctggtcattttcatcacccttgccctggcaggctgtgcgctgttatcactccatatgggggtgatccccgtgccgtggcgcgcgctgctgacagactggcaggacggacgcgagcattattatgtattgatggagtaccgactgccgcgcttgctgctggcactgtttgtcggtgcagccctcgccgtggcgggcgtgctggtacaggggattgtgcgtaacccgctagcatcaccggatattctcggcattaaccatgccgccagccttgcctctgtgggagcactgcttcttatgccatcactatccgtgatggtgctgccgctgctggcctttgcgggcggtatggcggggttgatcttgctgaagatgctggcaaagacccaccagccgatgaagctggcgctcaccggcgtggcgctttccgcctgctgggcgagcctgacggattacctgatgctcctgcacccgcaggatgtaaacagtgccctgctgtggctgacgggtagcttatgggggcgcgactggcactttgtgaagattgccgtgccgttgctcattctgtttttgccgctgagcctgcgcttttgtcgcgatctcgacctgctggcgctgggcgatgcacgagcagccacgctcggcgtgtcggttcagcgcacccggttccaggggctgatgctggctgtcgcgatgacagcaaccggcgtggccgtctgtggcccgataagttttattggtctcgtcgtgccgcacatggtgcgcaggatcgccggcgggcgtcaccgctggctgatgcccgtttcggccctgacgggcgcgttgttgctggtcattgccgatctgctggcacgaatcattcatccgccgctggagcttccggcaggcgtgctgaccgccattatcggcgcaccgtggtttgtctggctgcttgtgagaatgcgataa

SEQ ID NO: 177901 - DNA, 768 bp, Klebsiella oxytoca; identical to SEQ ID NO: 40324

SEQ ID NO: 177902 - DNA, 282 bp, Klebsiella oxytoca
atgcgcaacggcttcaatggtctcgccgcaaaggtgcagacgatgctgaaagatgacccgatgtccggccatgtcttcatcttccggggccgcagcggcagtaaggtcaaactgctgtggtccaccggcgacgggctgtgcctgctgaccaaacggctggaacgcggccgcttcgcctggccctctgcccgcgatggcaaagtgttcctgaccccggcgcagctggcaatgcttctggaaggcatcgactggcggcagcctaaagactgcttacgtccctga

SEQ ID NO: 177903 - DNA, 537 bp, Klebsiella oxytoca
gtggaaaatataaataacgatgtaccacagcatcaaccttaccgaaatgaaaaggtatttaattccggtaagacagcacttgagctcaatttttctgagacaaatggcagtgtgaatcttatccttgcggggcctttagtatcgaagccgggaagttttgactggactggtcaaaaggccttttcaacaaagctgagtgatgatgaagtgatcaccttgtgtatggcgtttcttcgccttactcatgaggctgttctgaaacataaaaaaacaaagcaccataataagcaagtctacaaaaacgtaaaagttacttttgatggtaaatccacagcaatgatggaggggggagttgtagctatcaacaaagacgagagagacattaattttatacataaaattattattgatcctgccgcttgccttcgcttaggtcttttcctcttgtccgtcatactgccccgaaatccaggggtcccatctgacgcggttctaacgtgcatgcgtcttaatgcaaatgctcaactacaaaagtaa

SEQ ID NO: 177904 - DNA, 369 bp, Klebsiella oxytoca
atggccacctcaacaggtgccacgccggcttacctcctggcgccggaagtgagcgccctcctctggtatatgccggaccagcgtcaccacatgttgttcgccaccatgtggaataccgggagccgtatcggtgaagcccggacgctcaccccggaatccttcgacctggatggtctgcgcccttttgttagggtgctttcggagaaagtgcgggcgcgccgcgggcggccgccaaaagataaagtgcgcctggtgccgctgacggatggcagttttgtgcgtcagatggaaagctggatggtcgccacccgccacgccggcgggagccgttatggccggtcacggatgagacaatgcgcaactggctga

SEQ ID NO: 177905 - DNA, 1011 bp, Klebsiella oxytoca
atgacgagcgaaaataacagcttacctctcaatcttcaggaagtggacaagacaaccggcgaagttgttaagctggatgtcaacagtaccagtactgtgcagccggtagcgctcatgaggctcggtctcttcgttccaaccctgaaatcaacctccaggagtaaggcaaaccgtaaaaacgtcacagatgccactgaggagctcgtacagctgtccatcgccaaaagcgaaggatacaccgacgttaagatcaccggttcgcgtcttgatatggacacggattttaaagtctggctcgggatcattcgctcgatgtctgagtatggggtaaaaagtgacaccctggaactgtcgttcgttgaattcgttaagatgtgtggatttgactcacggcgctcaaacaagaaaatgcgggatcgcatcagcaattccctgtttaaactcgcctcggttaccctgaagttccagagcgagaccaaaggatggaccacccatctggtgcagtcagcctattatgacatcaacgaggatatcgtggagatcaaggctgaacccaagctctttgagctttaccatatggacaggcgggtcctgcttcggctgaaagccattgacgccctgcagcggaaggaatctgcccaggcgctgtatacctacatcgagagccttccccagaatcccgcacctatctccatgaaacgtatgcgggaccggctgaatcttacctcaaatgtctatacgcagaaccacacggtccgaaaggctatggagcaacttcgggatatcggctatctggattacaccgagtttaaacgtggccgggcgacttactttagcgttcattatcgcaatcccaaactcatcagcgggacggtgaaggtaccgcgcaaggaggaagaagagaaggcgccggagcagaattatgacgaagtcatcaaggcactgaaggctgcaggcatcgatccgcagaaacttgctgaagcgctatcggcgatgaagccggaaaattga

SEQ ID NO: 177906 - DNA, 1167 bp, Klebsiella oxytoca
atgggactgatggatatacttaaccagtgcattactgctggacatgagatgacgaaggctatcgccattgcgcagtttaatgacgacagtccggaagcaaggaagatcacccgccgctggagaattggtgaagcggcggatctggttggcgtttcttctcaggcaatcagggatgcagagaaagccggccggttacctcaccctgatatggaaacccgtggcagagttgaacaacgtgttggttataccatcgaacaaatcaatcatatgcgggatgtgttcggtacccgactgcggcgtgcagaagatgctttccctccggtgatcggggttgcggctcataaagggggggtttacaaaacctccgtttctgttcacctagctcaggacctagccctgaaaggactccgtgttcttctcgttgaaggcaatgacccacagggaacggcttctatgtatcacggatgggtgcccgatcttcatattcatgctgaggacactctcctgcccttttatcttggggaaaaggatgatgccagctacgctataaagcccacctgctggcctggccttgatatcatcccgtcctgtctggcactgcaccgcattgaaactgagctgatggggaaatttgacgaaggcaaattacctgctgacccgcacctgatgctccgtctggccattgaaacggtcgctcatgattatgacgtgattgttatcgacagtgcacccaaccttggtatcggtacgataaatgttgtatgcgctgctgatgtattgattgtccctactccggcagagctgttcgactacacctccgcactgcagtttttcgatatgcttcgtgacctgcttaagaacgtggatctcaaaggcttcgagccagatgtccgtattctgcttaccaaatacagtaataataacggctcgcagtccccgtggatggaagaacaaattcgggatgcctggggaagcatggtccttaaaaatgttgtgcgcgaaacggatgaagtcggtaaaggtcagatccgtatgagaaccgtttttgaacaggctatcgatcaacgttcttcaacaggtgcctggcgtaatgccctctctatctgggagcctgtttgcgatgagatttttgatcgtctgattaaaccacgctgggagattagataa

SEQ ID NO: 177907 - DNA, 972 bp, Klebsiella oxytoca
atgaagcgtgcccctgtcattccaagacataccacacatactcaatcgactgaagatacctcatcaccggcgccggctgcgccgatggtggattcattaattgcgcgcgtgggtgctatggcccgcggtaatgccatctctcttccggtatgtggacgggaagtaaaatttacccttgaagtgctccggggagactctgttgagagcgcttcacgcgtatggtcaggcaatgagcgcgatcaggaactacttaccgaagatgctctggatgatctcattccttcatttttactgactggtcagcagactccagctttcggccgccgggtttccgatgtcattgaaattgcagacggcagccgtcgccgtaaagccgcaatcctgacggaaagtgattatcgcattctggttggtgaactggacgatgagcagatggcagcattgtcccgactgggtaacgattatcggccgacgagtgcttatgaacgtggtctgcgttatacaagccggctgcagaatgagtttgctggaaatatttctgcacttgccgatgcggaaaacatctctcgtaagatcattacccgctgtatcaatacggccaaactgcctaaatccgttgttgccctgtttgcacatcctggagaactgtctgcccggtcaggtgaagcccttcagaaggcttttgcagataaagaagaattactgaagcagcaggctgagactctccacgatcagaagaaagcgggactaatcttcgaagctgaagaggtcattagtcttttaacatccgtactgaaacaatcttccgcatcaagagttaatctgagctcacgtcatcagtttgctccaggggcaacagcattgtacaagggcgataaaatggtgcttaacctggataggtcccgcattcctgcggagtgtatagagaaaatagaagccattcttaaggagcttgagaaactaggagtttga

SEQ ID NO: 177908 - DNA, 153 bp, Klebsiella oxytoca
atgacaaatatcattctgtgtgatgtaactgccagcgtcagcgaacttaaaaacgatccggtggccagcgccggtgccggctgcggctacccggtcgctattattgacagcaaccggcctgtttttttattgtgtgcccgcggttctgtatga

SEQ ID NO: 177909 - DNA, 351 bp, Klebsiella oxytoca
gtggccacggagaaactgcttacacccactcaggacaccagggacatcattgctgccgccacaacggctctggtgcgtatctggaaggatgggcaccggtatgccaaagccggagttatgctgaatgatttcaccgtgtctggcgtttcgcagctgcagctgttcgacgaacgcccgccacggcctcacggtgctgagctgatgatggttctggacgggatcaacaactcagggctgggtaaagtatggtttgccggtagaggaattgccccggaatggccgatgaaacgtgagatgccttcatcggcatataccacccgctggaaggagctgccggttgcccgtttctga

SEQ ID NO: 177910 - DNA, 246 bp, Klebsiella oxytoca
atggtagaaatcactgaagcggaacagatacgccttaatctgctttccactctgaactatgacacagctgcaacaaaagctgcagtctcatttgttcaggacaatcctctgaaatatcaacttttcatccagcaatacagccgtgttacctcagaaaccgaagtggtagcaaagacgatgaaagcagtacaggaagccaatgaggcattggcgctgtttgatatcagtactgatgtaactgattaa

SEQ ID NO: 177911 - DNA, 297 bp, Klebsiella oxytoca
atgaagaagataataagtgcgttgagtttagttttattggtcggctgcgctactgtgggtaaggattttcctgatcaaagtgtagcttctttgcagaaaggagtcacttcagagcagactatcctggcaacatttggtaagcctgcatatatcacctctgattctgatggaaataaaatatacacgtggacctacgctcatgctactgcgttcagcgtagccaaaggtaaggccttagtgatcaaaataaataaagaagggctgatggattcttatactgtcagcgcaacccagtag

SEQ ID NO: 177912 - DNA, 276 bp, Klebsiella oxytoca
atgagccttgagtatatcagcggtatggtagtcgttctgattggcttaattgctgctgcatttggcatcggtcatgctcgcgggaccagtatagccgaagcgaaagccagtcagcagcgaaccgaagagaacgcagccgctagcgtcgccgtggcggaacgtaaagtagaagccacaaaaggggccagcgatgttgaagagagcgttaagcgtatgggtgatgacgatgttgatcgcgagctgcgcgaaaactttacccgccccggtagtcgttga

SEQ ID NO: 177913 - DNA, 339 bp, Klebsiella oxytoca
atgattatttttgtcctgctagcactggtggccgtgctcgttctgttgctactgcgcaaatattcccgcctggagtttgttgcgcactcccggctgctgctgaaaacctggtcggtaaggttcggcgcagttggtgcgctggttggtgtgtgggctcaatcatttccggacgcagctcttcatgcctgggcgatgctgccgccggatatcaaagatattctgcctgccaacattgtggcgatgattagcccggctctggtggtgctcgccatcctctctcaatacgtcagacagccagagctgaaagaaaaagctgatgagcagcaggaggcgcaatga

SEQ ID NO: 177914 - DNA, 543 bp, Klebsiella oxytoca
atgacagcagatcagattatcgagggaattctcggcaaagaagggggttatgttaacaacccgaatgataaaggcggccctacgcgctggggtatcacgcagaccaccgcccgcgcgtatggctatagcggcgatatgaaggccttaccacgggatacagccaaagccatttacctgtcgcaatactggaccgaaccgaagtttgaccgagtagctgagttgtcgccagtaattgcacaggaattgtgtgatacaggtgtaaatatggggcctcgcgtagccagtacatacctgcagcgctggttatcagcgctgaatatgcagggcaagctctatccggacctgaagccggacggcgcgatcggcaatatcaccatcgccgccctgaaaagttatctcgctgttcgtggcaaagacggcgaagccacgctgctgaaggcgctgaattgcagccagggggctcgctatcttgagttggccgaagcgaggttagctaacgaagcgtttctatacggctgggttaaagagcgggtgagcctatga

SEQ ID NO: 177915 - DNA, 348 bp, Klebsiella oxytoca
atgaaaatgcccaataacccgagtaactggcctgatttgctggagttgctgcagagctggtggcgcggagatacgccgctgggtgctgtactgctctcagttgtcatggctggccttcgaattgcttatagcggcggaggctggaaaaaaatactgcttgaagggcttctgtgtggagcgctgacgctgacatgcgcatcggcacttgaatacttcgactttccaaaatccctctccatcgccataggcggttgggttgggttcataggcgtggacgccatcagggcgtttgcaatgaaatatctgggcagccgaattggcatcggtggcggcgataacaaggcgtaa

SEQ ID NO: 177916 - DNA, 1053 bp, Klebsiella oxytoca
atgaaaaatactgtaaaaatatccagtgttgaattggtcaacgctgactgcctgcaatttctcccgacagtccctgataactccattgatctaatagttacggatccgccttattttaaggtgaagccgaacggttgggacaaccaatggaaaggggatgaggactatttacgctggcttgattcctgcttggcgcaattctggagggtattaaaaccttccggcagcctgtatctgttttgtggccaccgacttgctgcggatattgagctattggtacgtgagcggttcaatctgcttaaccatatcatctgggctaaaccttctggtcgctggaatgggtgtaacaaagaaagccttcgttcatatttcccggcgactgaacggatcatctttgccgatcattatcaggggccatataagccgaaagatgatgggttctcggcaaaatgcaatgagttaaagcagaatgtgatgacccctttgattatgtatttcaggggggccagagaatcgctgggggtaacatcagcacaaattgcagccgctacgggtaaaaaaaacatggtttcccactggttcgggctgagccagtggcagttgccaaacgaaaccgattatctgaagctgcaggcattgtttcagcaaattgctgaggaaaagcattcacgcaatgagttggaaaagccgcatcaccacctagtggcaacatggcaatcactcaaccggaaatattcagagctccagcaggaatatcagcgcttacgcagaccgttcagtgtttctgcccaggtaccttataccgacgtctggactcataagcccgtccagttctaccccggaaaacatccatgcgaaaaacctgccgatatgctgcagcagatcattactgccagcagccggccaggtgaactgatcgctgactttttcatgggttccggttccacgataaaggaagcgattaaatcaggccgtcgcgccattggtgttgagctggaggcggaaagatacattcagacatctgaagaaatcagaaggttaatagaaatataa

SEQ ID NO: 177917 - DNA, 195 bp, Klebsiella oxytoca
atgctaaatcaaggtgatatgacagaggtagcgcacgcggtttttaatgagttaagcgatgaaccagctacggttggggagattgcacagaacacacatctaacgcgcgaacgttgccagttaattttaacgcagctggtaatggcaggtttatctgattatcaattcggatgttataagcgcctccctgagtag

SEQ ID NO: 177918 - DNA, 699 bp, Klebsiella oxytoca
atgaacctacaaaatctggaatatacccgtattgaagttcgtcgagcgttgttggatttatctggcgccacaaagggacaactcgaggcatttagcgagaacccacctgcagataagaataagaatccgcggcgtactcaccacctggtcgatctggatggggggattggctgtggcccgtcagttgttaaagcactgaccacgactactcatgtgatggagacccgcagccgccgccggccaatgccacccatcaatgatatcgagtttggttattcaccgtggcgccgggctgtgaatctgctggaagaacatcaccaggcctgggtgcgctattgttatggcttcgatcttaacttccggtaccagacactaatgtgccaacacgtctggactgaataccagaactatcaggtaggcaagacgatccaatcgagagtaatcaaaaagctggtggggttggtctggttggccgcccaggaggttgccgcggcccggaacaatgagacatataaagcctacgctggtgcagcgctggcgcgaatggtttccgttgatcgctcaacttggaaaagggtatatgccgggcattgggaacgacttaaaaaggcattcgttgagatggatagcaatgcattgcaggacatctacaggcatcatgaacaaatagaagaggccagaacggaaaaatgtgattaa

SEQ ID NO: 177919 - DNA, 1059 bp, Klebsiella oxytoca
atgagagctctgcttactcctgaagttgtgccgcgtctaggcgtggtactgcttaagcccggaaaggagctgatgcgtcttttccgcagcggtagggtgctggtggagtctgagccaaaaaacatggcagggctggcgactggccgaatccctgacgcgcgccagccgttggctgaagataaggcactggaagccttttttaccagcgagaaagtcatcaatgcggctggaggtctgcaggggcttgagtattggctccggcagaacatccgggaatgccagtatccgcattctgaatatcatcatcatgagcatgtaagcatgcgccatccgccaggcgctatcatgctctgctggcattgtgaaaaccttcttcgtgagcagaccaccgacacactcagtgagttggcgcgccgaaacgttatcaactggataatcgatactgccctgcagaatctgcaactgggccgggagcgggaactatcgctggcggagctatgctggtgggctgtatatgccggtgcagcagacgccatcacagagacaatggcgcagcgtggtctgcgtcttccagctgagccgtttctatctgtgtataaagaaagcgacattgttccttcagtatcagccaccagtgttctgcaggagaaagtgaaacctgcagaagttgcgacgaagtgcaggaataacgaatacctgcagaccgagcagcaggcgaagattctggcattaaaggtggatcctgaatcaccagagtcgttcatgctgcgaccgaagcggcgccgctggacctgcgagcagtacacgcgttgggttaaaacgcaaccctgcgaggggtgccggcgtccggcagacgatccccaccatatcatcgggcatggtatggggggtaccgcaaccaaagcccacgatctcttcgtgttccctctgtgcagagagtgtcacgacgagctacatgccgacgtaaatgcgtttgaagagaaaaacggctcacagctgcagctgctgttccgttttcttgatagagccatagcgttcggcgtgattgtaaaagaataa

SEQ ID NO: 177920 - DNA, 1971 bp, Klebsiella oxytoca
atgcgtgagattattgtagataattttgctggtggtggtggcgcgtccacagggattgagctggcgatagggcgtagcgttgatatcgcgattaaccatgacgaaaacgcgatcgccatgcacaagacgaatcaccctgataccctccattattgtgaatcagtgtttgatgtggatccggtcgcggcgaccggcggtaaccctgtcgctctggcgtggtttagcccagactgcaggcatttctcaaaagcgaagggcgcaaagcctgttaagaaagagattcgcggtctcgcgtggattgtcgtccgctgggcgctggcgaagcgtccgcgcgttgtaatgttggaaaacgtagaagagttcaagacatggggtccattgctggatgatgaggcgcgtccggatccagcgcggacaggggaaacctttgccgcattcgtcggcatgttatctacggggatcccggcagatcacccggcgctggcagaagcctgcgagtttctgtccattcctcccgacagtgagcaggcagcagatcttgttaacggtctcgggtacaacatcgattatcgcgagcttcgcgcctgcgacttcggtgcgccgacgatacgtaagcggttctttatggtgatgcgatgcgactgtgaaactatccgctggccagcgccgactcatggagatccgaaatcacttgaagtgcaaagcggcaaacttgcagcgtggcgcactgcggcagaatgtatcgactggtctatcccgtgccagagtatcttcgaccgtaagaagcctctggcagaaaacaccctgaagcgcattgctcgcggaatcgagcggtttgtgctgaataatccgacacctttcatcgtcaaatgcaatcacaccagcactcgtagttcgtatgactgtttccgtgggcaggatatagatagcccgctgcagaccattaccaaaactcacggatacgccgtagtgacgccacatgtcacaaaatttcgtaccggagccaccgggctggaatgcactgaaccattaccgaccgttaccgcgggaagttcgcagcgcccggggggaaatggtcatgcactagggatagttaaagcaacgttgataccgttcatcgctggcaatggtggcagtgagtatcaggccaaaccacgcgcaatcaacaaaccagcccacaccatcctgaaacaatcccgagcctgtttagtggcaccagttatagcacgtcaattcggtgccagcgtcggccacggagccgacgagccgagtgcaaccattacagcaggaggtggcggtaaatctcaactggtcaccacgtttctggcaaaacacttcggagggaattacaccggccccggcgcagcaatagatacgccaacgcataccgtgacgacaaccgatcaccatgccttagtaactgctcagattgttggagtcggcggacgggccgggcaaagtcgtccccgtgatgtttctgagccattgcagaccctgaccacaaaagctgatgcggcgatggttacgtcacatctcgttcatcttcgcggtacctgcaaagatggtcgtagggttgacgagcctgtgccaacaatcactgccggcggtcagcatgtcggggaagtacgagctttcctgatgaaatattacgggaacgaaaaaagcggtgtatcgctggatgagccgctgggaactgtcaccactaacgatcgttttggtctggtaacagttgagggggttgaatatcagatcgtcgatattggcatgcggatgttacagccgcaagagctgtacagggcgcaaggttttcctacgggttacatcattgatcaagattaccgcggcaaccgctatgcgaaagataagcaggtcgcacgctgcggcaacgccgttccgccgccgttcgcggaagcgctggtaagggcaaacctaccggaaatgtgtattcctgagcagagggaggttgcatga

SEQ ID NO: 177921 - DNA, 480 bp, Klebsiella oxytoca
atgtttattcgtggtcgtattggattcgatctccccacgtggtttgtgccagccgacgaaaagcagaagcccaccagcgcgttctttgcgggtgccattgcagtatttgataagacctggcgcggcgagcactttagttatatcgaccgaacagaactggaagcaaaagggcgcgcaagtatggctttggctgagtttgctgcaggaaaattcctgtcaccagcttcgccagttcaatctcctgaagtgatcatccccgatgctgttgcatcattggctgaggctgaatcccggatctggccactggaagttggtctcgtctttggacaggtacaaggcgcagaggatctggaattctctcagcagaacaagttgaaggcccacattaaccagttgtggctggagcgcatgcccaccagcgagatcatcaccgttgctggtggcctggtagggagtatgcagggggtcgctcatgcgtga

SEQ ID NO: 177922 - DNA, 144 bp, Klebsiella oxytoca
atggccagccacaaacgtgagaaagagatccgccaggccttcgccgaagaagccgccgcgcaggcggagaaaatcaccaaaagcgccgggctgtctgcggaaaccgccgctgatatccgtcgccagattctggggatcgtgtga

SEQ ID NO: 177923 - DNA, 1587 bp, Klebsiella oxytoca
atgggtgaacatctttcagcgccagaaaagttacgtaatcagtccgccagcgccattctggcgggcgagttcgacgcggatcaggtgctgctgccgtatcagcgccggtggattgcggactcgtcccagctcaagattgccgagaaatcccgtcgtaccggcctgacatgggcggaagccgccgaggcggcgctcagcgggtcaatgtcaccggaagccgggggaaccgacaccttctatgtcggcaccactaaagacatggcgcgtgagtttatcgacgcctgcgccatgtgggcgaaggcgtacaatctcgcggcctcagcgattggcgaggaagcgctggaggatgacgacaaggacatactggtttacgtcatcaactttgccagcggcttcaaaatcaaggcgctgtcgtccaatccgtccaacctgcgcggtatgcagggtaacgtcatcatcgacgaagcggcattccagaaagacctcgctgccgtgctgaaagcggcgctggcgctgaccatgtggggctctaaggtccgcttgatctccacccataacggcattgaaaacctgttcaataccatcatcaccgacagccgtgcgggcaaaaaacggtactccgttcaccgtattgatattgcgctggccatcagcgaggggttgtatcgtcgtatctgccaggtgacgaaaaagccgtggtcacccgatgccgaagcggagtggctggcgaatctgctgagcgataccgccactgaagaagacgcccgcgaggaatactactgcgagccgaagaacggcggcggcacctatctggcccgctccatccgcgagcgtgccgcgcggggctccggtcccgttctgcgtttcaccggcacggcagaattcaatgccatgccggaaatcatccgcgcactggatatgcaggagtggctggataaggtggtgctgcctgtgctgaacacgctgccgcagaacctccgccactgtctcggcgaggacttcgcgcggtcgggtcacctgacggtctttgcgccgatgaccgtcaacgacgacaccacgcgtaccgtaccgttccttgtcgagttggccaacgttccctacaagcagcaggagcaggcgctgttctttatctgcgacaggctaccgcgccgcgacggtatcaaactcgatggccgtgggaacggtaactacctggccgaacaggcggcggagaagtacggcgcagaggtggaggtggtcatgccttccgtcgcccactaccgcgagaacatgccgcgcttcaaggctgcgttcgaagacgatgagctggtcctgccgaagcatgaagatgtcatcagcgacctcgggcagattgtcgttcagcgcggggtgcctggaattgatgaccgggagaataccggcagcgatggccacaagcgtcacggcgacagcgcgtatgcgatcttccttgcctttctcgccagcaaagaagactgccagcgctacgaactgcaccggcttaacaaaccccaacagcagcgcaacagcgacagtcgccgccagttgcgcatcacacgtggccttaaaaatcagcgaggactgctttga

SEQ ID NO: 177924 - DNA, 1572 bp, Klebsiella oxytoca
atgctgaagaaactctccggtgcgatccgacgcctgcttaacccggcaaccgatgaaaccgtctccgttaatgaaaccgatatgacccagcccgaagcgcgggccagacgcgccagcgtcaggtcgccctctgcgggcatcagcgtggcgagcaccttatccccggcgagattagccggggtcctgcgcaatgtgaccgagggaaacgcacgggactacttcatccttgcggaagagatggaagagcgtgacctacactacgcaagcgtactgcgtacccgcaagctgaccgtggccggtatccctcctgcagtagaggcggccagcgacgatgagcatgacgtattgctggctgatgctgttcgcgatcttgtcgagcagccgcaaatcccggagctgttatttgacctgctcgatggcctcggtaaaggtgttggggtctgcgaaattctgtggagtacccgtgatggttggatgccgcgtgattatgagtgggttgacccgcggttcctgaaacccgacagcgacacactgcgcgagttccgtttgttgactgacgaacagccggtggacggtattcccctgacgccgggaaaatatgtgctgcattatccccggctgaagtctggtttgcccctgcgaaatggtctggcccgtctggtggcggtgatgtatatgctcaagtccttcaccgtgcgtgactggtgggcgtttgccgagaagtttggtattcccatcgtcgttggtaagtacggtaataatgccaccgatgagcagattaagaccctcatcgatgcgatcgcctccattgcatctgatgcaggctgcgccatcccccaaagtatgcaactggaaatgcaggaaactgccagccgtaacggaggcggcgcactcttcaaagagatggccgagtggtgcgacgcccagaccagcaaggcggtgcttggtcagactatgactaccgatgacggtagctcgcggtctcaggccgacgtgcatgaccgggtgcgcatggatatcgcccgctgggatgcccgccagttggaaaacaccctcaatgagtttctggtacgcccgtttatccagttcaactatgggccgcaggaaaagtacccgcgtgtgaagctggccatcagcgagccggaggacctcaaagcctttgtcgatgcgcttatccccctggtcgatcgtggtctgcgggtgcaggaatcggaggtgcgggacaggttcggtctggccgaaccggagaacggcgcggcggtgctctcaccctctaacagcttctctgccttcagtgccgcaccggcgttaaaccgtgagcaactggcgcttaaccgttcgcaggacgatgagattgacgtgatggccagcgaggcgctgaaggactgggagcagaccggcgatgcgttcaccagtccggtgctgcagctggcgaaagacgcaggcagtttcgaagaatttctggcacgtctgccggacctacagaagacgctggagccagccgcgttcgtcgagcaactggcgatgttgagctttaaggcgcggacgctgggagatgcgaacgatggctga

SEQ ID NO: 177925 - DNA, 435 bp, Klebsiella oxytoca
atggctgagcaactaatgacaaaagccctgtgggaacaggtcgctgatgagctgaaaaatctcttctgccatgttcgcttccggtaccaggatactgtcatctccgtcattcgtgagcgcgatagcgagagtagcactgttttagccgtatattttgatgacaaatggtgcgccggatggggacgagaagaaagcgaggtgtttaatccgctgacgcgccttttctggtgcgaaaagaaaaagcgtcattatccctcaaaaacagtggctgaaattgagagagcgctgggtaagcgacaggcgaaaaaaacatttcccaaactgcatgattcgttcatctatcgtctgccgttcttcaccagttcatcgaccctcgttcgtcagttcaaaaaggcggatggcctgatgcttatcactaagcaggaggatatgtga

SEQ ID NO: 177926 - DNA, 843 bp, Klebsiella oxytoca
atggctaaggctcccgatattatccccaaagaggcgctggcctggctgaagtcgaaaaagctgatgccaggcttcgattaccgtgatgtgtggcggcaggagcacagcatcggtttcaccgtggcgaagatgacgcagctcgacctgctctctgacgtcaaaacgctggtcgaagacgcgatggccagcggccagtcgttcgccgagttccgggaggtgctgaagcccctgctggtgaggcgtggatggtgggggcagcagatgatggatgacccgctgacgggtgagaccagacccgtacagcttggcagcgatcgtcgtctgcgtaccatctacgataccaacatgcgtaccgcccgcagcgccggtcagtgggaccgcatccagcgcaccagacgcgcgatgccctatctgctgtatacgctggggccgtcacgcgagcaccgcgccgagcacctgaaatgggcggacctctgcctgcccgttgacgacccgttctggcagacgcacatcggtcccaacggctggggttgtaaatgcggggttcgccaggtcagtaaatacgagtatgatcaactgcagaaaaatggcgtcccgcgcaacgtgcagcagctcgacgacaacggccagcctaccggtcacgttatccgacagactgtaccggtccgtaccgaagcgccgccagtcaaacgggtgaagtgggttaacaagcgcaccggcgaagaagagatggtgccggaggggattgatccgggctgggactacaatccgggcacgcgccgacaggctgagctggagcgccagctggccgcgaagcaaagcgccttcgacagtgataattaa

SEQ ID NO: 177927 - DNA, 1050 bp, Klebsiella oxytoca
atggaagccggtaaatccggtttcctctcgtttttctccgacactgtccgtcagttacctttaacgacggacagcaccatgtcaaagcctgcaacacaactcgaatttctggccctgtgctttgagcttcccgacctgtcggatgccagcatgccgctgccggaatggttgccgatgatccctgcgggcacattcactggccgggatggccgttcctgggtaaacgacaatccgcaggccttcattgccacgtcctttcgttacccgacgttgccgtttgatgccgagcattccaccgaactgcttggccctaaaggtgaagaagctccggcctatgcctggattgatgccatgcgcgtcaacgctgacggcagcattgacggtcatatcgagtggacgcctgacggcgaagcgctcgttcgcggtaagaagtaccgctattacagcccggctttccgtcatttccctaccggtcaggtctcgcatctgtccagcgctggcctgaccaacaaacccaacctgtatttacccgcacttaactcggagaacaccatgactgtacctgtgcagattgccacggcactgggtctggctgagaccgcgtcggttgacgatgccgtatcagcgatccagaccatcaaaaacagtgaatcgcttgcgctgaaccgtgctcaaaacccggacctgtcgaaatttattccgcaggagacgtaccagttggcgctgaaccgcgctcagacagcagaggaccgcctgaagacgctggatgagaaaacggctaccgcgctggttgacgatgccgtgaccgccgggaaagtcgcgcccgctaaccgcgatatgtatctggccctttgccgtactgaagatggtcgccagaagtttgaagcgttcgtaaaaactgcgcagccattggttaatcaggaccagtccaaaggcaaagagaacaacggtcagcagaccacgcttaacgaaactgagctggcgatgtgccgcagcatgggtatttcgcaggaagagtttctcgccgctaaaccgaaacaggagcaataa

SEQ ID NO: 177928 - DNA, 903 bp, Klebsiella oxytoca
atgccagcaccgtcagctgaaattctgcacgcgctctccacgtccctgagcgccgcctttaccaaaggtcttgcgggcgtcaagtcgcagtacctgcgcatcgctactgaagtgccgagcggctctgcgtccaatacgtatggctggctctcggacctgccgaccatcaaagagtgggtcagcgcccgccagttcgcgcagttgtctcagtacggctacaccatcgccaacaagacctgggaaaactcgatccgcgtcaaacgtgaaaatatcgaagacaaccagattggtcagtacagcgtgattgcgcaggcattcggtcagcaggtcgccgagttcccggatacgctgagcttcccgttgctggttgccggtttcagcaccctgtgctttgacggccagaacttctttgatactgaccatccgatggcgggcggcacctacagcaacgttgtcggcaatatcgcgaccgacaccggcgaaccgtggtttctgattgatgagagccaggtactgaagccgatcctttatcagaaccgccgtcccttcaatttccaggcactggatgacctcagcaatgaccacaccttcaagaacaatgagttcctgtatggcgtggatggccgctgcaacgtcggttttggcttctggcagaccgcctgcgggtcccgcgcaccgttgactgtcgccaactatgaggcggcggtgaaggttctgcaggggatgaagcgtgattccggtaacccgctgggtatccgtccgaccacgctggtcgtcggtccgaacaaccgtgcagccgcgaagaagatcatcgacgcgatgctggtcgatggtggtaattccaacatctattacaaggatgtggaaatcgtcgacagcccgttcatcaccaccccggcgtaa

SEQ ID NO: 177929 - DNA, 630 bp, Klebsiella oxytoca
gtgagtggaacgaaagaaaaaacagcgggtaagcaaagcactaaaggtcgcgctggcaaggtttcagcgcaggaagtggcacaggctgatgcatctgacctgccgggagttgaacggtcagtcacattgccagggcattacgttgcggtgggtgcatcccccatcagtgtaaccctgggtgacgtcgatgaatcgctgacgcctgaaggtctggccgccggtggggggagtgagaatcttatcgtagcaacccagctacagacagaatatctgaataccagtcagggcgaaatgcggtctgcgctaactgcagacgggctggcttcaggtgctgactcatcgcctctcagcatgagcattacacccaatcctgctaccgacgatgttgtggtgctggaggttcgcgcccgctctgagcgtgggttcttccgctgtggccgcttctggccgcgcgagccggtgcatgtgtttgtcagcgacgatcccgatggcgataacgaggccaatgcgctggagggtgatgtggtggtggaatgtttcatcagccacgaaaccgccgaacgcctgaaagctgagcctcatctggtggtggcgatagtgccggttctgcaggtggcggagaaagactga

SEQ ID NO: 177930 - DNA, 441 bp, Klebsiella oxytoca
atgggaatttacgttacccgtgatgacctgctggctgcggacgggtcgctggtctggactatggccatcgacaaagcgactaaccagctcgacgagacgaagatagccacggccatcgaggatgccgacgcggagatcaactcgtttctgtcaaagcgttatcagttgccgctgaacatcaccaccgttccgcgcccgctgcaccgggtagccgtatccatcgccatttactggctgtccgagcgtgacaatcagatcactgacctgattcagaaacgctacgacagcgctatccagaccctgaaagagatggcgaacggcacccgtgacctcggcctgccgaccgacacgccagccccggagaccgataacggcaggatgattgttgtctccgataacaaacgcctgttcacccgtaacaacctcaaaggggtgttgtga

SEQ ID NO: 177931 - DNA, 636 bp, Klebsiella oxytoca; identical to SEQ ID NO: 177200

SEQ ID NO: 177932 - DNA, 699 bp, Klebsiella oxytoca
atgtctttgattgtgtatttagtcgcagctaaaaagtggctaattaaaatagtgagttttggtttaacttttgtcgtactatttgtatcattcaaatatagcctcgcgcgcgtaattgttatttgcgctggcgcggtcatcgcatgtggttatttctttacatccatgtcgctaataaaaaaatactttctgtttttactgacattattgatatgtggtagtgcggttttttttgtttcaccagaatcactcgatttatctaagtatagattatctaatgttgcaagcactgatatgaattcggtctcgtcaggtcgtgtatcacactggattgatgccgtaacattatatgtagaaagtccttttaacattatatttggtgtggggcatcgcatgtcagtgcgttttctggggcatgcagtagaaaacttttttatacaaaaccttcttgattatggcattgtgggaacgattctttttatcatgtttttgtgggttttacttaagcctattataaaggattcgagagcaaagaatgctatttcagttgctattttactagtttttactggcatttttttgcaatggcaatttaatgatattaacacttactatcaaacatacccagctacattgttcttcctgagctggtggagtcagatttgtcgtaaacggaatcctacggataagaatagttaa

SEQ ID NO: 177933 - DNA, 1419 bp, Klebsiella oxytoca
atgattactccagttattatggcaggcggtactggtagtcgtttatggccgatgtccagagaattataccccaaacaatttctgaagttatgtgggtccaactcgatgcttcaagagactattgtcagactggaggggctttctgtaagtaatccagttctaatttgcaatgagcagcatagatttttagctgcagagcaactaagacaaattgattgtttatccgccgatattattctcgagcctgtaggaagaaatacagctcccgcgatagctttagctgccctgcaggccatttcaggaggtaaggatgcgttacttcttattctggcagcagatcatatcattgatgatgtttcctcatttcatcatgctgtaaataaagctattcttcatgcgaaagaaggtcggttagtcacttttggaattgtaccttctggaccagagacgggttacggttatatacaaagaggatctatcgtacacaatcgagagcaagcatataaagttcagcgatttgttgaaaagccagatttaaagaccgctaatgattatgtgatcagtggcgagtattactggaatagcggtatgttcctttttagcgctaaaagatatttagatgaacttgctaaatatcgccctgatattttaaatgcctgcgaagaagctttttcggtagttgaaaaagattctatgcaagattttattcgtattgatgctgaaaaatttaaactttgcccagatgaatccatagattatgctgttatggaaaatactgaggaagctgttgtcatacccctggatgctggctggaacgatgtcggatcatggtctgctctttgggatgtgaatactaagaataacgataataatgcattaattggagatgttttcacatataatgcaaaggactgttatattaacacagatgaaaaactcgttgctgcaataggtgttgaaaacttggtgattgttaatacaaaggatgcgaccttagttattaataaagacaaagtccaggatgttaaaaaagttgttgagtttttgaaacaagataatcggcaggaatataaaattcatcgtgaatcatatcgaccatggggggtgcaggataaagttgttgatactgctcgctatcatgttaataagataaccgttaaacccggtggcaaattttcgttgcaaaagcacattcatcgggctgagcactgggttgttttatctggaactgctgaagttacccttgatgaacaaacctatttgttaactgaaaaccaatcaacgttcatccctgttggaaaaacgcatatgttacataacccaggaaaaatacctcttgtcattcttgagatagtttcaggagcttatttgggggatgatgatatcatccgtttaaaagaccattatggacatttttga

SEQ ID NO: 177934 - DNA, 1377 bp, Klebsiella oxytoca
atgacaaataaactttcttgcttcaaagcatatgatatccgtgggaaactcggtgatgaattaaatgaagatatcgcttatcgcattggtcgcgcatacggtgagtatttaaagccaaaggaaattgtccttgggggagatgttcgtcttaccagcgagagtcttaagcttgccttggcaaatggattacaggatgctggagttgatgtcatcgatattggtcttacagggacagaagaaatttatttcgctactagttatttaggcgttgatggaggtatagaagttactgccagccataatcctatggactataatgggatgaagctagttagagagagctctaagcccattagtggtgatactgggcttcgccatattcaaaagctcgctgaagagaatgcttttgttactgtatcggctgatagtcgcggccgttataaaacgatgtcgattttatctccatatatcgataaaatactatcttatgttgaattaactaatttctcgaaacctcttaagttagtacttaattctggcaatggcgcagcaggtcatgttattgatgcaatagaagagcgatttaaagaaaataatctgcctattgaaattgttaaaattcataataatcctgatggcaattttcctaacggcattccaaaccctttattgcctgaatgtaggcaggatactattgatgctgtcatagcacataaagctgatatgggaattgcatttgacggcgattttgatagatgcttcctttttgacgaaaaaggtaatttcattgaagggtattatattgtaggactcttagctcaagcatttctagaaaaggccccaggatcaaaaatcatccatgatccacgtcttagctggaatacaattgatttggtcgctgagtctggtggtatacctgttatgtcaaaaactggccacgctttcattaaagaaagaatgaggcttgaagatgcaatctatggcggggagatgagtgctcatcattattttcgtgattttgcttattgtgacagtgggatgattccttggttattagtagcagagttaatttgtaacaaaaatcggagtttgagcaatcttgttagcgatagaatgaaggcatacccagcatctggtgaaattaatagttcacttgctgaccccaaaacggctattgaacgtgtattagaaaaatataaagctgatgcagtaagtactgattacactgatgggataagtgtcgagtatccgaattggcggttcaatctacgcagttccaatactgaaccagtagtacgtttaaatgttgagtcaagaggtaatcaggatttaatggttgagaagaccaatgagattctggctcttttgagatcttaa

SEQ ID NO: 177935 - DNA, 1143 bp, Klebsiella oxytoca
atgtcggctgagattaatatcggtattgtagctgattggctagttacatatgcaggttctgaaaaagttattaaagaatttattgatgtattcccttctgcagaattatattcggtggttgattttttatctgattcgaatagagaattattggcgggaaagaatgcacatactacttttattcaaaatatgcctttcgcaaaatccaaataccagaaatatttgcctttaatgcctttggctattgaacaattggatatgtctgggcatgatgtcgttctatcaagcagtcatgctgttgctaaaggtgtcctgacggggccagaccaattacatattagttatgtccactcgccaatacgatatgcttgggatctccagcatcaatatttacgagaatcgggtctatctaaaggattaaagggacttattgcaaaatatttattgcacaaaatcaggctttgggattatcgtacagcaaacggtgttgatcactttatagctaattcaaagttcatatccagacgtattcataaggtttatggccgttcatcagatgttatatatccacctgtagatgtaaaaaatttcacattaaatgaaaataaagaagactattattttactgcatcaagacttgtaccttataaaagaattgatctgatcgttgatgctttcaatgagatgccggataaaaagttagttgtaataggcgatggatctgaaatggataagattaaatccaaagctgaaaagaacatagaaatcttaggctatcaaccaaacaatatcatgcaagagcatatgaaaaatgctaaggcttttgtttttgccgccgaagaggatttcggtataacccctgtggaagctcaagcatgcggaaccccggtcattgcttttggtaaaggaggtgtccttgaaactatcaattcgattgataatataaaaccgactggaattttctttgatgaacaaaatcctaagagcattattgaaagtgtaaagaaatttgaaagtttacaaggtatttttgaaccagtcgaatgtagacgcaatgcggaaaaattttctgaagagagatttagaaatgaaatcaatgcatatgtccgtgataaatgggctatatttaataactctaaatag

SEQ ID NO: 177936 - DNA, 1086 bp, Klebsiella oxytoca
atgcctacatcattaagtagaaaagcttgttaccttttgttactgttgacttcatgccatatgactgctgtttgggcatttgagtttggtattggaactcatattgcaaactacaaggaaagtggtgatttttatattcaaaaaataaagtcgtatggtttcaactcaattcgagatgagctttactggaatgatgtggagaaagaaaatggagtctttaccatccctcctgatcgtgttaaaacggatcagtattttcagaacctacaatctagcaatgtaagttcattattagttctcgattatggtaataatattcataccaagggtggatttccatcaaacactcaacagatagctcagtttgcttcttatgcttcttggattgctaatcgttataaagggaaggtgaaatactatgaggtttggaatgagtggtatctcggaacaggtattagttcttggtttcaaaaaaaagctaaacctgacgatactatctattttgaattgattaaagcaacatcggaagcaattaagcgtgtagatcctgatgctaaagtcttagctggtagttttaatcctttaaaaaaaccagagattgaatggttcgataattatatcgatatgggagttttaaaatatatagacggtgtttcggtgcacccatattcttatggtaataaggatgtaaaattaagaactcctgaaggaaatatatttgcaatcgatcattatgaacagcatttaaaaaataagactggcaaaaatgtgaatatatatattacggagtttggttatcctacaaatcctactagtggaggagtagatcctaagttggctgcgcaatatatgataaaatatacgttcttggctaaacaaagagattatatcaaagggatttggtggtacaccttgatgaatagtgcagataatgcctcgaacagagagtctaatttcggaatattaatgcataatgaatctgaaaagccttcagctaaatgccttaggcaaaatgaactactcattgctggagctttaaccaataaaaacaatgcttcttctccaattaactgcagtggtcagtaa

SEQ ID NO: 177937 - DNA, 1254 bp, Klebsiella oxytoca; identical to SEQ ID NO: 118524

SEQ ID NO: 177938 - DNA, 3075 bp, Klebsiella oxytoca
atgacaatgattacggattcactggccgtcgtattacaacgtcgtgactgggaaaaccctggcgttacccaacttaatcgccttgcggcacatccccctttcgccagctggcgtaatagcgaagaggctcgcaccgatcgcccttcccaagagtcgcgcagcctgaatggtgaatggcgctttgcctggtttccggcaccagaagcggtaccagaaagctggctggagcgcgatcttcctgacgccgatactgtcatcgtcccctcaaactggcagatgcacggttacgatgcgcctatctacaccaacgtgacctatcccattgcggtcaatccgccgtatgttcccacggagaatccgacgggttgttactcgctcacatttaatgttgatgaaagctggctacaggaaggccagacgcgaattatttttgatggtgttaactcggcgtttcatttgtggtgcaacgggcgctgggtcggttacggacaggacagtcgtttgccgtctgaatttgacctgagcgcatttttacacgccggagaaaaccgcctcgcggtgatggtgctgcgctggagtgacggcagttatctggaagatcaggatatgtggcggatgagcggcattttccgtgacgtctcgttgctgcataaaccgagcacgcaaatcagcgatttccatgtagccactcactttaatgatgatttcagccgcgctgtactggaggcagacgttcagatgtacggcaagctgcgcgatgagctgcgggtgacggtttctttgtggcagggtgaaacgcaggtcgccagcggcaccgcgcctttcggcggtgaaattatcgatgagcgtggtggttatgccgatcacgtcaccctacgtctgaacgtcgaaaacccgaaactgtggagcgccgaaatcccgaatctctatcgtgcggtggttgaactgcacaccgccgacggcacgctgattgaagcagaagcctgcgatgtcggtttccgcgaggtgcggattgaaaatggtctgctgctgctgaacggcaagccgttgctgattcgcggcgttaaccgtcacgagcatcatcctctgcatggtcaggtcatggatgagcagacgatggtgcaggatatcctgctcatgaagcagaacaactttaacgccgtgcgctgttcgcattatccgaaccatccgctgtggtacacgctgtgcgaccactacggcctgtatgtggtggatgaagccaacattgaaacccacggcatggtgccaatgaatcgtctgaccgatgatccgcgctggctacccgcgatgagcgaacgcgtaacgcgaatggtgcagcgcgatcgtaatcacccgagtgtgatcatctggtcgctggggaatgaatcaggccacggcgctaatcacgacgcactctatcgctggatcaaatctgtcgatccttcccgcccggtacagtatgaaggcggcggagccgacaccttcgcaaccgatattatttgcccgatgtacgcgcgcgtggatgaagaccagcccttcccggctgtgccgaaatggtccatcaaaaaatggctttcgttgcctggagagacgcgcccgctgatcctttgcgaatacgcccacgcgatgggtaacagtcttggcggcttcgctaaatactggcaggcgtttcgtcagtacccccgtttacagggcggcttcgtctgggactgggtggatcagtcgctgattaaatatgatgaaaatggcaatccgtggtcggcttacggcggtgattttggcgatacgccgaatgatcgccagttctgcatgaacggtctggtctttgccgaccgcacgccgcatccggcgctgacggaagcaaaacaccagcagcagtttttccagttcagtttatccgggcgaaccatcgaagtgaccagcgaatacctgttccgtcatagcgataacgagctcctgcactggatggtggcgctggatggcaagccgctggcaagcggtgaagtgcctctggatgtcgctccacaaggtaaacagttgattgaactgcctggactaccgcagccgaagagcgccggacaactctggctaacggttcacgtagtgcaaccgaacgcgaccacatggtcagcagccggacacatcagcgcctggcagcagtggcgtctggcggaaaacctcagcgtgacactcccctccgcgccccacgccatcccgcaactgaccaccagcgaaacggatttttgcatcgagctggataataagcgttggcaatttaaccgccagtcaggctttctttcacagatgtggattggcgataaaaaacaactgctgacgccgctgcgcgatcagttcacccgcgcaccgctggataacgacattggcgtaagtgaagcgacccgcattgaccctaacgcctgggtcgaacgctggaaggcggcgggccattaccaggccgaagcagcgttgttgcagtgcacggcagatacgcttgccgaggcggtgctgattaccacggtccacgcgtggcagcatcaggggaaaaccttatttatcagccggaaaacctaccggattgatggaagtggtcaaatggcgattaccgttggtgttgaagtggcgagcaatacgccacatccggcgcggattggcctgacctgccagctggcgcaggtagcagagcgggtaaactggctcggattagggccgcaagaaaactatcccgaccgccttactgcggcctgttttgaccgctgggatctgccattgtcagacatgtataccccgtacgtcttcccgagcgaaaacggtctgcgctgcgggacgcgcgaattgaattatggcccacaccagtggcgcggcgacttccagttcaacatcagccgctacagtcaacagcaactgatggaaaccagccatcgccatctgctgcacgcggaagaaggcacatggctgaatatcgacggtttccatatggggattggtggcgacgactcctggagcccgtcagtgtcggcggaattccaccttagcgccggtagctaccattaccagttgctctggtgtcaaaaataa

SEQ ID NO: 177939 - DNA, 1149 bp, Klebsiella oxytoca
atggcgcaaaacatttcgtggtatggcatgatagcacccgaagagagtcaattcagggtggtaaatgtgaaaccagtaacgctatacgatgtcgcagagtatgccggtgtctcttatcagaccgtttcccgcgtggtgaaccaggccagccacgtctctgcgaaaacgcgggaaaaggtggaagcggcgatggcgcagctgaactacattcccaaccgcgtggcacaacaactggcggggaaacagtcgttgctgattggcgttgctacctccagtctggccctgcacgcgccgtcgcaaattgtcgcggcgattaaatctcgcgccgatcaactgggtgccagcgtggtggtgtcgatggtagaacgaagcggcgtcgaagcctgtaaagcggcggtgcacaatcttctcgcgcaacgcgtcagtgggctgatcattaactatccgctggatgaccaggatgccattgctgtggaagctgcctgcgctaatgttccggcgttatttcttgatgtctctgaccagactcccatcaacagtattattttctcccatgaagacggtacgcgactgggcgtggagcatctggtcgcattgggtcaccagcaaatcgcgctgttagcgggcccattaagttctgtctcggcgcgtctgcgtctggcgggctggcataaatatctcactcgcaatcaaattcatccgatagcggaacgggaaggcgactggagtgccatgtccggttttcaacaaaccatgcaaatgctaaatgagggcatcgttcccactgcgatgctggttgccaacgatcagatggcgctgggcgcaatgcgcgccattaccgagtccgggttgcgcgttggtgcggatatctcggtagtgggatacgacgataccgaagacagctcgtgttatatcccgccgttaaccaccatcaaacaggattttcgcctgctggggcaaaccagcgtggaccgcttgctgaaactctctcagggccaggcgctgaagagcaatcagctgttgcccgtctcactggtgaaaagaaaaaccaccctaccgcccaatacgcaaaccacctctctccgcacgttggcagattccttaatgcagctggcacgacaagtttcccgacttgaaagcgggcagtga

SEQ ID NO: 177940 - DNA, 828 bp, Klebsiella oxytoca
atgggatacgacgcttccggtgttgttgaagcaaccggaccagatgtgacgctgttcaggccaggtgaccacgttttctatgccggtgtgctcgatcgccagggagccaacgcagagtttcagctggttgacgaacgcattacggggataaagccggcagcactaagttttgaagctgcagcgtcggttcttctgaccggtctgacagcctgggaaatgttatttgatcgtctgcagttgtcagtgaacggagatgctgatcagaccctgttgatgcttggcggtgcgggcggagtcccttgtatggctatacagcttgcccgcactctgagtcgggtgaacatcatcgggactgcctcccggcaggagagtgtcagagcggttcgcgggtttggtgcgcattatgtcctggatcattcatgtgcgcttgcgccacaggttgccagccttgctggactccctcccattacccggattttctcaacgtacaccacgccatctgcctgggaaaatatggccgaaattattgccccacaaggccgtatcggactcatcgacgaccctgaaccactggatctgcgtttgatcaaatttaagagcgtttctgttcactgggaggcaatgtttacccgccccatgcatgctactgcggacatgtctaaacagcatgatattcttaataaactctcatgcatgctggattccggtaagctcaaacctccgttgctggcagagtatggcaggctgaatgctaaagcacttcgccgggctcatgaggacatggaaaataaaaatgtgaacgggaaaattgttttttcagggttctga

SEQ ID NO: 177941 - DNA, 915 bp, Klebsiella oxytoca
atgcttgtacttaattctaactctgcatataccggcgataaaaaagatttacccggttactggcctacttttggatatactcctacagtggctctgtcgttgcggcagctttcagcatcctacaccgggcctgcaattcgtgtacgtcgctcgagtgataacacagagattaatattggatttactgccgaaggcgacctggacacgacggctctgcttaatttttgcggttcaggcaacggatttatcagtgtctggtacgatcaatcgggtaatgagtttaatgctatccgcgaaaatgtgtccggacagccacggatagtttcggcaggcgctgttgatctgattggttctaagccaggcgtggtattcgacggaacaagtgatgccctctctttaacggctgctgtttctgcgttatctggagtagcaagtttgtcctcatctcttgttctgcgttttcgatcttcgcccgcagcggcctgtagtattttctcattttataaatcagacagccccgttcgtcgtcgatacaacctgggcgccggatttcagagtcaggcgaaaaaccttctacagataatttcgacgcaggcagattcgggtaacgctgagatcgtgacagaaactaccccgtttacagcaaatacaaatattattgttcgctcctacatcgactttaaaactcatttgcagggcatcgctctggacagcggaggatgggttaccggcgccgtgtctggtgatgtcacaggaatatctgattccgctgtactgggtggcgggccgtgggtaagcggggcgccaagcgagctttcttacgtgactatcggcgaatttattctcgttgattcaaaaagtgattatttcctcagaaacatcacggctaatcagcagaaatactttactaattaa

SEQ ID NO: 177942 - DNA, 1401 bp, Klebsiella oxytoca
atggcaactcaaatcaagagcaataaaacttatcagggcgatgctgccgcacttccttccccgcaggccccgatgccgaaactggccagcctttacctggactttgagaaagagctttatattgccctcggcagaacaacgggtaatgccattcgctcccgccgtctggctgacgtggtaacctttactcgcgcatcagaaactacccgcgttaacaaaagcggcctgatagagtatcttgcgtccggtgaagctgcgatcgaatatgatccgattactggtgagtgcctggggcttcgcgttgctgcaggggtaactaaccttgcggccaacagtgaaaacttttctggcacgacctggacaaaatcgggcgtgtccaccacggccaccaaaacaatcgcacctgatggtaacgtctctgcatcacccttcaatgaaagcactgacagcgctgatactgtgcactttatgcaggaaaattccactccggccgccaccgtgggaagtcctgtcacattcagtatttttgcgaaagcgaataccgcgagtgttatccagctggtcgctcagggtgcagtaacaacgacgcagtttgcaaacttcgatttggtcaacggcttgagaacccgtagctcgtccggcatcctgcagacaagcatgcggaaatataaaaatggctggtaccgtctgagtatcaccattacccctgcgggcacagcctccccgcagttcacactggcgcttgtgaatgacgtgacatcagccgctgcgttgccagcctatacaggttcagggaagggtgtttacatctggggggcgcagattgaaaactgggatggtgttacgccatacatcacgacagctggcgcaactgtgacccggcctgatgaggtctgcaccgttcgtaccgatcttgattttattgctgctgaccgcggggcaatttttgctgattacaatatgcccgccagcctgcaggcgatgagtggtgtctataacgccgggcaggcaattgtctgtcttgataatgacagtgtcgctgaatatgtcagttttctgaaccgccgcatcagtaacagtatcaccaaccagaacctggcggccgccgcgaaaattgtcggcagttctgaagttacggttgaagtaaaacgtctcggccaggtacgaaacggccatcagtcctttatcagttcatttatcaacggcgatatgcgtgtatttgacggcatcaataaatacagcggtgcgccgcttgtatcaactcagctgaaccgcttaatgattgggcgggccagaacgacccctggcgctgtttcaaacacttatctcaagcgcctggtttattacccggtcacgttagctgatgctgatttagtgtctcagtttaatgcattgtcgtag

SEQ ID NO: 177943 - DNA, 2133 bp, Klebsiella oxytoca
atggcctttaatccgccgttggggagcacgtctcccgaggtgttggtcggtaatgccaaacgtctcgatgaactggtgaacggccccgccgccgacgttcccgatcgtggtggggatcctctggactcctggcgtttgataatggaacaaaaccagacacgcgtagagcaactggacgatatcattacctctcttgatactgcgagcttcacttttccggacgaacccgcaggcatcgctggcacgactgatggtcagtatttccgcgttcctcagggggaaggtaacgttgtcggatttaattattataaaaacagtgcaggtatggcagtcattgttgcatcagttgcatctgcagaaattactaaattgctgggcatgaccgatgattctggtctcgtacggacagtttcatctgatggaaagattacggaagtaaaaacagagaccggtgataattatctggcggggatggacgaaagcattcaggagatggcgtcgcgtagcgggaaggataactctaggaaccttcattcagctacggataaagacggtcttcagctcgttatcaccgatgccgaagggaaaatccgtatccctcttactaattttacgctgcaggatctgctggctcaggttcagcctgttcccgggccgtttctcaatacgctgagtgcggccgataaggcggcatatggctatattgatgagctgggcggactcaaccttccggggattccgacatccgtcaacaatatgctgaacagtctttcccggcgcgtgcagcagcaggcagatagccggtttctcaccagcatcaaggattacggttgggatccgagtagccaggaggatgcgcgacaggttatccagcgcgcaatcagggatatggcccgcaacacttacggtggggtcatttatctcccaccgggtatttaccggttgagctccttcctcacgcccgcgccgaacgtatcgattattggcgccggtaccggcaaaacactcctgatgccgtatggctcatattcggcgctccagttcaccacctcgccgacgaatcccgtcccggaattgaccgattttgtgtattccgattttgaggtggattgtcaggaccaggtattgccggatgagggctatttgcctcgcactaaaggcttgtacttcaacttttaccggcgcggccacctgcaccgcctgcgggtgagaaactctggcgctacggggatcggcatcgactttgcgcgcgattccgccattactggatgtgttgtggagaatttcggtcggctggcaccgtcgggtaacgataaccctgcgggggcatctggtctcggattaggggctggtggtacgcagagcgagccgctgtatgtcgcagggaacttctgccgcaacgggaagaacttcggcatcttccttgagaaacagcatggaacaaatgcgccttacagctctgaacacacgatagtcaccggcaacacatgtacagggaataatgctggcctgggtgattgtggtgttgatggcatgatcgctaccaataacaacttctcagaaaataattatggcgtgattatcagtccgggaactgtgctggcatatcccggttcgcgcgggcgtctgcagtgcaatattatcgccaaaaatgctaaacatggcgtctattacaacagcacgactgagcagcgagacggcgaataccagattgacagcaataccatccgtgataatggcgaagatgggattaacctcaaagcgccaggccaggaagtccgcagcatgtttatccaggggaatgacgtttatcgaaacggacggcatggtctgaacctggaagacgggacggcgatcaatatggatgtggtaaacaaccgcttctggaataacggcctgaccgcttccgggaacggaattaatctggcctcagaagttaagatcagctcgttcagcgcaaataaaattcgcgacatccagtctacgcctactcagcaatatcctgtttatgccagcggtacgcttaccgatgtcgatatttcatttaaccactgcgtgggtaacgcgcagaacacactaaatctgaccggcacgcaaacccgcgtcaccactctgaacaatccaggaatctga

SEQ ID NO: 177944 - DNA, 783 bp, Klebsiella oxytoca
gtgctttccggttatcacctgaacgatatccacggcttagcctgcccgaccgccctactaccacaagacaccaacgttgaaagtctggagcgttttgctcttgagcgcttccgtttccgaggtgccatggacacaaccagcattgacgatttcgttcgctattccgttggttatgcccgggaagacgaaaaagcccgttgcttcatcgatgccgataacatgctggcgcgctccatcttcaacattggtacgcttgataatcccggccacgctgataacgtcgcttcgatcaaactgaagaaaaccgcacctttccgcgcgctgctgtcgatcaacggcgatcacctcaatcagaagcaaatcgccgaatggctagaagactggagcgattaccttattgccttcgatgccgacggcaacacgatgaaaatcgcccaagcagcacaggcagttcgccgcgtcaccattcagcaaactaacgcctccgatcatgaggatggtgatttcagtggcaaaaaatcgctgatgcagagtatcgaagccagcagtaaagacgtgatgccggtagcgttcgagttcaaatgtgtgccgtatgaaggactcggcgaacgagcattcagcctgcgcaatagtctgctgaaaagttctgacccggtattcgtcctgcgtatcgtccagctggaagcccaggaagaagctatcgctaatgagttccgcgatctgctgactggtaagttcgacggcaagccagtggaaacctttatcggcaacttcaaagcctga

SEQ ID NO: 177945 - DNA, 528 bp, Klebsiella oxytoca
atgggctttattcaaacactgtctggcaagcactttaactataacgatattcaagaggacgctatcgtcattgaggacattgcaacagccctctcacacatctgccgctttgccggccatctgccggagttctacagcgtcgggcagcatagcgttctggttagccacctggtgccgcaggagttcgcactcgaggctttactgcatgacgctgcagaggcttatatgcaagacatccctgcgccgctcaagcgattactgcccgactaccaggttatagaaacacgtgttgatgcggcgatccgcaaaaagtttggtctgccggcagagcagcaccctaccgttaaatatgccgacttagtcatgctggccagcgaacgccgtgatttcgagatcgacgacggcacgcactggcctatgctcgatggaattattcctaccgaccaattcgttattaacccggtccgccctgggcagtcttacggcatgttcatgaaccgctttaaccagctgatggagcggagctaa

SEQ ID NO: 177946 - DNA, 198 bp, Klebsiella oxytoca
atggcacacgtaaaagtaaaagacctcgttgcggcagcttatgccgcatcacagggtttgccaccagcagaggcaaaactgatgcgtgacgtcgctacccgtctggatgtgacttatgtcgcgctgactgaatcgatggatatcaataccgcgctgtccgccgatattgccaagcttcgcgaggttagcaatggctga

SEQ ID NO: 177947 - DNA, 570 bp, Klebsiella oxytoca
gtgaaccatttaatgatcgacctcgaaactatgggcaataagcctactgcgccaattgtcgcgatcggcgctgtgttcttcgacccgaaaaacggtgagctgggagccgagttctatgtgcccgtcgacctcactagcgccatgggtcagggggcaactcctgacggtgacacaattctgtggtggctgaagcaatcagctgaggccagggccgcgatttgcaccgacgacactcatcacatcgatgaggcactttatgcactgagtgacttcatcagtcgcaactctgaaaacccgcgttatcttaaagtctggggcaacggtgccaacttcgataatgtcattctgcgaactgcgtatgaacgagcgggctgtatatgcccttggcagttctggaatgatagcgacgtgcgcaccatggtgctgcttggtcgccagttgggtttcgatccaaagcgcgatatgccgttcgatggtgtggctcacaatgcgctggctgatgctcgccaccaggtgaaatatgtgtcagcaatttggcaacgcctgctacctagcagcaccgaagaataa

SEQ ID NO: 177948 - DNA, 210 bp, Klebsiella oxytoca
atggcaaaacttatgaaggcgagtcaatggggcaaacgcgaatttgctaaagactctattccggataaccgaaccattaaacgttgggttgaaaatgggctactcactgggaagatcgtcgacggttctgttttcgtcttcgagtctgaaaaatggggagtcgactcaatggttaatcatacggttcgacagctaataaatgaaggttga

SEQ ID NO: 177949 - DNA, 1179 bp, Klebsiella oxytoca
atggcagccagaccaagaaaaagagaatatcgccaccttccagaatatcttttatttgataaagatcgcggtgtttataaatttactcttataacaggaaagaaaaagaaccttggtaaagatcgagctatggcgattgctgtagctcgcgaatacaacctaagaatgagaccattaaacgtaccatctgttgatgtattaattagggaatcaggtggtatcgctggtgaggccaaaccatttgctgaatatgtagaccatattatgaaccgagcaattgagaatgagcggccatcacaaaataccctcgacgattggaataatgatgccattcgtgtgaaagaattttttatcaacattcccgcttgcgatattgaactggagcatgtaaacgcctacataaaccattatcatgctgaagcttcagcaaacgtacagaataggaaagtcagcttccttaaaaaacttttctcctatgcggtcgatgaatcattaatgtttgataacccggccacacgtaaaaagatgcgcaggactgaggagaagaaacgacagcgcctgtcactcgaacactttaaagccatcagacgcgccgccgaaccatggctacgtactgcgatggatttagcattgcagacgacacacgctcgactcgaagtgtcacgaatccgatattcaatcagtgagccaaaagatggcgtctgcgggtgcgtatggctggcacagccggaaaatgggatttatggcacgctgtacatccaccgccagaaagtacagaagaaagaggcctcgcatgttgcaatcccgatcggggaagaattgaaacggattattgacgaaagccgcgataatgtggccagcccgtttgtcgttcatcggattcctgagcggcaggttaaacgtagtaaagaggtttcacacccgacacaggttgcgccggattatctgagtcggtccttttccgctgtgcgcgacaaactaggtttatgcgacaaactggcgatggacgaaagaccaacctttcacgaaatccgagcgctggccgcccatcttttcgatcagcaaggtatcgatcctcaaggccgaatggcgcacagcgatgcaaagtcgaccaagatttatacacaaaaccatattgattgggttgtcgtcccacatggagaaattaaaacaggatga

SEQ ID NO: 177950 - DNA, 1281 bp, Klebsiella oxytoca
atgcgtaacagtttctcaggattctatggcatcagtgaagattctataggcacagtgtttacttcagacaatacgatattcatttttgatgcaaacatactccttactctttataggtgcgaggaggaaactcgtaaccgtttttttgaaatctggggaaatatcaaagaaaaatgctggtttcctcatcaagtatgtctcgaatatcaacgtaaccgtcttaaagtggtcaaggacagtcgcgatgcattggataaaataccaaagaaaataaataattcgattagtgagctaaaaactcaaatttttgatggtgaacataaccaaactatctctcgatattcaaatttaaaaggcgagcttgacgctctttttaatcaagtagttaatatcataaatgatttttctgaaagccatattaatgtcagaaagaataacatcgactatttaaataatcatgatgttattcgtgataaaattgatgagcttacggaaggtcgcataggcgccgctcctcaacaacaaagtatcatagacaatcttaataaaatcgggaaaataaggtataagtacaaaactggacccggctttgatgatagtgcaagtaaaaaagataatttctactcatatgacggaattaattacgacgctgaatacggagattattatgtttggagtcagattcttgaatatattagcggcaagccaggtagcaatgttgtttacgtttcaaatgatgcgaaatcagacttttactataagatagaaggtaaaattcgtggtcctaatgaatctcttcgcaccgaaataaaaaaacaaggtgcagcagagtttctacttcaaaatattgatacattccttcatcatgccaatactcatctgggggcggaagttgaagagtcagttataaatgagctggctaatgctagtaatgcgaatgaaagacattttcatgcaagagactatgagcctgttgattcccttatagaatattataattatattaatgataaaataagtagtgaggaactatctgattcttctcgtgatttatatttaaacgcgcaaaaagaaatgatgcaaatcagaagtgagcttgcttcattgagggctatagatagtgatagcttaagcgaaatagaacgttttaaacatcttgagaaaatgaggtataatgaaaccgctctgaggaagtatcgacgaaaattttcatctctattagagtatatagcttatgaacagaaaaaagcggatgttgctcagcttcgtgaaaataagtga

SEQ ID NO: 177951 - DNA, 540 bp, Klebsiella oxytoca
ttgattaaattctgtctgaggaaattatcagctagagtctggcgaatacagttgatatcagtaaaattacctggggagaaactaccatctaactcattgatgtatataacgctgattttgtctaaaaagcactgtttgtttatacatgcaaacaccccacaccaccagcaatggcgcggctttcagcattttgaaagcggtgtcatggggtgtcgggggtcggaggttcaaatcctctcgtgccgaccaaataatcccagtaaaaccagccttttaaggctggtttttttatgcctgtttttcgagcggggtgaaattggggtgtttcgttcagcgcagaggcttacagatactgccgccgtttcagatagcgaacaagccccctgctaccggacatacattcgtggcatcgcgctccgggcatctgctgaaagattttcgacatatcaagccgatcgtttcccgtcaggatgtaaatgcagtgacgcgccagttgagagaatgcgctgcacgttgtccagtatcggcagacctggctga

SEQ ID NO: 177952 - DNA, 1434 bp, Klebsiella oxytoca
atgggctggtcattaccagaggttcccgcgaggcctgatgcacaaccctggtcaccctggatatgcctgtcaattactttcgccggtgtatttatcgcgttagtgcgggtggtactgtattcaccctccggtgatttaccaacgcttgcaagcggttactggctaccactgaccggatatactttggtgggtgttactgttgccgtaaccttttatttgttatggtgggaaatacagactttccgcgtccgtaactggaataactggcgacgaaatatgcatctggcatggcggcatcaagcacacctgcatttatgcgtgaccagatgtgtggtattaaccgcagacccacaattgctttctcgactggcgggtgttatgcctgaaaacagtgacgaaactcctttattaacattgcttcctgaggaaaatttaattcctggtatttcacgctttgaacaactttgtcgtttgttaataaaccagattaaaacaatacttttccagtcctgtccttcaggtccgttaacggtggtaatacagacatctgctcctgataaagaacaggagctccagtatttttcccttctctgggaagatgaagaattaccatggatgccagatattcatgccttacccagttcgtcaatttttaataactggaataaattcctgtctactgctcgttatccactactggtgctggcgctgcattaccgccagccagaagaaaacttaccggaatttgcctgtgcgttgctgctgttgcccgatgcgatgctgaaatcgtcagaacagcgcgatgcggtgcgagtatttcgcgccatgccgctgaatactgatgcattgccccgtgaattgacggaattacgtgatatggcgcagcagcctcccggggtaaaacatctggtctggcacagtgggttatctgcgccgtccgcgcaggcgctggggcgggtggttaatgagttacctttgcccctgcagactgatatcgccgccggtggtattgtcgattttgcgaaaatcagcgctaactacgggcctctggccggatggctgatggtggctgcggcagcagagatggtcagttacggtccggggagccactggctgctacaggcggatggcaaacaggccagtgcgatggttgtcggcaacagtctgccggttacccatgatgaagatgtaagattggctccgttaccttatccggctgggtcgctcagccttgcggtattgctcaatattgcggtttttggagcaactgcccgttttttcccggactggctgttttcctggtacggcgtgttcagcgtgctgctgtcgctggccgtgtctctgcccggcgctgttttcctgctgcgccgtgccctcactgctctgcaacgcccccattttattcaggcagccggacttgcccgcaaggaataa

SEQ ID NO: 177953 - DNA, 165 bp, Klebsiella oxytoca
atgttgctgaatgaccaggtgtattgcccggagcacggcgctaacccgatagtggaatgtgatatgagttatgaggaaaacggcaggggaatcgtggtgcatggctgtaagagtgcctgtggttctgtggtctacgctagtttgccggatgtggagataggttga

SEQ ID NO: 177954 - DNA, 1941 bp, Klebsiella oxytoca
atgaataataaatcctcaccaaccagaaaagtagaggtgcatacaaccgataatggcacgccattttcctactcaatgacttcccataaaaatataaaagtgaaagcggaagttcaaccgccattgcagttgcctggattaattatattcgtacatggagttaattcagaaggcgaatggtataaagaggctgaagtatcattatgtaatggtttgaataatcgacttgggttatctgacaaagatactgtacatcaattgcaagctaacgaatacgcagatgctcactggaacaaagatggcaccaaatggattgttcctgccaggaaaattatcaaagaaaaccgctccccagttatccgcttctactggggttatcgtgctgctaataacgaaaccgatagatacgccattccgttaaaaaacaagaaaggtgataattactatgatctttctcccgaagagcgcaaaacgaaaggcccatggttctggggcggcgggccgttccagaacggctgtaatcaattggtcagcctgtggagtgagaagggatttgacaactggccgaatgtgctgggtatgccgatccccttcagcactcaattgattaatggtgagcgtgatcgcctgctgaccgcggcgccgccgcgccactattatgcgcacgccgccgggcgtctggcggacctgataaaaaccatccgcagtaaatatcctgaagacacagttacggtgctgtcacacagccaggggacaatggttgcgctggcggcagcagccattgaggcaccggatgcgctgttcgtcatgaattcaccttatgcgctggaaaacgaactcaccacctatatttcctatccggtgaaagagatcatcagtagggaagcccgggaggctacgtttgccgatatcgttagaaaggttgcggaaaacaaaacccgccttgcgcagcagggctacgatcgcctgttggcaggcgtcagcagcgatggcgaaagctggacgccggaagggaaaacccacgctggactgccggagcgcgataaccacggtaccacgtggatttactgtaatccgcatgaccgggtgatgggctcggctccgctgcgaagtattggctggcaggggttacctaatacaaaagaaagtgattatagtgaatcccattctttatttaagctggcaggcgacacactttatgtccgtatgctggggcgtaatacaccgtgtggaaatgcaccggatacacaaacccatttcagtaatcttggggatggtaagccattctgggacagtacgaccacggtgcttcagaagatgacctggctggaaccagacaaaggacaaatgctgacggttaatgcgccgcaggtaccagaaccactgacttctgaggaactgaaaaattttgaccaggattatgccagcactgaaaagcaaactggctcaataggatacggctacggacagattaacccgacgacgaaaagacccgttgacatagactaccgttattacatttcactatacggttattttgaccagaagatggtgcctaaaacaccttcctcctggtatcaacctgggccgggatcgaaagaggatcgggtgaaatatgaaaaacagtcgagaactgaaatgctggaagatataaggacctatgttcagcgcccgaccgatcacagtaccctgccaatgaatgaacattttatgagtcgagttgtggcctatgatctaccgctagggtattgctggcattcatgggatcgggcaagcctggcagaattgcgcaggcaggcggactggttggaaagtgatgattattatttcacaggcgaactgaataagccggatattcccccggcaatccggcaggatgtggcagaagatgcggtgaagagaaaggccgaagaaatagcccgatgtatcgggaagaaatga

SEQ ID NO: 177955 - DNA, 774 bp, Klebsiella oxytoca
atgataaataaattaatcgtattatttttggaactagtgttgttaagctgttctcttttttcattaagcggttgcgttactgaaggggccgcattcggtctgggggcagggagcctgcatgaaacggtaatgacagaaaaagacaaaaatgcaccgtcaccggtatatggtctgccgcaggtgatctaccggatagataataatcgttattttacattggagaattatacccgctgcgagaatgggcaaacgttttataataacaaagaaaaagatattcatgtcaaagtattggacggttcaggatacctgtttaaaggccgtttattctggttgtccatacgtgatgattatctggcatttccagcaacaatagatacaaatcatgcagcttgtatgggagcagataaaggttgtatgaatgccgtcattgtcacaactgatggtggaaaaacactctacggcgttgaatatggcagccatactcaggatccaacaggtgatacaaaagattatgatatgttagtcatggatgagggattttatttgattgtatatcattcttctaaacgatcgccaacgaatgcttatgccctaaaatggacattttacccaaatgcagagtctgccaaaaaaataggctatcccggagtgactggaccagtttatcaaccagaactttctatagatgtatctcaaattcttcaggaaaaaatgcaatgcgaccgacgattagaacccgtaaaattttcagggatagtctctcatgaataa

SEQ ID NO: 177956 - DNA, 201 bp, Klebsiella oxytoca
atgaagtcgtttgagtcgggaagttttgatgagaagtttattattactcatccggtttctggaaaggctctggcaaatcagaaatatgagattcacttgccggacggaaacgtaatgtctggcatgacgaatgcgatgggacattcttcgcttataaattcacagacaattgatatgctgaaaattatcctgaaaaaataa

SEQ ID NO: 177957 - DNA, 1359 bp, Klebsiella oxytoca
atgttggtgaccatgtcagataaagagattcatcgcttgccagtgatacaggctgtttgtgaaaagcgcctacgccgtcgcgatgcagcgtcacagcttggcatctcagaacgtcaggcgcaacggcttatcaatcgttaccgggtttctggtgctgaaggacttgtcagccgcaaacgcggtcatcccagcaaccgtcggttgaccgaatctctcaaactacgcgtactcacgctgatacgtgaaaactacagcgactttggacctacactggccgcagaaaaactcagagagcgtcatgatatccggctttcaatcgagactgtccgcaactggatgacatcggacggactctgggttccgcatgctcgtcgcaagtcacgggtttatcaaccccgacatcggcgtgattgcctgggtgaacttatccagatcgacggctcccaccatgactggtttgaaggccgtgcgccaaaatgctgccttctggtatttatcgatgatgccaccggccgcctgatgcatttgcggttcagcgagtcagaaacagcctttgactacatgctggcaacccgggaatacattgagcagcatgggaaaccggtatcgctgtacagtgacaaacacgcaatatttcgcgtcagtggtccggagaaccgcaataccaccgttacccagttcggacgtgtgctctatgacctggcaatcgagcttatatgtgccaacagctctgaagctaaaggccgcgtggaacgtgcgaatcagactcttcaggatcgactgatcaaagaaatgcgtctggaaggtattaccggcattgaggctgcaaatgcctggcttgccactttcattgcagactttaaccgccgattctcacgtccggccaggttcccgaaagatttgcatcgaccggtgcaggaaagtcccggtgagttaagagacatctttgcctggcatgatgttcgtaccgtgtcgaaatcactgacattccagtacgataagatcctttatctcatggacccaacagaagaaaatagccgtcttgccggtgaaaaaataaaagtactggattatcccgatggcaccctcgccttccactatgggcaccggagccttaagtgccaggcatttgataagctggcctgcgtcgaccaggggcagattgttgataacaaacgtctcgggacagtactcagactggctcaggtaaaacaggatgagcgggaaagcgaaggcaaacgggaacgaagcaaaaaatcgcccagccgtaaggctcaggtgcgcgtccaggaacagctccgggctatcaatcccgttctggcagacccgagcttgtttgtggcaagttcaaagcgatag

SEQ ID NO: 177958 - DNA, 804 bp, Klebsiella oxytoca
atgattaaattcccgactaaaaagcgcgttgatttgtataaaaatgctgccagttctgagcaattacatctggatctggctgcggctcaggagttcatgttcgatgcctgggaaactgatgacctggacgttgtgctgaaactcatcagaaaagctatcaagaaatccccgctctgtgctgacgcatactcattctactgcgagttatctcaagaacctcctgagtcaaaaatcgggaatctggagacggctttgtacgcagccagcattgctcttggcgaggattttcaggagttcgcaggacgtttctggggatttgtcgaaacacgtccatatatgagagcaaaagcagctttggctgaggccttatgggagtcaggtaatttttatccggctatggctcactgccgcgaaatgctgaagctaaacccgaacgataaccaggggatccgtcatttattaactggctattatctcgaactggaaatggtggacgagctgaccttactactggatgattattcagaagatgtgtgcccgtatcttcagtatacacgcgcccttctcgcctacagacagtcatcccctgatgccggtgatatcgcaagaattgcgattgattctaatggacacatccccggcttgttatcgaagcgcagattgcaaccaaagtctaacagcgggtatatcacgttaggtgaattggatgaagcaattgattatataaaccataatattaaaccttgggtcagaacacctaatgctattgaatgggtcatgaatatttcttcggccaataagtaa

SEQ ID NO: 177959 - DNA, 1560 bp, Klebsiella oxytoca
atgattctaataccatcattaattgatgaaacattagaccgtgagaaaataataaactggttgcttcgtccatatgacaaacgagcatttggaacagtatgtttagcacctagctttgctaatataaaacaattccagcgaattggggctactgtggcaactacagagacaatttacgactgcattgaacagttaaaaagaggtgtattttccaattctatggtctttgctaaccgctacgatggcatagacttacctgataattcatgtcgtattttaattattgactctaagccatactctgaaactttaacagatagatatgaagaggaatgcaggccaagcagtgatatcattaatgtaaaaacagcccagcgtgttgaacaagggttaggccggagtgtgaggggcgaaaaagattatagcgttattataatcaccggtggcgatcttgttcaattcttaaaaagcccattaactacaaaatatttctctcctcaaaccagaatgcaaattgaaataggaagtcaaattgtaggttttgctaaagatgaaattgatgaaggtgcagaagctgataagttattcgccggattaattaataaatctttgcaacgtgatgaaggttggaaggagtactatgttgaaagcatgaatgaaattgatatccacgatagaaaagataatctttatgacctaatttcactagaatacaaagctgagaaattatttataaaaggtgatttagacaaagcatgtgatgtattgcaagatatttgcgatagacatgttgatgatgaaatggagaaaggctggtatcttcaacttcaagcgaggtataaatataacataagtaaaattgaatctaataaaattcaaaaatcagcatttcagcgaaactgtaatctactcaaacctaaagacggagttgtatataaaaaaattgacaatataaatgctaccagggtaaatagaataaataaatgggttagcgcacatactgattatcaatctcttatgatatccgttgatagcattttgcaaaacatttcctttggtgttcaatctgacaaatttgaagatgctatgcataacttggggtcctctattggatttgtttgccaacgaccggataaggaaatcaaaaagggtcctgataatctttggggggatgtagatggacagtatttcctctttgagtgtaaaaatgaagttgatgaaaaccgagctgaaattaataaaacagaagctggtcagatgaataaccactgtggctggttcgcagatgaatacggtaatgcaaagtgcaaaaaaatcataataataaatacaagaacactttcatatcagggtgatttcaatgatgaaatatttgttatgcgaaaatcaaaacttaaactattaaaagataatgtgagatcttttttcaaagagttcaaagactatgacttgcaatcgctggatgagaccattatccacagatttattaggccacataatttagatattgaaagtctaacttctatttacacagaatcaataatcaaggcaaaaaaataa

SEQ ID NO: 177960 - DNA, 573 bp, Klebsiella oxytoca
atgatagatttcacaaataaacttaagaaaaaagaactcccaaagagaatcaaccctgttgaaatatatgagtcattagatagacgtagcgaagccggtccattacgcccttcccaaaaaagtattctcgaacaatggtttaacagtaggcgtgacgaaagagataatataattaagctacacactggggaaggtaaaacattaattggattgctaattttacagtctaaaatcaatgaaacaaatagtccttgcttgtatgtttgccctaatatttacttagcaaaacaagcagtcaaagatgcagaaaaatttggcatcccttattgtataattgatcatagtaaaatgataccggatgattttcttgccggaagaaaaatactaattactcacgttcaaaaattattcaatggaaaaactgcttttggcttaggtagcaaatcaattcatgttaattcaatcattttagatgactcacaagcatgcatcgactcaattaagaacagctttactattaaagtagataatgaaagcgctctttacaaatcaatgttaaatatttttttctga

SEQ ID NO: 177961 - DNA, 303 bp, Klebsiella oxytoca
gtgatcaataccgagacggggcagaataccggtcagttcagcatcaaaggtactgttggtctcgccaccgccgttatcggagtagtacaggaacggtttaccgtgatttttaatcccgtgacgcagcgcatctgcaacggctatcacggtctcagacagcgccaggctccacccaacaatgtagcggcaactgccatccagaataaacgtcacctcaggggagaaaggatttccgtggtcaggatgggcgaccttcatcttcatgccgtggccgtcaccaatccagacgtaattaaccggtaa

SEQ ID NO: 177962 - DNA, 249 bp, Klebsiella oxytoca
atgagccgaaatgaagatctgaatgctgactggcatcccgagaccataaaagccgaaatccacaaacgtggtttgtccctccggacgctctcccttcaggctggttacagcaaggattccctgaagagtgtgttgcgtactccctgtaagccttatcagcagatcgtcgctgatgctctgggtgtttcccccgagataatctggccaagtcgttacagaaccagtagctacgtcaataaggcggtctga

SEQ ID NO: 177963 - DNA, 570 bp, Klebsiella oxytoca
atggataaagaacgtaaatgttcttttggcggtgatgtaaaagaaccgatcattgagcgcatcttttctctggtagagcgttatccatctagaaacgaggccgcaaaggcgtggggtataaacatcaataccctacagaactattataagaggcgtgatattgctcccacccctaggaagcaacttttggaagttattgcaaatcatgaaggtgtatcgcttgattggctggttgagggaatcggggaaccaccggtggacacaaagaaagaacatgaaaaagaacgcacacattcagggctaagtgatccagacgccagactcgcgacactgttctcgattttgtcagacgaggaaaaacaatcactgtttgaaattgttgtccgcaaaggggttgatacagtgttacggctgcgtgatgatcgcaatatcaagctactgcaatgcaatgatttggagaaagaacggcttctcgtgtggcttgatagtggtatgaaaaaagaggcatttgaggctagtgaagttgtagcagaaacaggccttgcaaactctggtaagaaggccggttaa

SEQ ID NO: 177964 - DNA, 237 bp, Klebsiella oxytoca
atgaaagcattccgaacggatgaactgtgggtgcatttgtactggctgacggtactcgctgaagcgggaagttttacccgcgcggctgatcggctggaggtcagcaaggcagccatgagtcagaaaatcaaagagctggagaatatggccggcacagcactggtgcagcgcactacccgcagcgtccgtctgacctcggcgggcgaaaaactggtggacaacttgggaatgttatga

SEQ ID NO: 177965 - DNA, 390 bp, Klebsiella oxytoca
atgccattgctgacattcgacatcattgagggacgttctgctacggaaatcagaacaatgctggacgctgcacatcgggctgtgctcaccgcgtttaacgttcccgaacgtgaccgttatcagattgttcacgaaaataaaaattaccagatggtgttccaggataccgggctggggtttgaacgcagcgaccgtctggtgatggtccgggtgtttaccagcccgagaagtgaagagcaaaaaacgcgtttcatggcggaactggcacgggaactggcagaacactgtggggtggaagggaaagatttgatgatcagctttattaccaatgcgccgggtgactggagctttgcggatggtgaagcacagtatctgaccggaaagctgtaa

SEQ ID NO: 177966 - DNA, 945 bp, Klebsiella oxytoca
atgaaacttgttgatcaggcagccatctcccggtcggtcgccatcgatatggatgctgcggcagtgatcgaatctgccatgcgcgcgttaggcaagggcgaagtgattcagccggatattctttccatgagttttccgcaatatcacggcgaagttgatattaaaaccgcctatatccatggcgcgcataatttcgccgttaaaatcagcaccgggttctttaataatcatacgtatggtctgcccagcctgagcgggatgatgatcgtgttcgacgctgaaacgggccgtgcggaggccattctggctgataatggctatctgacggccgtcagaacggcgttatccggccttatcgccgcgaaatatctggcccgcgccgacagcacacgggttgccgtcatcggttccggggaacaggcccggttgcaggtcagagcattaaaactgctatttccgcttgaacaggttaatgtctggtcgcgcaacgatgaccatgctgtggaatatgcgcaggagatgcaggatgtggcccctcaggtacgggcatacgagaggatagaagatgcctgtcgcgatgctgatattattgtcacgacaacgccggcgatcgagccggtgttactggcggagcacgtgagtcgcggcagccatattacggcgatcggatcggataatgaattcaaacgggaaattagcggcgagttgctcactatggtggatatcttttgctgcgacctgcagtcgcaaagcgaaagccatggcgaactgaaatatttcaaaaacagacatcaggaaacgccctggccggtatacgaaattggcaaaatcattgccggggaaatcgcctgccagagaaaaccaacggatatatcattgtgctgcttatccggcactggcgtattagatagcgctattgcggaatatgcgctttcacgactttga

SEQ ID NO: 177967 - DNA, 1020 bp, Klebsiella oxytoca
atggcaaataacgtctcttcagacattgatatcgcggagttttatgctgcccgggaacgtatttatcctctggcgctggccaccccgttgatctattcccgcagtttatccgatctgttttctgcgcaaatttatctgaaatgcgaacaatttcagccgacgggggcgtttaaaattcgcggcgccgccaatacgattctcggcgagctgcaaaaaaatgagcaacggatcaggcgcaatggcgtggtcaccgcgtcgactggcaaccacgggcgagccgtttcttatgtggcgaaaaagctggggatcccggcgacggtctatctttcttctctggtgccggaaaataaagtccgcaatatcgaactggaaggctgccgggtagtgcgtgttggcgccagccaggatgatgcgatggccgaagtgaaacgcgcggtggcggaattcggcatgatagaaattccgccctttgatcatccgtcgattattgccggacagggaaccatcgcctttgaactgaatgaacagctcaacgacattgattatatctttagcggactttccggcggcggattgcttggtggcatcggtctggcgatgaaacaccttgctccacaaacccatatcgtcggcgtgagcctggcgcagggcgcggcgatgtgggaaagcctgaaggcgggcaaaccggtgatggttgaagaggtcgccagcgtggcagattcgctgggcggcggcattggcatggataaccgctggacgttgccggctgtgaaacaggtgatggatcagcatttccaggtgagcgacgattatatcgccgccgcgctgctgttgctgttcgaaaaagagaaaattttggtcgaaggggcggcggcggtgggtcttgcggcgctattgcaatatcgtccggacatcaaaggccgtaaggtcgtcctgattttaagcggcaatagtattgccaccgcgacgttgccggctttacggcaacgggcagtgaatgtggatgaggtagggcaatga

SEQ ID NO: 177968 - DNA, 759 bp, Klebsiella oxytoca
atggcggcgaatcagcaggaaaataaattctctattgtcgatattcgcaacttacataaacatttcggccagaatcatgtgcttaacggcgtggatctgcagattgcgcgcggtgaaattgtcagcatcatcgggcagagcggctccgggaagagcactttactacggtgcatcaatggcctggagagttatcagtccggcgaactgcgggtagaaagcgaactggtggactgcagcaataaacgggctttgcagcaattacgcagtaacgtcgggatgatttttcagaattttaatttattcccgcatttgaccgtcgccgaaaacattatgctggccccgcgcctgacgaattatctgacgaaagaaaaagcgcaagagcaagctttacggctactacaacgggtgagcctcgcggataagtttgatgaatatcccgatcaattatctggcgggcaaaaacaacgtgtcgccattgcccgcgcgttagcgataaacccggaaattttattatgtgatgaaatcacctccgccctcgatccccaattagttaacgaggtgttattagtgattgaagcattagccaaagaagggatgacgattatcatggttacccatgaaatggcctttgccagaaaaattagcgataaagtcgtgtttatgtatagcggtaaagtacatgagatgggtagcccggaaatgttatttaatcatccatcgacgcctgaactccagcgcttcctgtcgatggtattgtaa

SEQ ID NO: 177969 - DNA, 1302 bp, Klebsiella oxytoca
atggaaagtctgaacgccctgattcagggcatggggctgatgcacctcggcaccggccaggccgtcatgctgctggtgagcctgctgctgctgtggctggcgatagcgaagaagttcgagccgttactgctgctgccgattggcttcggcgggctgctgtcgaatatcccggaagccgggctggcgctgaccgcgctggagagcctgctggcccaccacgacgccgggcagctggcggtgattgcggcgaagctcaactgcgcgccggacgtccacgccatcaaagaggcgctggccctggccctgccgtcggtgcaggggcagatggaggacctcgccgtggatatgggctactccgccggggtgctggccatcttctataaggtcgccatcggctcgggcatcgccccgctggtgatttttatgggcgtcggggcgatgaccgacttcggtccgctgctggccaacccgcggaccctgctgctgggggcggcggcgcagttcggcatcttcgccacggtgctgggggcgctgacgctgaactacttcggcatcatcagcttcaccctgccgcaggcggcggccatcggcatcatcggcggcgcggacggcccgacggcgatttacctctccgggaaactggcgccggaattactcggcgccatcgcggtggcggcgtactcgtatatggcgctggtgccgttaatccagccgccgattatgaaggcgctgaccagcgagaaggagcggaaaatccgcatggtgcagctgcgcacggtgagtaagcgggaaaaaatcctcttcccggcggtgctgttgctgctggtggcgctgctgctgccggacgcggcgccgctgctggggatgttctgcttcggcaacctgatgcgcgagagcggggtggtggagcgcctgagcgacacggtgcagaacgggctgataaatatcgtgacgatattcctcggattatcggtgggggccaagctggtggcggacaagttcctgcagccgcagacgctggggatactggtgctgggggtgacagcgttctgcgtgggcacggcggcgggcgtgctgatggcgaagctgctgaacctgtgcagccggcacaaaatcaacccgctgattggctccgccggggtgtcggcggtgccgatggcggcaagggtgtcgaataaggtggggctggagtcggacgcgcagaacttcctgctgatgcacgcgatggggccgaacgtggcgggggtgattggctcggcgattgccgccggggtgatgctcaagtacgtgctggcgatgtga

SEQ ID NO: 177970 - DNA, 204 bp, Klebsiella oxytoca
gtgaccgcgccgctggcgggcactatctggaaggtcattgccgcggaaggccagacggtggccgaaggcgacgtgctgctgattctggaagccatgaagatggaaaccgaaatccgcgccgcacaggccgggaccgtgcgcggtatcgcggtgaaatccggggatgcggtggcggtgggcgacaccctgctgagcctggcgtaa

SEQ ID NO: 177971 - DNA, 1191 bp, Klebsiella oxytoca
gtggccgtattcgcctttcagaatcccggccgtttccttcgcgatggttttgtagcgctcgccggtcagcacgttcagcaccgcctgggtgccgacaatctgcgaggtcggggtgaccagcgggatgaaaccgaggtcctcgcgcacgcgggggatttccgccagcacctcatccagacggtgggcggcgttctgctgcttcagctggccctcgaggttggtgagcatcccgcccggcacctgggccacgaggatacggctgtcggtgcccttcagctggccttcgaaggcgtggtatttcctgcgcacctcgcggaagtacgccgcgatgctctccagcctgaggatatccagcccggtgtcgtgctcagtacccgccagcgtcgccaccagcgcctcggtggccgggtggccgtaggtggcgctcatggaagagatggcggtatcaacgccgtcgacgcccgcctcgatggccttcagcagggccatctccgccatcccggtggtggcatgagcatgcaggtgcaggcgcacgtcatagcgttttttgatttcgctgaccagcgcaaaggcggcccccggggtgagaatgcccgacatgtctttaatcgcgatggagtcgacgccggtctccagcagctgttcagtcaggtccagccaggtctgcagggtgtgggccggactggtggtgtaggagagcgtgccctgagcgtgggcgccgtggctgcgcaccgcctgcagggcggctttcatgttgcgcgggtcgttcatggcgtcgaagacgcggaacacgtccatgccgtttttgacggcgcgctcaacgaagcgctccaccacgtcatcggcgtagtggcggtagccgagcaggttctggccgcggagcagcatctgcagcggggtcttcggcatggcctttttgagctcgcgcaggcggacccacgggtcctcgccgaggaagcggatgcaggcgtcaaaggtggcgccgccccagcattcgagggagccgtagcccacgtcgtcgagctgagcggcgacggggagcatatcgtcaaggcgcaggcgggtggcgaaaagggactggtgggcgtcgcgcaggacgacatcggtaatggcaacggtcatggattcctccgtgaattaagggttaaggcggcgatggtggtggatggcggcggcaatcaccggctttaa

SEQ ID NO: 177972 - DNA, 213 bp, Klebsiella oxytoca
atgttcctcggcatggggttcgtgctggcgtttctgtttctgctgattttcgccatccagggcatgtccgccgccgtcaaccgcttcttccccgaaccggctgtcgcgccgaaggcggcacctgcgcccgccgccgcgcacgctgacgatttcgcccgcttaaagccggtgattgccgccgccatccaccaccatcgccgccttaacccttaa

SEQ ID NO: 177973 - DNA, 756 bp, Klebsiella oxytoca
gtggtgcctccacctgccgggttaagccataaccggcgacgtacactgcccggaaacgcattccatgaacgggttggctcgccacgtgcgcatagccgcaattaccacaacgaagagagcactgccggtgtccgaatcgaacggaccttttccctgcccatcaccagatatagaactatcctggcgtctggaatcgaaccagactctgtgccttgctcgtcaatgccctcatcgttgtgtcccggactcttcccgggggtcacaccttttcgccgcgctggtggggcgcacgtcgtgcctgaaacacctggcttgcacattccagttgtccggatagcgcatggaacttcaagggaaccatccgggctgctaacgctgcatgtgccatacaacggtcgtgaatattgcctttcacaactggaagcgcactccttcagttacaaaccagtcctcacgacggatgaagatggaatgcgctttcatgttgtgtacgattcatctaccccggtccggtggcgccacctcgccggggcagatgcaaaggatcgttacgcgatcattcggcttgttggtatggccggaagtatcaagtcccgacatcgcggattctgcttctccgccccgatttcacccccgctattgtttagcgcgcaaaccgagaaaatcgccttcaacgctgtcggctttcgccatgttcgatcaggtatcttcgggcggggcgccggcgaccaaccggcacaacccctacagtattaa

SEQ ID NO: 177974 - DNA, 234 bp, Klebsiella oxytoca
atggcaagcaaaggcattgaaaaccttatcaaggacgcattagcaaacggctgtcatgtagtccgtaaagcgcatcgcttcgaggtaagcaagaaaggccaaaaatcaatcactcttattatttgtgaagatggcacagcttaccggggagatattgacctaacgatcgccatagccattcgcactcaaaaagaaatgcgcagcatcctcggcctgccggccaaggcaagttaa

SEQ ID NO: 177975 - DNA, 261 bp, Klebsiella oxytoca
atggagccagaatttaaagaaggagacacaatcattgtggatcccgacctctgccctggtcctggtgattacgttgtcgctaagaacggtagcgaatacgctacgtttaagaaatatcgtgcaaggggcattaacgaagacggtgaagaagtctttgaactgattccgttaaaccccgattttgcccccttaaactcctctgtagaaaaaattaccatcattggcgttgttgtcgaacaccgccgccagatgcgccgctaa

SEQ ID NO: 177976 - DNA, 210 bp, Klebsiella oxytoca
atgacaacaacagagttagagacgttctttggaacccccaataaggcagcagacttctttggtgtgtcacctgaagctttttatcaatggagaaagcgaccaggcggattaataccaaaagggcgcgctgctgaagctgcataccgtaccaatggaaagctcatttttcgtcctgagctatacgaaaagactaatccaattaagccgtaa

SEQ ID NO: 177977 - DNA, 558 bp, Klebsiella oxytoca
gtgggtatagaacctgaatggaaagtagagaagcaaccggcgtggctggtggccgcgattaaaaagactatcaccgaactggatgggggttatgcagaagctgctgaatggttaggcgttacagaaaacgcgctctttaaccgccttcgcgcagaaggggatcagatattcccgctcggttgggcaatggtactccaacgtgcagcgagcacaaatcatatagctaatgctatagcacgccactccaacggcgtctttgttccgctttctgaagcagaagacgtggacaatggcgacattaatcaacggcttatggagtcgattgagtggattggaaaacactccagcttcattcgtaaagcaactgctgatggcgttattgatgccgatgaaaaggctcagattgagcagaacagctatcaggtgatggcaaagttccaggagcatgtagcgcttctgtttcgtgttttttgtactccagaaaagagtgacgcccgcgagtgtgcagctccgggcgtcgtggcgaataaatcaatgtgtatggagaaatccgcatga

SEQ ID NO: 177978 - DNA, 492 bp, Klebsiella oxytoca; identical to SEQ ID NO: 98250

SEQ ID NO: 177979 - DNA, 204 bp, Klebsiella oxytoca; identical to SEQ ID NO: 125561

SEQ ID NO: 177980 - DNA, 231 bp, Klebsiella oxytoca
atgagttacggctggctcttcgaaaatccggatgatgacatttcgggttataatcatatcaatctggaacacctccctccggagctaaaacaggttgctctccagatagtacaaaatcagtttgatcgtgatactgcagagaaaaaactggcagaattaatccagcaactcgagtttgatataactgcagcagaactgtcagcatatctttttaaaccgggccatgcctga

SEQ ID NO: 177981 - DNA, 267 bp, Klebsiella oxytoca; identical to SEQ ID NO: 94214

SEQ ID NO: 177982 - DNA, 483 bp, Klebsiella oxytoca; identical to SEQ ID NO: 136043

SEQ ID NO: 177983 - DNA, 657 bp, Klebsiella oxytoca
atgaaaacagagatgaaagatcggattagagcacggcgagtacagctcagcgtcacacagctggccctagcaaaaaagcttggggtaagccgcgtttccgtaactaaatgggagaatggaaccaccagacctgatggtgaaaaccttcaccaattagctgtggcgcttcagacaactcccgaatggctactgtatggacaaggtgatgaagttgatgacaccaaggtaattccgtacctcaaaccccctactccagtcccaattatttctgctgttcaagcaggcgtgtggaccgaaacttacgcatgctcaaggctatccgacgtgatttcatggacacaaaccactgcaaatgtttcaaatgaggtttttggtttagttgttagaggtgagtcaatgacaaatcctcacgggttaccatctatcccagaaggctcaatcgtcattgttgaaccacactacggtcaacttgatgatctttatggaaaaatagttgtagccactcttgaaggctcagctgaagcgacagttaagaaattagtatgggatagtccgttcgcttatctcatgccgttaaaccctgcatttaagccaatacaaattgatggcaactgcaaaattgtgggcaaagttgttcagataactcaaaatatttaa

SEQ ID NO: 177984 - DNA, 198 bp, Klebsiella oxytoca
atgctcaaatctaaggtactgaaacatttcggaggcgtatcaaaaactgcaattgccttgggtatttcccatccagcagtttgtcgttgggggaaggtaattccagaaaagcaggcttttgtaattgatcgtattaccaatgggaagctcaagtacgacgctaggctttatcacaagtctaccaagtcggcagcttaa

SEQ ID NO: 177985 - DNA, 558 bp, Klebsiella oxytoca
gtgggtaatgagccaatttggaaagtagagcgtcaaccggcctggctggtggccgccatcaaaaaaactatcactgagctgcctgaaggatatgccgaagcggcggaatggctgggcgttactgaaaacgcattgttcaaccgcctacgtacagaaggggatcagattttcccgcttggatggatgatggtactgcagcgtgctggtggcgcaaatcatatcgcagatgcaatcgcgcgccaatcgggtggagtatttgtcccgctggcggatattgaagatgtcgataacggcgatattaaccagcgtttaatggagtcgatcgagtggatcggtaagcattctaattttgtacgcaaagcgacagctgacggcgttattgatgatgccgaacgtgctcagattgaggaaaacagttatcaggtaatcgccaaatttcaggaacacatcacgcttctttaccgggtgttttgtgtggcagaaaagagtgacgcccgcgagtgtgcagctccgggcgccgtggcgaataaatcaatgtgtatggagaaatccgcatga

SEQ ID NO: 177986 - DNA, 1017 bp, Klebsiella oxytoca
atgaatatcgtatttctgggtattgatctggctaaaaatgtttttcagctctgtgggttaaacctagccggcaaaccggtttatacgaaacgaactggccgaaaagaattgctccagacgctggcaaatattcctacatgtctgattggggtcgaagcgtccaccggggcattttactggcagcgtgagtttgagaaactggggcacaaagtaaaggtcatcagtcctcagtatgtaaaaccctttgtccgcgggcaaaaaaatgatggtaatgatgcacaggccatcgcagtggctctgatgcaaccgacaatgcagttcgtgccaccaaaaagccccgaacagcaggatatccaggctttacaccgggcaaggcagcgtattgtcaatcaccgcactgctacagtctgtcaaataagagggctgttacttgaccgggggatccccattggcagtgctgtctccagagttcgccgggctattcctcttatccttgaagatgcagaaaacggtctaagttcccgtatgcgcagaacaattgccgagctctatgagctctttaacgatctcgggcgtcggatccatttttttgataaggaaattgaaacagtattcaggcaatcagaagcctgtcagcgtatcgccagagttaaaggcattggccctaaaacggccacggccgttgttgctgctattggcaaaggaactgaatttaagaatggccgccactttgctgcatggctgggtctggttccacgccagcattcgagtggcgacagacaagtgctgatgaatatgacgaaaaaaggcgacaagcatctgcggacactttttattcatggtgcccgcgctgtcgtcagggttgccacgaataacgatgatggccatatgaatcagtgggttaaccagttaaagggacggcgcggatttaataaaacgaccgtggcggtcgctaacaaaaacgcgcgaataatcaggtcgatgctgagaaatgagaccgagtatcaggtagtgtga

SEQ ID NO: 177987 - DNA, 519 bp, Klebsiella oxytoca
atggatcgccacacactcccgactaaaattatccactacagtcagcgcccggaaacgtcgtccgttaaacaggttatccgacacgaaatccatactccagcactgatcgactccggtcaggaccggacgttgctgacgatgtgctgcactgacatgcctgcgggggcgctttctgcgcaggttgaggccttccagacagtaaatccggtgtgttttcttgtggttaacagtccagtcttcccgccgcagctgaatatgaatatgcgggcaaccgtagcgtatccgggtttctgctatttcccggatacgcagggttatcgcccgatcatcccgccagctctgccagtggtaaacggttctgctctgcatcaggagttcgcatccccgccggacactgatacggtaagcctcccgcagaaaatgcaccgcctgacgcttctgagccggcctcagaacagtacctcctgcagcatctccttgtccagactcaggtctgccaccagtttcttcagccgctga

SEQ ID NO: 177988 - DNA, 1902 bp, Klebsiella oxytoca
atgggtatggctgacattgccgaagtcctgtggcgtgatttcctgaaccataatccgcagaacccgtcctgggccgatcgcgaccgcttcgtgctgtccaacggtcacggctcgatgctgatctacagcctgctgcacctcaccggctacgatctgccaatcgaagagctgaagaacttccgtcagctgcactccagaaccccgggccacccggaagtgggctacaccgcgggcgtggaaaccactaccggaccgctggggcagggcattgcgaatgcggtggggatggcgattgcggagaaaaccctggcggcgcagttcaaccgcccgggccacgacattgttgaccacttcacttatgcgttcatgggcgacggctgcatgatggaaggtatctctcacgaggtatgctccctggccggtaccctgaaactgggcaagctggtggcgttctatgacgacaacggcatctccatcgacggtcacgtcgaaggctggttcaccgatgacaccgcgaagcgctttgaagcctacggctggcacgtggtgcgcggcgttgacggtcacgatgctgactcgattaaacgcgcggtggaagaagcgcgtgcggtcaccgacaaaccgtccctgctgatgtgcaaaaccatcatcggtttcggttcgccgaacaaagctggtacccacgactcccacggcgcgccgctgggcgacgcggaaatcgcgctgacccgcgaagcgctcggctggaaacacccggcgtttgaaattccgtctgaaatctatgcccagtgggatgcgaaagaagccggtcaggcgaaagagtccgcgtggaacgagaaattcgccgcctacgccagagccttcccgcaggaagcagcagaattcacccgccgtatgaaaggcgagatgccggctgatttcgacgcgaaagcgaacgaattcatcgcgaagctgcaggctaacccggcgaaaatcgccagccgtaaagcgtcgcagaacgccattgaagccttcggcccgctgctgcctgagttcctcggcggctccgctgacctggcgccaagtaacctgaccctgtggtccggctctaaggccatcaacgaagacgctgccggtaactatatccactacggcgtgcgtgaattcggcatgaccgcgattgccaacggtatcgccctgcacggcggcttcctgccgtacacctccaccttcctgatgttcgtggaatatgcgcgtaacgcggtacgtatggcggcgctgatgaagcagcgtcaggtgatggtctacacccacgactccatcggtctgggcgaagacggcccgacgcaccagccggttgagcaggtggcttccctgcgcgtcaccccgaacatgtccacatggcgtccgtgcgaccaggtggaatccgccatcgcgtggaaatacggcgtagagcgtcaggacggcccgaccgcgctgatcctctcccgtcagaacctggcgcagcaggagcgcaccgaagagcagctggcgaacgtcgcccgcggcggctacgtgctgaaagattgcgccggtcagccggagctgatcttcatcgccaccggctctgaagtggagctggcggttgccgcttacgaaaaactgactgccgaaggcgtgaaggcgcgcgtggtttccatgccgtccaccgacgcgttcgacaagcaggatgcggcttaccgtgaagcggtgctgccgaaagcggtctctgcgcgcgtggccatcgaagcgggtatcgccgactactggttcaaatacgtgggcctgaacggcgcgatcgttggcatgaccaccttcggtgagtcagcgccggcggagcagctgtttgaagagtttggcttcaccgtggacaacgttgtcgcgaaagcgaaagcgctgctgtag

SEQ ID NO: 177989 - DNA, 1068 bp, Klebsiella oxytoca
atgaagaaggttttagcaattaatgaatgctgctcagataatattggtgatcatgcaataaattatggtcttcaaaaactaatattgcgtaactcctacgaggctcgatctgtcggttttgatgctggcgtaaaacatgagaaacctcaaaagatcgctactgatgatgtgcatttatcatttagagctcgattcaaaaaaaaatatctgagcggaagacagagtttaaaatattcactatggttaatgaaaaatttactaagagtacgttctaccgtaaaaagtgaacatcatgtcgcaattattggtgggggacagttaatacaatctggtggaacatttccaatagcaatgtttgtttggactttttattgtaaaagaaaaaaactgccgatatatattgctggtgtgggatgcgctgaaaaattttcaaaacttgacgtttggctatacaaactttccttcaaacgtgcggctaaaatctttgttcgagacgtctcatctcgggataagctcaaaaatatattttccacagaatctgaattaatacctgatttagcctatgcgctatacgatgagggcgctttcctttcaaataagaaggagcgaacattaattggttgcacttcatattatgtatatgaaaaaaacattaaagaattatcaagaaaagatggtctaacaaattctgagtatattaataagtggcaaagcatagttcttactgaacttaataatggaaaagaaattattttagcatctacaactgttcaagatgcggtacttaataaattagtttatgaaaaacttattgagctaggttattcatcaaaaattgaacttattgaaaccataccctccacatacgaatatttggcattactaaaaaatgttagtaaagtcatctcgggaagaatgcatagtttaattcttggtcatatctcaggatgtgagatagagactatcgacataaataagaagatagatcagtttatgctagaatattctggacaacttccttctgaattaaatgctgaccttaacgaaaaatttaaaaatataatctaa

SEQ ID NO: 177990 - DNA, 1104 bp, Klebsiella oxytoca
atgaaaagcattaacatattatatgtagacacctgcttggacgttgctggtggtcaacgttcattaattgcattactaatgaatgtttcaagtaagatagactttacaatactgattgatgagtctaacaaaaaatatgagcaagagcttttgaaggccggtatatctggtaattctattattaagataaagactacctcttttgctggtcgcgctttgggtgggcttaacttattcaaatatgtattatttaaggcggctaaatttgatattatacattgtaacacattctatgatggtctttttgcgatgcctgcggcaagactccgagggaaaaaaacaatttttcgcgctagatgtggaatagatttatctaatcatggatatattgataacttaatccatatgttctctacaagaatactagccaattcggaatatgttaaaaatacatttaatcgggttacaccagatttaaataaggttgtctctttatataaccctttggatatgaaatttcagagggaaattaacccggatgattttaaacctcaagctgaacaagattttgttatagcagttgtcggagcaattactgaagttaaaaatcaaatggaagttcttaaagctcttgctctgcttaatgattcatcattgaaacttagattcataggtgaaccaagaagtactgagaaagacagggcatattataacaatctattaaattatgcaaaaggcaataatctatcatcgcaagttgaatttactggttttgtttcagatgttagagataagttaggtgatgttaatttagtatgtgtgccatcagacagagagccgcttggtcgtgtaatctttgaaagtcagctatttggaattcctgttttagcatctgactcaggtggtaacactgaacttattaaagatggtgtgacgggatatttgtataaattagggaatgttaatgagttagcctctcagattctgaaagtgaaagataataattatcaacttgctatcaatgcgcaacaatttgtgttagaaagattttctcctgagcgtacctatcttgaggagttaggtttatatcatgaaataaagtaa

SEQ ID NO: 177991 - DNA, 258 bp, Klebsiella oxytoca
atgaaatcgcaggttatatcaccaacccctgaacaactgcgccgccaggctgaagatatgctcaaacgtgctgaacagctggaaaagacgggggccacaaaggacgcgcttaaaaaagcgctggtaccggcgttgcgtgaactgatgcaggccaaacatcgtgcacagctggcagttgatgagcttgttgatagcgttgcggatctggaaggccgagtgtcgcatgtcgagaaagtagtgcaggaggtactggcgtga

SEQ ID NO: 177992 - DNA, 879 bp, Klebsiella oxytoca
gtgagcgtcaaattatccgcatatgtctgggatggttgcgccgctgcaggcatcaaaggcaataagttattgatcatgctgcgtctggctgactatgccagcgatgagggcatcgcatacccaagcattgcgacgattgcgcgccagctcggcgccgggcgcagtaccgttatcactttgatcggtgagctggttaaagatggctggctgaccaaaaaagaacgtcgcctgggccagcgcagcaccagcaacctttacaccctgaacgttaccaagcttcgtcaggctgcaaatgaacattatgagggtccaaaatctggacgttcagaatctgaaccttcggaatctggacgtccagaatctgaacgtccgaaagagacaaaaaatcagggttctcagggtccagaaactggacacgatccgtcagtaaattcaaatacagatccatcagtaggatcaaaaccttcttgtccggttcctgcggaaccagacccgcaagtggtgctcactgatttagcaaaacaggttctgactcatctaaaccaaaccactggctcacgctttcaggtctgtgcgacgtcgcttgaacatatcagggctcgtctccgtgaaggatttaccgttgcagaaatggcgctggtggtggactacaaaaatgaggactggaaagactcagaacaggaggaatatctccgcccgacgacattgttcatcccgaaaaattttcctggctatctcaagcgtgcaggtaactgggacaaggccgggcgcccggagaagaaaaacgggaaatgggctaaaggaggggctgaagattcagcgttcaggtccagttattcagacgttaagtacaccgttccaaaaggattccgctcatga

SEQ ID NO: 177993 - DNA, 180 bp, Klebsiella oxytoca
ttggaagagaatattcaaccaatggaccgcctttatcgcgatcagcacggcattgttgtgcatgtgactggctatgacgctggccgccagcgtgtgatttaccgccgcccgggatatgagtgggagtgtgtggctccgatgatcatcttccgcgccagattcaagaggattgataagtga

SEQ ID NO: 177994 - DNA, 1053 bp, Klebsiella oxytoca
gtggaaggccacctcaaaactgcggtcgcgccgggcgcggctgtggaggtgggttatcatcaccccctcccggaaggtgccggtgacctcttcgccgccgctcaccttcagttcctgaccgggggcgagcgtcgcgcagctgctctttccgctcagccgggtctggtcgttcaggtaacgctcgtgacgcaggcgggcataaaacgccccgctctccgccgccgggtcgcgcggatggctgtcgcccggcgtcaggtagttatccccccagtggtacgcctcgccataagtggtgctgtcgccccggctgacatcgatgctgaggctcatctccgccggcgcgttgcggtagttatagtcccgggtgaacaccgactgcggcaccacgcgatgccggcttttcagcgcccacacggattccgtcccgctgtcgtgctggccggagggcggcaccgacggcagaaccagcccctgcccgtcgtgccgctggtcgtcgtaaaactccaccacgtcgatgttcagccgggtgtcggcggtgaagcggaaccagatacccacctcactcagcaggcgagtgataaagcgcaggtcgtcctcgccgtactgcatcacctgctcgcgacgcgggtacgcctgcgccagcgtgaagataaagtcctccccgcgcatgccgtggcgggtgcgcaggatatgctccacgatatccggcaccgacatatcctggtaaatccggttctggtggctccgggagagcagcgccagacgcggctgcagagtcagggaataatgcgtttcgtcccgggaggcggaaaggcgctcaaacgccgtcaccacgccctgaatcgtgcgtaccggctgccggatttttaccccgaagccctggtcaaccggggcctgcagggtgaaggcggcatcctgcatcagcatctgctgcggcgtgagggttttgtcggcgctggtgaattcaatctggtagctgaacggttcgctcagggcctcatcgccttcaaaggccagcacgtccagcagggcgcggcagccgcgcaccgttaa

SEQ ID NO: 177995 - DNA, 219 bp, Klebsiella oxytoca
atgggtaaaggctgggattcatcgttacgcgcggggcggcgcgatcgcctccgtcaggaggtgcttcaccgggttgccggtggccctccacccgttcctcgcgattacaaaggctgcgacggcactcatgccagttattaccgcaggggctgggactccgtcgatacacgagacatcgtctggcagtgccagcgatataaggaaaagcataatgtttaa

SEQ ID NO: 177996 - DNA, 405 bp, Klebsiella oxytoca
atgtttaaattaaataccgacgggctgattcaggcgttgatccgggtatttcagtccggctggtctgtggtcgttctcgccggtttatcgctgctgctctgttgtttctatggccgtcaggcatttgttgtctggtggctgacgttctccggtgccctgttaatagcggcaagtatctggctcggcaacctgccttatcgtttacgtcagcctgaccgcccggcccgaaagtgggtacgttgtgtctcgtggctgatctgggctttcggcgcttttctgctggcctttgcccccgtctttgcaaccagtccggtcgtcatgctgcttaaccctctcgccggtctgaccgtggtcattctgtatgcctggctggttcgtaaggaggtaataaattggatcctgtaa

SEQ ID NO: 177997 - DNA, 612 bp, Klebsiella oxytoca
ttggatcctgtaacgctttccactattgcctccgtcctgctgaaggccggaccttctctggttcgtaccgtcggcggctggttcggcagcgacagtaccacggcgaaagccgctgattcggtggccagcattgtcgagactgtcaacggtgcgattaatcccgccgaccagcagcgcgtgctggagcagaagctggcgcagctgccgcccgagcagctagtccaactggagggcctcaaggtacagctgcagcagttccagctggagcgggacaaggcgcagatggccgaccagcaggctgcgcaccacgaacaacaggaaaccatccgcaacggcgacaacgccacggacgaatatgtccgccagacccgtccgctgatggcccgcctgtcgctctacagcagcatcgcgtacgtgatgatcatgtctcttggccagcaggctggcgcggtggccggggcatttggtcatgcgttttcgatgcccgaaccggactgggatatcgcgctcatgctggcaaccccggcgctgggttatctgggtttcaggacgctggacgggttcgcccggtacagcaaatccagcaaacacaaggtcatggtgggtaaatga

SEQ ID NO: 177998 - DNA, 231 bp, Klebsiella oxytoca
atgacgagagcatttgatcgcgccagcgacctcgaaatggaagagcgcgaacgggctttaaacaaccatttaaaccgggttaaagagctgccggagaattacggattttgtaacgactgcggtgcggctattcctgtagcccgacttcaggcattgccgtatgtcgcgacctgtgtcacctgtcagtccatcagagatatcagggggaagcatgggctgggaaattattaa

SEQ ID NO: 177999 - DNA, 228 bp, Klebsiella oxytoca
atgaaggccgagcgtctggccacctctgtcagcgccgacaatatctattccggcgggctgaacgatctgggtctgaccatgtgggccgtgacgtgggaacaggagttccgcctggatgatgaaatcgacctggctaccctcccggacttcctgcgactgggggcaacgcttcaggtcagcgacggcatcgaccccattaaaggcgttattaacgtaagagagccgtaa

SEQ ID NO: 178000 - DNA, 231 bp, Klebsiella oxytoca
atgaagaaacatattaagcccgcccgcgcgggactacaggtgcgtaaagccgatggccagcgcctgaatcccgaaggggaagagctgcctgtaagtgcgtggtggcggcgtcgcgaagccgaaggtgatgttgttatcaccggtattaaggcggaatccgtaactgaaccggcggaagccgtaaccgaactggcggaagtccgccagacccgaaccgtaaaggagaagtga

SEQ ID NO: 178001 - DNA, 1023 bp, Klebsiella oxytoca
atgaatattaaacgtattggtctcgacctggcaaaaaatgtcttccagatacatgccgtggatcaccgtgagcatgttgtccttcgtaaaactctgcgccgtgaccgcatggcggcctttttcacccaactctcaccgtgccttatcggtattgaagcctgtggctctgcccactactgggcccgggagctgacccgtatggggcataccgtacgcattatcccgccccggcttgttaagccttatcttaaaggccagaagaatgatgccaacgatgccgaagctatctgcgaggctgtcagccgccccgggatgcgcttcgtggcgatcagaacggaaaggcagcagacgctgcaggcggagcaccgcgtccgggccagactcatccgtgcccggacagctctgagcaatgagatacggggtctgctgggggagttcggtgtggtgttgccagcgggaatagcgcaactgcgtaaggcgctaccggagatagtgtcgcagcaggtgcagtgggatgagtgttttattcgtctgctgtgcgaactgtcagaagagctgcagggactggatgagcgtgtcgcccgccacgacaggcggcttcagcagtcagcacgggatgatatccggataaaaagactgctggcgatagaggggatgggtccggtggtggccagtgccctggtggctgcagtgggtgatggcagacagttcaggagcggccgggaaatggcggcttatctggggctggttccgcggcagcactcaagcggaggaaaggcgcgactgggccatatcagcaagcggggggaccgctacgtgcggacgctgataatccatggagcgcgggcagtgctgaatgcgtgtcagaataaaactgacaggcgcagccagtggttgcagggggtgtcggagagacgaaaccggaacatcgcgacggtggcgctggcgaacaagaatgcccgtatagcatgggcgctgctgagtcgtgaagaggattaccatgggatacaggtcaccggttga

SEQ ID NO: 178002 - DNA, 588 bp, Klebsiella oxytoca
atgattaatttagagcagattaaagctgatattgcggcccgcaaagcgatgccagcatggggggctcagacgtctatcgagcgcataaagactatcaacgccacgcttcccagcttttcgctgaaaacggttgaggcactggtggatgtgctggagaaaacccagctagctaacgcagctcaggacgaccacatcaaccagcagcaggaccgcattgatcagttggagaagaaaaacgccgaactggggcgcagacttcgcgagtattctataaagccggtggccacgctggatgtgcaaagcgggcggcctgacggtcataagttcgcgctggcctattcatctgaagcgcataaattgcctgatggcgtttatatcctctgctgccgtgtgtggccagagtccgtagtgctggatgatacaaaactaagagagctattcgattcctggtttgcgtcggattgttcttttgaccggtccccggaggcgtccgaggcagataacatcgcctggcgggaatcttactggtacgtatggcaatgttgcagcactgccatcctcacagtctcccagctggagggcctatga

SEQ ID NO: 178003 - DNA, 498 bp, Klebsiella oxytoca
atgaatccgaaaacaaaaggtatttttgaggctgcattcgccaaatggggatttgaatctcaggtgctggttctttccgaagaagccagcgaattatcagctgcctgctcgcgttttcttaaccacaaaaccgacagcagcaaagtggctgaagaagcggcggatgtcgagatcatgattgagcaactgcgtcataacgggatgggcccgatgattgaccatgaaaagaaccgcaagatggcgcgtctggctcaggttgttggtgttgagtcacaacctgtcagcccctttggtccgtccgttatggggcttctggaggaagcgaccgaacagatggggctggcagaaaccctctatcgcgacaccaaaaccagcaatcgctatgccgccgcccgcgcccgtatggccgtcagtctgctgatgcaggctgctcagaagatgatgcgcgagcagcagcatgccgaacgtatgcgggcggaggttaaagctcatgattaa

SEQ ID NO: 178004 - DNA, 1005 bp, Klebsiella oxytoca
atggaaaacattgcgctcattggtatcgatctgggtaaaaactctttccatattcattgccaggatcgtcgcgggaaggctgtttaccgtaaaaaatttacccggccaaagttgatcgaatttttggcgacatgccccgctacaaccatcgcaatggaagcctgtggcggttctcactttatggcacgcaagttggaagagttggggcattccccaaagctgatatcaccacaatttgtccgcccgttcgttaaaagcaataaaaacgactttgtcgacgccgaagctatttgtgaagctgcatcgcgtccgtctatgcgttttgtgcagcccagaacggaatctcagcaggcaatgcgggctctgcatcgtgtccgtgaatccctggttcaggataaggtaaaaacaaccaatcaaatgcatgcttttctgctggaatttggcattagcgttccccgaggagctgccgttattagtcgactgagtaccattcttgaggataatagtttgcctctttacctcagccagttattgctgaaattacaacagcattatcactatcttgttgagcagattaaagatttggaatcccagttgaaacgaaagttggacgaagatgaggttggacagcgcttgctgagcattccctgcgtcggaacactgacagcgagtactatttcaactgagattggcgacgggaagcagtacgccagcagccgtgactttgcggcggcaacagggcttgtacctcggcagtacagcacgggaggtaggacgacattgctgggaattagtaagcgaggtaataaaaagatccgaactttgttggttcaatgtgccagggtattcatacaaaaactggaacaccagtctggcaaattggccgattgggtcagggatttactgtgccggaaaagcaactttgtcgtcacttgtgctctggcaaacaagctggccagaatagcctgggccctaacggcacgacagcaaacttatgtagcataa

SEQ ID NO: 178005 - DNA, 516 bp, Klebsiella oxytoca
atgaaactaattggcaatttgttgtgtataggattcattgtttgggtcgtttcatttttcgttaaagctgaaaaaaaagagttcccatcaagcgaagttctagtctctcagttcgagaaaatggaactttttgataagaaagactggaagaagggaaatgttgtagatggtgtgcaggtatatacatcacatactgccgataacattcttaatagctcatggctgcttggagtaaaacaagctgcggtgatctcgttgtctgatattcgagatcctgctttcgaaggtgtttcggctctggctgtatgttttaaacttgttaagggggttttggggcgtgatacaaaagaggacttcaaagtggttgaggattcctttaagttagccttatcctccagttctatcgacaatgtgtaccaggatagtcaggctctagatggttataaatttgaagtgcaaatgaagtctgtaacctcaaatataaattcatacacctgctctattaaagaaaaatag

SEQ ID NO: 178006 - DNA, 402 bp, Klebsiella oxytoca
atgagtatgagtgacgatctctttggtgattttcgagatgacagcattctcgaacaccttgatgatgagatggagagcacccgtttcccatcactactgtcagagcttaatgttttattgcgtcaggagctgacgcggctggggtatgacccgcgtcattccgtcgagctggttgcagctatatgcagtagaatcgggggaatgcaactgtatttcccacgaggtcaggttctcgaacagttggtcagggatatgcatatatggcgagactttaaaggtgataacattcctgagctagtggaacgctatcgggtgacacacaaaacggtgtataaagcgattaaaaggatgcgaagactggaagttcagaagcgtcagtacggtttatttgacagggagtga

SEQ ID NO: 178007 - DNA, 1089 bp, Klebsiella oxytoca
gtgggccaggaagtcagcttcctgcacgccagcttcgcggatagacttaggaatacccagttcagctttaatttcttccagccagccaagcagtttttcgattttcgctgcggtgcggtcacccggtgcagtcagacccaggtggtcagcgatttccgcatagcgacgacgggcctgcggacggtcgtactggctgaatgccgtctgtttggtcgggttgtcgttggcgttatagcggataacgttgctgatcaacagggcgttcgccagaccgtgaggaatgtggaactgagaacccagtttgtgcgccatggagtgacatacacccaggaaggcgttagcaaacgcaataccggcgattgttgcagcactgtgtacgcgctcacgcgctaccgggttcttagaaccttcatggtaagacgccggcaggttttctttcagcagcttcagcgcctgcagcgcctggccgtcggagaactcggaagccagtacggaaacgtaagcttccagcgcatgggtcaccgcatccagaccaccgaaagcacacagggatttcggcatttccatgaccaggttagcatcaacaatcgccatatccggagtcagggcatagtcagccagcgggtatttctgcccggttgcatcatcggtaacaacggcgaacggcgtgacttcagagccggtgccagatgtggtggtgatcgccaccattttggctttaacgcccattttcgggaacttgtagatacgcttacggatatccataaagcgcagcgccagctcttcgaagtgggtttccggatgttcgtacatgacccacatgattttcgccgcgtccatcggggaaccgccgcccagggcgataattacgtccggtttgaaagagttcgccagctcagcgcctttacggacgatggtcagagtcgggtcagcttccacttcaaagaaaacttctgtttcaacgccggccgctttcagtacggaagtgatctggtctgcgtagccgttgttaaacaggaaacggtcggtgacgatcagcgcgcgtttgtgaccatcagtaatcacttcatccagcgcgattggcagtga

SEQ ID NO: 178008 - DNA, 324 bp, Klebsiella oxytoca
atggtcggtggtattttaataaacctagtgattgttgtatgttgcttttgggtgtttttggatgcagcaaacaaccatattggaatgcatacagttaaagatggtattaacaaaggttacagaagtggtttatcccctattgtttggggggctggttctttattgatttttccattcattatctatctttacaggcgaaaaacactgctttctattgctaaggaataccctgtacaaacggataaaagcactggctttataattgtttttttgattgtatctgcggtgatgatttactcattcaaagatattttatttatctag

SEQ ID NO: 178009 - DNA, 393 bp, Klebsiella oxytoca
atgagtgacgatctctttggtgatgtacaggacgacagcattctggaccatattgatgatgagatggagagttcccgctttccgtcgttgttggccgaactgaatgctttattgcgtaaggagcttgagcgctttggttatgacccgcgccactccattgaactggtcgcagccatcagcagtaaaatcggcgggatgcaggtttactttccacgcggtcaggtgcttgagcagctcgtcagggatatgcgtatctggcgtgattttcagggtaacaacatcccggaactggttgagcgctaccaggtgacctataaaacagtgtataaagctatcaggcgtatgcgcaggctggaagtaagtaaacgccagtattctctggacatggagtga

SEQ ID NO: 178010 - DNA, 207 bp, Klebsiella oxytoca; identical to SEQ ID NO: 126353

SEQ ID NO: 178011 - DNA, 234 bp, Klebsiella oxytoca
atggccatacgtctgcaggcaggtctgcaaaatcgactcgttggcactgtcgccgcattcgacaagggatcgcagaataaccagtcgctggtcctggtcgagaatgtcacgcatagtcgtcacctcttatttttccttcagctcattttccagaagcagatcgctgacatgtttcacctggcgaatcgccgggcccaattcgcggaggtcaccccgcaaattactcatttctag

SEQ ID NO: 178012 - DNA, 303 bp, Klebsiella oxytoca
atgggctgggaaattattaagggcaactgggcgatcatctgggctctgtttatgtctgccgtgaacgtcattcagctcctgctggccaaaacctacgtcaaacgtgaggagctggagctgatgcgtacccgactgcagagcattgagaacactatcgcggggctacccagtcaaaaagacctgcaccagctgcagctagaaatgagtaatttgcggggtgacctccgcgaattgggcccggcgattcgccaggtgaaacatgtcagcgatctgcttctggaaaatgagctgaaggaaaaataa

SEQ ID NO: 178013 - DNA, 231 bp, Klebsiella oxytoca
atgaccaaagcgtttgatcgcgccagcgaccttgaaatggaagaacgcgaacgggccttaaacaaccatttaaaccgggttaaagagctgccggagaattacggattttgtaacgactgcggtgcggctattcctgtagcccgacttcaggcattgccgtatgtcgcgacctgtgtcacctgtcagtccatcagagatatcagggggaagcatgggctgggaaattattaa

SEQ ID NO: 178014 - DNA, 234 bp, Klebsiella oxytoca
atggcccgcttatccctctacagcagcattgcttacgtgatgatcatgtctctgggccagcaggctggtgcggtggcaggtgcctttggtcatgcgttttccatgcccgaaccggactgggatatcgcgctcatgctggcaaccccggcgctgggctatctgggtttcaggacgctggacggtttcgcccggtacagcaaatccagcaaacacaaggtcatggtgggtaaatga

SEQ ID NO: 178015 - DNA, 303 bp, Klebsiella oxytoca
atgggctgggaaattattaagggcaactgggcgatcatctgggctctgtttatgtctgccgtgaacgtcattcagctcctgctggccaaaacctacgtcaaacgcgaggagctggagctgatgcgtacccgactgcagagcattgagaacactatcgccgggctacccagccagaaagaccttcaccagctgcagctggagatgagcaacctgcggggcgatttgcgcgaactgggcccggcgattcgccaggtgaaacacgtcagcgatctgcttctggaaaatgagctgaaggaaaaataa

SEQ ID NO: 178016 - DNA, 231 bp, Klebsiella oxytoca; identical to SEQ ID NO: 177998

SEQ ID NO: 178017 - DNA, 234 bp, Klebsiella oxytoca
atggcccgcctgtcgctctacagcagcatcgcgtacgtgatgatcatgtctcttggccagcaggctggcgcggtggccggggcatttggtcatgcgttttcgatgcccgaaccggactgggatatcgcgctcatgctggcaaccccggcgctgggttatctgggtttcaggacgctggacgggttcgcccggtacagcaaatccagcaaacacaaggtcatggtgggtaaatga

SEQ ID NO: 178018 - DNA, 258 bp, Klebsiella oxytoca
atggaaacaaaaattacagcttatgcctgggcttcgggattaatcgagtttggcgaaactttccctgatggtgctttgcccgttatcaccggtgaggaaaaaagagttcgggaaataattgatgtgcgggcgaggcactcccggacgcatgagcaattgcttgttcctggtgttcccgaagctgataaccaacatgatgcctgtgatgcattaattcgcttcacagaaattgttactaaagagtatctggaaaaataa

SEQ ID NO: 178019 - DNA, 288 bp, Klebsiella oxytoca
atggaaaagcgccgtaaatggaccaagtacgaaattcagtttgtctgtgagaatgccgggaaaatgacggcaaaggagatgggcgagaaactcaaccgcacccgccaggccattcagtctcaggcgaaccgctggggcttgtccgttcttgttcaaccggcagatgctcatgatgcttatctttgccgcgaactttataaagagggcctgaccattccggttattgccgaaaaaatggaattaagtcgccgtgctgtttcgaatattgttttttcagattgctattaa

SEQ ID NO: 178020 - DNA, 825 bp, Klebsiella oxytoca
atgctcgatacgctgcaaaacacacaactgcaaagcgccatcgtcaaggcgatgtatgccgccacgattgaaagtgagatggatacccagacagcgatggattttatcctcggtgcggacaatccggagcagacgaaaaagctgaccggatggcttggggaaatcgcaacgtattatgcggccgccccggtcagacttggaggggcgaaggtaccacacctgatgcccggggattcactgaatctacagtctgctcagaataccgataatgggtattccgtattcgagcaatcgctcttacgttacatcgccgcggggcttggcgtttcttacgagcagttatcccgcaactactcacagatgagttactccaccgcacgcgcgagcgccaatgagtcctgggcctatttcatgggtcggcgcaaatttatcgctgcccggcaggcgagcatgatgtttttgtgctggctggaagaggcgatcgtccgtcgtgtcgtcagcctgccatcccgcgcccgttacagtttccaggaggccaggacaagctgggcgaactgcgactggatcggctccggcaggatggcgattgacggccttaaggaggtgcaggaggcggttatgctgattgaagcaggcctcagtacctatgaaaaagaatgcgcgaagcgcggcgatgattatcaggagatctttgcccagcaggtgcgtgaaacgatggaacggcgacaggcagggttaagaccgccttcgtgggcagctgcggcgttccagtctggtctggagaattccggtaaggaggaacaagatgacgcccgagctgcgtaa

SEQ ID NO: 178021 - DNA, 720 bp, Klebsiella oxytoca
atggcgcagcaggtcaataaccagcagaattcatctttagttcatgcctctccttacatcgctggtgccgcgaccatgagtagccgtgagatatcttctctcactggcaagcagcacaagcatgtggtgcgtgacatcgaagcgatgatgcagcagttgggagagtccctggaggggtatgcccattattggacacacccccagaaccaccagcaataccgggaataccgtctcgaccgtgagcatacggaatgtttaatcgccgggtacagcgcgccgctacgcatgaagatcatccgtcgtctgcgtgagttagaggacagcgtcaacgctataccgcaaacattgccagaggcacttcgcctggcggccgacatggcggaaaggaatgcgaagctctcacttaaggtccagcaggacgcgcctaaggtggcgttcgtgaatcagtatgtcgaagccggcggcgccaaaagtctgcgtgaaaccgcaaaaatcctgaacatgccggaaaaggccatgatcgacacgctgctgcgcgacaaggtgctgttccgtcagtccggcaacttgctacctcatgccctgcgtcagcgcgaaggcctgtttaccgtcaaaacgggtacatcggattatggccatgcctacacccaaacccgagtaactccccgcggcgtccagtggatagcacagcgttacgcctctgaactgatgggaggttga

SEQ ID NO: 178022 - DNA, 720 bp, Klebsiella oxytoca
atggcgcaatggataaataatctcccggtttcatctgctgcttctgtccctgcctttactgctagcagcgtaaccatgagcagtcgtgagattgctgagctgactgaaaagcagcatgggcatgtttgccgggatattgaggcgatgcttaaacagttaggagagagccctgaggggtatatccaactttggacacacccccagaacggccagaagtaccgcgagtatctcctcgatcgtgagcataccgaatgcctaatcactggctacagcgcggtacttcgcatgaagattatccgtcgtctgcgtgagttggaagataacactaatgctatcccacaaacgctgccggaggcgcttcgtctggctgccgatatggctgagcagaatgcgcgcctgtctcacaaggtccaacaggatgcccctaaagttgcgttcgtcaatcaatacgttgaagccggcggtgccaaaagcctgcgcgaaacagcgaaaatcctgaacatgccggaaaaggccatgatcgacacgctattgcgtgacaaggtgctttttcgtcagtccggcaatttgctccctcatgccctgcgccagcgcgaaggtttgtttaccgtcaaaactggcacctcagattttggtcatgcctatacccaaacccgggttactccccgcggtatccagtggatagcacagcgttacgcttctgaactgatgggaggttga

SEQ ID NO: 178023 - DNA, 333 bp, Klebsiella oxytoca
atggctaacactgaagaatttacacactaccagccgctgggtaatagcgatccagctcacaccgcttatggcactggcgcactggcagcggcaacgcccgttatgactccgttaatgctggaggcgacggcgggaaaactggttgcctgggacggcgagcatgctggcgcggcatgcggcatcctggcggtagccgccgaccagaacagcacggaacttaccttttataaatccggctccttccgtattgaagatattcactggccggatgcagtcaccgacgacagcattaaacgtaatgcctttgctggcactgctatcagcattgtttaa

SEQ ID NO: 178024 - DNA, 405 bp, Klebsiella oxytoca
atgaagacaacgacgacgaatgcagctgcaacccaaccagacgccaatgccgcaccggaagccaatggagcaattgtaactgctccggcagcaccagcggctgctgcacccacaccggatgtaaatgctcaggttgccgcggcggtctctgctgagaatgcccgaattatggggatcctgaactgtgaggccgcaagcggtcgggaggtacaggcccgtgcgctggcagaaacgccgggaatgacggttgagcatgcacagcgcattctggcggcggcgccacaaagttcacaggcccgaagcgaaaccgcgctggatcgcctgatgggaaccgcaccagaaacgctggcgtccggagcaccggctgccagtgaaacagatgatttgatgaatacccctgtttga

SEQ ID NO: 178025 - DNA, 333 bp, Klebsiella oxytoca
atggctaacactgaagaatttactcactaccagccacttggtaatagcgatcctgcccataccgcatatggcgctggcgcgctggcagcggaaacacctgcaatgactccgttaatgctggaggcgacagctggcaaactggttgtatgggacggcgagcatgccggcgcagcatgcggaattctggcggttgcagcagaccagagcagcacggaactcgccttttacaaaaccggatccttccgtattgaagatgttctctggccggatgcggtcactgacgacagtattaaacgtaatgcgtttgctggtaccgctatcagcatcgtttaa

SEQ ID NO: 178026 - DNA, 405 bp, Klebsiella oxytoca
atgaagacaacgacgacgaatgcagctgcaacccaaccagacaccaatgccgcgccgggagccgatggcgtaattgcgactgccccggcagcaccggcggcggctgcacctgaacaggatgtcagcgctcaggtttccgcggcggtctctgctgagaatgctcgaattatggggatcctgaactgtgaggccgcaagcggtcgggaggaacaggctcgcgcactggcagaaacgccgggaatgacggttgaaaatgcgcagcgcattctggcggcggcgccgcaaagctcacaggcaagaagcgaaactgctttggatcgcctgatggaaaccgcaccagatacgctggcttccggagcaccggctgccagcgaaactgatgatttgatgaatacccctgtttaa

SEQ ID NO: 178027 - DNA, 651 bp, Klebsiella oxytoca
gtggtctgcggcaaccccggcgtaggtaagtcggaggcggcacgtgaatatcgccgcagtaacgataacgtctggctgataacgatcaccccgtcctgcgccagtgtgctggagtgcctgaccgaactggcctatgagctggggatgaatgatgcgccgcgccgtaaaggaccgctggcccgcgctctgcgccgccgtcttgatggtactcagggccttgtcatcattgatgaagctgaccatctgggcgcggaaacgctcgaagagctgcgcctgctgcaggaggccacccgcgtcgggctggtgctgatgggtaaccaccgcgtctacagcaacatgaccggcggtaaccgcaccgtcgagttcgcccgcctgttctcacgtattgccaaacgtgtggcgattaacaagaccaaaaaggcggatgtggaagcgattgctgacgcctggcatatcgacggcgaaaaagagcgtgatctgcttcagaagattgcgcagaagcccggcgcactgcgcatcctcagtcattccctgcggcttgcagcgatgacggctcacggcgcaggtcaggctgtcagcgagagctacatcctcaaggcgctgcgcgatctggatctggatgttgatgtttcgacgttattaaggggttaa

SEQ ID NO: 178028 - DNA, 228 bp, Klebsiella oxytoca
atgaaggccgagcgtctggccacctccgtcagcgccgacaatatctattccggcgggcttaacgatctggggctgaccatgtgggccgtgacgtgggaacaggagttccgtctggatgatgaaatcgacctcaccaccctccctgacttcctgcgactgggggccacgctgctggtcggcgatgacacagccccgattgaaggcgttattaacgtaagagagccgtaa

SEQ ID NO: 178029 - DNA, 231 bp, Klebsiella oxytoca
atgaaaaaacatattaagcccgcccgctcggggctgcaggtgcgaaaggctgatggccagcgcctcagtcccgagggggaaacgctccctgtgagcgcgtactggtaccgtcgcgaagccgaaggtgatgttgttatcaccggtattgaggcggaatccgtatctgaaccggtggaagtcgtaaccgaaccggcggaagtccgccagacccgaaccgcaaaggagaagtga

SEQ ID NO: 178030 - DNA, 510 bp, Klebsiella oxytoca
gtgccgctgttatgttttttactgctgggctgtgatccggcagaaaaagaagcaccgcgcggcagcgggaagagcagctacgtggcggctaatctgctgggctataaccatatggcaggcacgaatatcaactggttctccgtcaacggctaccggggacacgccgggggggttacctgctgcatatcgctgccggaaaaatggcggcccaatatgcaggtggcagtggagtgggaggtggatcctgacccgtttccgaaggatatccccagattcagcgaccctaagtatgatgaatatatagaaaaacacagggctaactatcgccattataaagcggtggccactattcccgaatatgaagattcctgcggcctgcaggtgcatttcttgccctgtcagcagattaaagtaacggccacctgccacgggccgactcatcctgaccacccgattaaagaacctttcgatctgccggagcctgcccagtgcccgccagaaacaccatga

SEQ ID NO: 178031 - DNA, 288 bp, Klebsiella oxytoca
atgcaaaagcgccgtaagtggaccaagtccgaaattcagtttgtctgtgagaatgccgggaaaatgacggcagcggagatgggcgagaaacttaaccgcacccgtcaggccattcagtctcaggctaaccgctggggcttgtccgttctggttaaaccatcggatgatcatgatatctacctttgccgtgagctttataaagagggcctgaccattcctgttattgccgaaaaaatggaattaagtcgccgtgttgtttcgaatattgtttattcagattgctattaa

SEQ ID NO: 178032 - DNA, 276 bp, Klebsiella oxytoca
gtggcttctgtttctatcagctgtccctcctgttcagctactgacggggtggtgcgtaacggcaaaagcactgccggacatcagcgctatctctgctctcactgccgtaaaacatggcaactgcagttcacttacaccgcttctcaacccggtacgcaccagaaaatcattgatatggccatgaatggtgttggatgccgggcaaccgcccgcattatgggcgttggcctcaacacgattttacgttacttaaaaaactcaggccgcagtcggtaa

SEQ ID NO: 178033 - DNA, 459 bp, Klebsiella oxytoca
gtggatgtgctggagagaacccagctagctaacgcagctcaggacgaccacatcaatcagcaacagaaccgaatcgaccaactggagagtaaaagtgccgagttggggcggaggctgtaccagtattcgatggaacccggggaggcagaacggcgtattgccgagctggaatcccgcacaggcaccatcgcaattcacgacgttatagctgagcgccagcgacaacagacagtgaaaggattctcggtagaacaggatgatacttatgtcggtttccagctgtcggcagcggcaatctgctatatcgaaccgatggaagctgaaagctattggccagcagactggcatgacgacagtttcaaaccgactgatactcggcgaaacctgattaaagccgccgcacttatcatcgctgaaatcgagcgtcttgatcgtcaattgcctgaggagggcctgtga

SEQ ID NO: 178034 - DNA, 231 bp, Klebsiella oxytoca; identical to SEQ ID NO: 178013

SEQ ID NO: 178035 - DNA, 234 bp, Klebsiella oxytoca; identical to SEQ ID NO: 178017

SEQ ID NO: 178036 - DNA, 285 bp, Klebsiella oxytoca
atggctaaaactaaaccttacaccgaggcacagcggcgtattttttatcaactggccgcagtgatggtttgctcagagattgagtctcaggttatcgcgccgtttagtgagaaagagaccggaaaaccttatgaccgcagcgcccctgatagttttaccaacacgtttctgaacaagaatcctgagttcaggcgtgcattcgaaacgctgggccgtgccatcaccagagagcggaaaaaccagctgcagctggcaaaggcgacaaggagcaaacatggcagttga

SEQ ID NO: 178037 - DNA, 276 bp, Klebsiella oxytoca
atggcgaagaaaaaaccgttacctgctgcagcgcgtagtgccatcagacggctcgctgccgcgtttgtctgcgctgaacttgagctgcaggttgtggcgaagttcgtcgaagaaaaaacgggcaagccctatgaccgcaacgcttctgacagttatctcaattcgtttctggattccgatccagaagtccgccgtgtgtgggaactgatgcagaaagatattgtatccacccgcaaagactttgccgaccggctggggagagaccgtgactgctga

SEQ ID NO: 178038 - DNA, 372 bp, Klebsiella oxytoca
atgagtaatgatcgcatgacagtcgtgcccgatttcctgggcgaactggacgccggcgtattcataaacaagattgcggcggctcttaacaccaccgcgctcggcgttctgaataacggcaacaaaggcaaagttgtcctcacctttgattttgagcgtatgggcaactctgttgaagagaagcgcgtcaagattaagcacaagctgaactacagcaccccaactccccgcggaaaagcgtcggaagaggacaccaccgaaacaccaatgtgggttaacaagggcggcaagctcaccatcctgcaggaggatcaggggcaactcttcggaatcaccggcacggtagacggaaagcttaaagcggctcagtga

SEQ ID NO: 178039 - DNA, 288 bp, Klebsiella oxytoca
atgatgggcgaagccaataccactgaaatcacggtggcgggctggcgcgagaacggtgtcagcggtccgctttggcagaccaaccgactggtgaaggtaaccgatgctatccagcagctcgacgtcacctggctgattaagacggtttcctttatggaaggcgatcaggggcggttgaccgtgctgacgctggtgccgcctgagtctctggatatgcctgagcagaaagctaaaggtaagggtaaaaaggcgaagtcaaaaacttcagtgggggtgacatgggactga

SEQ ID NO: 178040 - DNA, 288 bp, Klebsiella oxytoca
atgatgggggaagccaacaccactgaaatcaccgtggcaggctggcgggagaatggtgctaccgggccgctctggcagcctaacctgctggtgccggtgaccgatgaaatccagcaactcgatgtcacctggctgattaagacagtttcctttatggaaggcgatcaggggcgtctgactgtgctgtcactggtgccgcctgagtcgctggatatgcctgaacagaaagctaaaagtaagggtaaaaaggcgaagtcgaagacttcagtgggggtgacatgggactga

SEQ ID NO: 178041 - DNA, 372 bp, Klebsiella oxytoca
gtgcaggaatcggaggtccgggacaggttcggtctggctgagccggagaacggcgcagcggtactctcaccttctaacagcttctccgccttcagccctgcaccggcactcaaccgtgagcaactggcgcttaaccgttctcaggacgatgagattgacgtgatggccagcgaggcgatgaaagactgggagcagaccggcgatgcttttaccagtccggtgctgcaactggcgaaagacgtcgggagctttgaggagtttctggcgcgtctgccggacctgcagacgacgctggagcctgccgcgttcgtcgagcagctggctatgctgagctttaaggcgcggacgctgggagatgcgaatgatggctaa

SEQ ID NO: 178042 - DNA, 306 bp, Klebsiella oxytoca
atgcatcggctgggtgaaatcagagagcgggggctggagaatcagagctatcgagccagcggtctgacgttgttgactgcggcgatctcactgtggaatacggggtatatagaaagagcgatagattctttgagacgaaaagggatcccgattaatgagcaactgattacccatctgtcaccactgggatgggaacatatcaacctgagcggggattacgtctggagaacgaacctcaaactgggacagggtaaataccgcgcattacgctcagtgaatagtaatatgtacaaaaaacaggcttag

SEQ ID NO: 178043 - DNA, 408 bp, Klebsiella oxytoca
gtgggccttgcgtgggtctacgaccagcgcactgacattatcccgaccggcaccgaccgcgaggcgatgcaggcgtacctgttccgccatcaggacccggctaccgggacatacgtcggcaagcccggcggtatcgaggtctggcccattcccctgacgctcaagccggtgccgctgactatccgcatcattcccgatactgcggccatccgttctgcagtcaccctgagcctgcaggcgctgttccgctcggtctcgccgggcgacacgctgctgctctccgccatccgaacggccatcggctcatcgacgggggtcacggattacgagctggacctcaccatcaatcaggccagtgagaactacgagctgctgacgctgggggctatcacatggcgcatcgtgtag

SEQ ID NO: 178044 - DNA, 354 bp, Klebsiella oxytoca
atgagcattctgggtatggcggccattcgcgctaacggccgtgaaatcaaatccacgggaaaatccacccttaatccgggcggtaaaacacgcacccagcatatgggcgccggtaaggtctgggggctggcgggcaagatggcggggccctcgatccagatgaccatcgctgcggcggaggatatggacgttatcgaaatcagtagctgggagaacgtgaccatcatgtttgagggcgataacggcctgacttacatgatgaccggcgcagcgactgccgaaccggccacgctggatgaagatgctggcactatcagcgccaacttcatcggcgaaaaactggtgaaggtgtaa

SEQ ID NO: 178045 - DNA, 354 bp, Klebsiella oxytoca
atgagcattctgggtatggcggccattcgcattaatggccgtgaaatcaaaactgaggggaaatccaccctcaatccgggcggtaaaacgcgcacccaacatatgggcggcggcaaggtctggggcaactcaggcaagatggcaggtccctcgatccagatgaccatcgctgcagcgcaggacatggacgttatcgaaatcagtggctgggagggggtcaccgtcatgttcgagggtgataacggcctgacctacatgatgaccggcgcggcgacggctgaaccggccacgctggaggaggacggcggcactatcagcgccaacttcatcggcgaaaaactggtgaaggtgtaa

SEQ ID NO: 178046 - DNA, 192 bp, Klebsiella oxytoca
atgtatccgatttattcccacaaataccgctacctgctgcaggtgacggtcacggatatgccgatgatccgctttcgcagtatcagcaacgttctgacgccgttaatcagcctgcaggcgcagatactggaatgttttttacgtcgttaccggctcgctggccacgattatgattttctttatgaggtttaa

SEQ ID NO: 178047 - DNA, 192 bp, Klebsiella oxytoca
atgtatccgatttattcgcataaataccgctacctgctgcaggtgaccgtcacagatatgccgatgatccgctttcgcagtatcagcaacgtcctgacgcccttaattagtttgcaggcgcagatactggaatgttttttgcgtcgttaccggctggccgggcacgattatgattttctttacgaggtttaa

SEQ ID NO: 178048 - DNA, 207 bp, Klebsiella oxytoca
atggcaacacagtctgaactggacagtgcccgcgccgcacttcatgacctgatgacagggaaacgcgttgcaacggtacagaaagatggccgccgcgtggagtttactgccacgtcagtagctgatttgaaaaaatatattgccgaacttgaagttgagattggcatcaccagtcgccggcgcgggccagcaggattttacgcatga

SEQ ID NO: 178049 - DNA, 297 bp, Klebsiella oxytoca
atgaaaatgcttaaggaagcttttacccttaaccataatatcttcagtaaagttggtggggccggtgacatttatctgtttaccgataatgtcacagctctcttcggcaaccacatttaccgtcttccctgttatttcaatcacgccattctttttcaggcgaataatatggccttcctgatgataaagaataacgtcgccttcttcgccgccacgggggcgactccctttatcctcgacagcgatggccaccagaccgccacgacgtccgcccacggcgacgacaatcgcctctga

SEQ ID NO: 178050 - DNA, 1128 bp, Klebsiella oxytoca
atgttgttacgcgagtccattgaactaaacataagggagtatatggggttagctgaaacattagttagtattccgcagtctgaaagaggcggtgagattgctcaacgtgggtttgactatcaaacttgctgggctttatctcaaatgctggaatatgaactagatgaaaagaactatgtgtttatcttcgaatatcatgatgatgttcttattcttgatgacgaagtttctccaacacaactcacatttgctcaagtaaaaacaagagagaaacactggactgcatccactcttagtaatagcaccaagaagaaccccatatctatcatcggtaagttatttattcatcataagaatttcgccgaatattcacccaagctcctttttgttactaatgcttctttcaatctatgtgaggaaaacggtggtaagtcttgttttggtgcaaatgaagtcaaagtggagtatcagacgagctttaagaaagcaatcaaagatcaagtaaagcttgatgactccagtatcgatctttctgttatgcgtttcgttcaatcctcattaagcctagatgaccacattacacatctaaaaggtaaactatgcgatttccttagcaagaagtttggcgatagcattagcctgagtgttaatgcattagcttctttgcttgaacaggcgtgtcgagaaaaatccaaggtaaaatccgcagatattattaatttttctgaacttatctcacgaaagggtttctcatcagaagcattgaatggtgtgcttgattccttgaatgcaagtaatagtttaaagcctgattgggacaaagctagtcccctattcaatgatcttggcaaaacatcgcttcagctcattatcctgcaagccatgttctcacaagtttgcatcgaccttaaccaaaacacaaaaaatccttcgactgtatatctagaatatgcaattagcctttacgatgaggcgagtgctcactcggatttgaaattatatctaactgaaaccatgtacaaaattgatgcactttgtccagattatgcattgaccttaaagtcagggaagaaagaatgcatagttatttactcaataatccagaaactcttagagggaggtgaataa

SEQ ID NO: 178051 - DNA, 1653 bp, Klebsiella oxytoca
atgaaaagcatatactttaaaagtgctcacatattatcccttcgcgataagaaaggattcgccttcaagttctcacctgatattaatatcattacaggtgagaacgacacaggtaagtctagctttattaagagcttatatcatacattaggtgcagatgttcgactggataaaaaatggaaagaagataactttgtttcaaaagttgttatttgtgttaataatcgtgactatgcgtttcttcgccacggaaaacgtatttccattttcgatataacagcaggacaagagcatcacttagtgacctctagctctcgtacagagattgcattagctgtacgtgatgtctttgatttcaatttggagcttgtgactaaaactaatttggttcagggacaagcacaaccagcaagtctttatctcccttactatattgatcaagataacggttgggggaaagttttagattcatttagcagtttggctatgtatgaggactggcaaaaaaatatcttgaattttcatactggtgtaaaaccaaaggagtactatactttacaaggaaagattaatttaattgatatcgatcttgttgaaatccgaacgacgttaaaagctctaaagagagctaaaaagcgattcgaagagtcatttggaagagtacttttcgatgtggatgtaaaatattatgaagagctgctggaacgtttccttcgtaagtgccaagacttacatcaagaagaaacagaatacagaattaagctcataaaaatattatctctacgagatgaattagtaacagaaatagaggaatcaaaaagacagctcgatgaaaatgatatagattctttgctaccatcggcaggcttagaagcgagatatgtagtacttgagaataaagaaaagctattgcaaatcataccaaagttgtatgaggaaaaatctgtatatgatgatcaactcactaaaattaaagaagatttgaaacaggctataagcttaagctcagaactcaaaaacatgcttctggaagtcaaagagcaactgactcttcaagacgttattaagtctcaagcaagtaagcaggttgaggtaactttcgatgagcaaattaacgaattactgctaaaaataggcgaattggatgttgctagaactcagctttcaaaagaaatagcaaagttcgaagataaaaagcgagcaaaacaaatcaatgataagtttaaagagtcactgaagtttgcgcaaactgagttaggtatcaaagatcctaaagttggaactattcttcaatatggtccgatttctaagagcgaaaccggcagccgtgctccaagatcaatattggcttatcactatgctcttctaaaaacaatagaagataaatcgacaagtcctatgcttccagtagtaattgactcgcctaaacaacaagatccagatccgcgcacaacaaaaaagttattcgatttatgtattaatggtttatcaactaatagccagctaattatcggctcagtttcatttgaaagagaaacgaatcagtttaaaacacttattatgactgaaaaatacagtctgctaaaatcagagctttacaatcaggtttatcaagagattatgcctctttatgaacgagctgcgttatcataa

SEQ ID NO: 178052 - DNA, 723 bp, Klebsiella oxytoca
atgatgattgagttggagtcgaaatccttatcaataattaacccggaccataaagttaaaaagaatagcagagatctctccaaacatggttctgatgagtatgcagagatattacagtctttttgcgaagttctgggtgtgaaaggaagggcttttggccagctcaataaaccattttttggtatgagcgatggaaatgaaggcgtccaatggaatatttctgtctgtacgcaaaataataatatccgtatgggcgttaatcttgaaggtataaaatacaaagattggcctatagctaagcttattaaatcagagttggcagtccctgggttgctaagtgtaatacaaaaattagattctgaagacgaaattaacatgactttttatcgggatgcctggcaggtggtttctagacctgaaattagagagaaatatataggtggcaaggaatttaacctcaatgagctgactcatggggaatgggaacgtattttaaatgaagctttaaattgcttggataaagaacgtgattataaagggagaaatatgcaggatgttacgatggtaaacaaaaatggtagtgttcttgttcgtaccatgccagtttcccctcatttaacaatatggtctccattaataattaacgataatattgatgatgcaatccgaaataagtttaatcaattgattcatattcatcattggatgatgcagttaagttga

SEQ ID NO: 178053 - DNA, 852 bp, Klebsiella oxytoca
atgcaaactgtaaaactgaacaacggtattgaaatgcccctgctgggctttggtgtcttccagatgacggatgctgctgaatgcgaaagagcggttattgatgcgatcgatacgggataccgcctgatcgataccgccgcgtcttatcagaatgaaatccaggtcgggaatgcactgaaacagagcggtatcgcccgtaacgagctctttgttacaaccaaactttggctacaggatacaaattacgaaggcgctaaagcccagttcgaacgctccctgaatcggctgcagttggattacgttgacctgtacctgattcatcagccttacggcgatgtccatggagcctggcgtgccatggaagaactgcagaaggcaggcaaaattcgcgccattggcgtcagcaacttccatccagaccgactggccgaccttatcgcctttaacaacgtggcccctgcggtgaaccagattgaagttaaccccttcaaccagcagctgcatgccgttccctggaatcaaagccgtggcattcagccggaagcctgggcaccgtttgcagagggtaaaaatggtctgttccagcatcccgtgctaacagcagttggccagaagtacggtaaaagcgtgggccaggttgtgctgcgttggatcttccagcgaggcatcgtttcgctggcgaaatcggtgcgcaaagaacgcatggctgagaacatcaatattctcgattttgaactcagcgctgaagatatgctgcagattgctgccctcgacactgcaaccagcgccttcttctcacaccgcgacccggcgatggtggaatggctgactggccgcaaacttgatgtttaa

SEQ ID NO: 178054 - DNA, 1254 bp, Klebsiella oxytoca
atgaaaaacacaatgaaacagtacgtcgattatattgttaacggtggaaaatcaacaatgctgggaattggccccatgtctccggcattaattcaggcctgttttgagctgggtaaagaaaaagacctgccgctgatgtttattgccagccgcaaccaggttgatgcagatgagtttggcgcgggttacgttaacaactgggatcaatttcgctttgccgccgacctgaaagcgatggcggaaaaagtcggcttcgacggtgattacttcctctgtcgtgaccatggtggcccatggcagcgtgataaagaacgtaaagaccatattccggaagccgaagcgatggcgctagcgcgccgctcttatcaggtagatatggacgccggtttcgacctgttgcatatcgacccgacaaaagacccgtatgtcgtcggtaaagtcattgatatcgaactggtgcttagtcgtaccgttgagctgatccgcttctgcgaagagtaccgtaaggcaaataacctgaaggagttcttctatgaagtcggaactgaagagaccaatggcggcctaaccgacgtcagcgcctatgaagggtttattattgagctgaataagcgtcttgctgccgaatcgctaccgcagccgctgtttatcgttggtcagaccggtaccctgacccgcctgaccaaaaacgttggccattttaacgataagcagtccgcagagctttcggctatcagcacccgtcacggcgtcggtctgaaagagcataatggtgactatcttccggatgagatcctgttgaaacatccaggtctgggcatcacggcaatgaacgtcgccccagcctacggcaccattgaaacccgcgcttatctgaagctggcggaagtcgagaaagatctggcagcgaaaggctttatcaagtcagcatctgatttaaaaaccgtcctgacccgcgagtgcgtgctgagccacaaatgggaaaaatggatgaccgatgagcacaaaaataagtccgaggaacagatctttaacgagccggaattgttgaaagagattctcgaactcagcggccactacaactacgaaaaaccagcggtagtcaaagagatgcagaccatgtttgctaatctgaagtcgtttggtgtcgaacccgagcgttatgtggttaataaaattaaagatatgatccagaacgaagcagagtgcttcaatatgccaggcctgaccacccgcgtcgcgcaggcaaaataa

SEQ ID NO: 178055 - DNA, 792 bp, Klebsiella oxytoca
atgagaatactcgttgcaggagcgacaggaagtattggccttcatgtcgtcaataccgctatcaaaatgggccatcagccagtggcgctagtcagaaataaacgcaaagtaaaattgcttccccggggaacagatattttttacggcgatgtttcattgcctgaaacactcaccgaattaccgaaagatattgatgccatcatcttcacgctcggttccgatggtcagggtcgtattggtgccagggcgatagattacggcggagtgcgcaatattttacgaatattcagggatacacctgttcgtatcggcctgatgaccacaattggcgtgactgaacgactcagcatctggaatcaacgcactgaggttcatgactggaaaagacgtgccgagcgtctggtaagggcaagcggtcacccctataccatcgtcaggcccggctggtttgattacaacaatgatgatgaacaccgaatcgttatgcttcagggagatcgtcgccatacgggaacaccggaagatggtgtgatatcccgggagcaaatcgcccaggttctggtcagtgccctgacccactacgaggcaaaaaatagaactttcgagctggtggctgaacgaggtgaagcacagcaggatcttaccccattgtttgcagatctgctggctgatgatccacaaaaaattgatggggttctggacatagacaatatgcctctgcgtgaagaacctgattgcattattaacgagctgaatttgtattcaaaaaaattaaccaatctacaaccctga

SEQ ID NO: 178056 - DNA, 357 bp, Klebsiella oxytoca
atgaaggatgattattattggtgggatctggaggggactgctttcaaaggggtactttatgattcgattaatacatattttctgtatgatcattcctacgctgattggaatgagttctctaaagcagatccccatatggcatatgcgcatttgacctatattagatttaacgcattagaacaacaattcgtagatttaagagtcatccctcaaatgctaggggttaataatttgccattggtttcaaaagtaagaaatataaatcgatatgattggcttaaggcaattgttgatttggcattatttagattttcaagccttcgcgatataacctttcattttgttaatgaggtttag

SEQ ID NO: 178057 - DNA, 1242 bp, Klebsiella oxytoca
atgaaaaaatatgatcaggttgataaggcttttgattttttagtaggaaaggaaaatcggcaagaattttttactattgctgatttagcagtggctactggttggaaagttcagacatgtaaaacatatccaactaaaagatggagtaaatatatatcaagggatggcgctcaatataccacacttggattaaaatacttaagtaaggaagacttcagaaatcttcatagtcagaagagcgttgaaccggccaaaagtgagcgaagcattaatttaaaaaaagcaagagagttcgctatgcttgctgtttctgtttacaataatccatttacagagtttaaaactcatggttttatagttaatgtagttatagcatatacatcattatttcatgctatattcgcaaaaagaggtgttgattatttttacttgaatgatgatggctctcataaaattgttgatggtgacaaaaaagcgtgggaactgaaaacctgctgtgaaaaatattggcttggaagaaataccccagaaaaatcgaatgtattttttttaataggtttacgtaatatcattgaacaccgaggtctccctgaaatagatacactaacttttggtgagtgccaggcttcaataaataactttgaagatattctcattaacgaatttggtgatgaaaatgctttaatggtaaacttatctcttgcaatgcaacttacaaggatgtctcagcaagcgcagatcgacgctttgaagaaagtccaatcaaaaaatttcactattgttaagaaatatatcgaggattataaaagagacttggagcaagaaatattagaaagtcaacaatatcgactcagagctttgttagtccccttgattggtaaaaaggcatcaagttctgatatttctatagagtttatcaatgttaataatctcaccgaagatgaacttgagaaatttgatactggaattactttcatcaaaggagtggaaaatcaatttaagttgaaacctaaaaaggtagttgagttggttcaaaaaaaacataagtcttttaatcttagtactcatgcaaagttttggaagcattttgatgtcagaccatctcatgtagataaaactctaaaagggaagtactgtggttatatcgaaggttttgatgggtatttatataatcaggaatgggtgcgtaaaatactaagtgtttattctgatagtaaagagttggataaggttttaggctga

SEQ ID NO: 178058 - DNA, 252 bp, Klebsiella oxytoca
atggcattgactgtgttggtcaggcgtatcggctatgccgggcgcgttacagggcatggattccgccacacgatgagtaccattttgcatgagcagggtttcaattcggcctggattgagttacagctggctcacgtcgataagaactcaattcgtgggacgtataaccatgcgcagtatctggacgggaggagggagatgatgcagtggtatggcgagttgttatcttttatgtgtgatgtaagtacataa

SEQ ID NO: 178059 - DNA, 540 bp, Klebsiella oxytoca
atgaagctgactgctcgtcaggttgaaactgcgaaacccaaagagaagccctacaaactcgctgatggtggaggtctttacctgctggttaatcccaacggcaaaagatactggcgtctcaaataccgttcactaggtaaagagaagctgctcgctattggcgtttaccccgatgtttctttagctgaagccagaagcaagcgagaggatgctaaaaggacattagcggctggcaacgatccttctcttgaacggaaaattgagaaacttagtcgtcaacaagatgcagaaaactcttttgaggctatcacacgggagtggtatcagcgtcgctatgaccgctggtctgtctcctaccgcgaagaaatgctgagaacctttgaaaaggatgtgttcccttatatcggtcaccggccaatcaaagatatcaagccgatggagttgcttgctgttctttcaaaaatagaagcacgaggagcaactgagaaggtccgtaaggttcgccagcgttgtggagaagtctggaagtatgcgtggtga

SEQ ID NO: 178060 - DNA, 2145 bp, Klebsiella oxytoca
atgtcagagttacgggagtggcaaacgctcgccaacaaagagctcagccggcgggaaaaaaccgtcgatgccctggtaaaacagacggcagagggcattgacgttaaaccgctgtataccgaagccgatcttgataatctggaagtgaccggcaccctgcccggcctgccgccttacgttcgcggcccccgcgccaccatgtacaccgcacagccgtggaccatccgccagtacgccggtttctctaccgccaaagagtccaacgctttctatcgccgcaacctcgccgccgggcagaaagggctttccgtcgccttcgacctcgcgacccaccggggctatgactccgataacccgcgcgtggcgggcgacgtggggaaagccggcgtggcgatcgataccgtcgaagacatgaagattttattcgatcggatcccgctggataagatgtccgtatcgatgaccatgaatggcgcggtgctgccgataatggcgttttatatcgtcgcggcggaagaacaaggggttgcgcctgaacagctcaccggcacgatccagaacgatattctgaaagagtacctgtgccggaatacctatatttacccgccaaagccctcaatgcgcattatcgccgacatcatcgcctggtgttcgggcaacatgccgcgctttaacaccatcagcatcagcggctaccacatgggcgaagccggagccaactgcgtgcagcaggtggcctttaccctggccgacggtatcgaatacatcaaggccgcgctctccgccgggctgaaaatcgatgacttcgctccgcgcctgtcgtttttcttcggcatcggtatggatctgtttatgaacgtcgccatgctgcgcgccgcacgctacctgtggagcgaagcggtaagcggcttcggcgctaccaatccgaaatccttagccctgcgcacccactgccagacctccggctggagcctcaccgagcaggatccgtataacaacgtgatccgcaccactatcgaagcgctcggcgccacgctcggcggcacccagtcgctgcacaccaacgctttcgacgaggcgcttggcctgcccaccgacttttccgcccgtatcgcgcgtaatacgcaaatcatcatccaggaggagtcagagatctgccgcaccgtagacccgctggccggatcgtactacctcgaatcgctgaccgatcggatcgtcaagcaggcgcgggccattatgcagcagatcgacgacgcgggcggaatggcaaaggcgatcgaggccggactgccgaaacggatgatcgaagaggcctccgcccgcgaacaatcgctgatcgaccagggcaagcgcgtcatcgtcggcgtcaataagtacaagctggaaaaagaagatgaaacggcggtactggagatcgacaacgtcaaggtgcgcaacgaacagatcgcctcgctgaaaaaaattcgcgccagtcgggacgacgtgacggtaaaagccgcgctgaacgccctcacccacgccgcgcagcatggtgaaaacctgctggccgccgccatcaacgccgcccgcgttcgcgccacgctgggcgaaatttccgacgcgctggaggcggcgtttgaccgctacctggtacccagccagtgcgtcaccggcgtgattgcgcaaagctaccaccagtcagacaaagccgccggcgagttcgacgctattgttgcgcaaaccgaaaaattcctcgcggaacgcggccgccgaccgcgcattctgatcgccaaaatgggtcaggacggccacgatcgcggggccaaagtgatcgccagcgcctattccgatctcggcttcgacgttgacctgagcccgatgttttccacgccagaagagatcgcccgcctggcggtggaaaacgacgtgcacgtggtgggcgcctcctcgctggcggcaggccacaaaacgctgatccccgagctggtcgatgccctgaaaaaatgggggcgggaagatatctgcgtcatcgccggcggcgtcatcccgccgcaggattacgccttcctgcaggcgcgcggcgtggccgccatttacggccccggtacgccgatgctggagagcgtacgcgacgtcctgatgaggattagccaatatcatgattaa

SEQ ID NO: 178061 - DNA, 678 bp, Klebsiella oxytoca
atggttacgttagaacaattccgctatcacccgacccaggcggcgcgatctgcggcatgctttgattttcattattcgcagcccggcattgtggcgatttttggcgatagcggcagcgggaaaagcactctggcgcagattatggcgggctggtatccggattttctgcccggcgatatcgaaggtaaaggcaccctgcttggtatccccatcgggcagcaatcgctggtcgaacgggcgcagaccatccagctggtccagcaatcaccctatctccagctttccggctgtaccttcagcgtcgaagaagaggtcgcttttggccctgaaaatctctgcctcagcgaagaggagattatgcgccgtattgacgaagcgctgacgctgacggcgtgccaggcgttacgacatcgccacccctccacgctatccgggggagaaacccagcgcgtggcgatcgcctgcgcgctggctatgcggccaacgctactgatccttgacgaagcctttagccgcctgacggcgcaggcaagcgctatgcttctggagcgcctgggacactgggcgctggcgcagcgttcattgattatcctttttgaacgccccccttcgccttttcttgcctggtgtcagcagggatggcgactgcacgatggagcgctttccccgctatgctaa

SEQ ID NO: 178062 - DNA, 1992 bp, Klebsiella oxytoca
atgtcctcacgtaaagagcttgctaacgctattcgtgcgctgagcatggacgcagtacagaaagccaaatccggtcacccgggtgccccgatgggtatggctgacattgccgaagtcctgtggcgtgatttcctgaatcataacccgcagaacccgtcctgggccgaccgcgaccgttttgtcctgtccaacggccacggttccatgctgatttacagcctgctgcacctcaccggttatgatctgccgattgaagagctgaagaacttccgtcagctgcactctaaaaccccgggtcacccggaagtcggctacaccgcgggcgtggaaaccaccaccggtccgctggggcagggtattgcgaatgcggttggtatggccatcgcggagaaaactctggcggcgcagttcaaccgcccgggccacgacattgttgaccacttcacctacgcgttcatgggcgacggctgcatgatggaaggtatctctcacgaggtatgctccctggccggtaccctgaaactgggcaagctggtggcgttctatgacgacaacggcatctctatcgacggtcacgtggaaggctggttcaccgatgacaccgcgaagcgttttgaagcctacggctggcacgtggtgcgcggcgttgacggtcacgatgctgactcgattaaacgcgcggtagaagaagcgcgtgcggtcaccgacaaaccgtccctgctgatgtgcaaaaccatcatcggtttcggttcgccgaacaaagccggtacccacgactcccacggcgcgccgctgggcgacgcggaaatcgcgctgacccgcgaagcgctcggctggaaacacccggcgtttgaaatcccgtctgaaatctatgcccagtgggatgccaaagaagcaggccaggcgaaagagtccgcgtggaacgagaaattcgccgcctacgccaaagccttcccgcaggaagctgccgagtttacccgccgtatgaaaggcgagatgccggctgatttcgacgcgaaagcgaacgaattcatcgcgaagctgcaggctaacccggcgaaaatcgccagccgtaaagcatcccagaacgccattgaagctttcggcccgctgctgcctgagttcctcggcggctctgctgacctggcgccaagtaacctgaccctgtggtccggctctaaggccatcaacgaagacactgccggtaactatatccactacggcgtacgtgaattcggtatgaccgcgattgccaacggcatcgccctgcacggtggtttcctgccgtacacctccaccttcctgatgttcgtcgagtacgcgcgtaacgcggtacgtatggcggcgctgatgaaacagcgtcaggtgatggtctacacccacgactccatcggtctgggcgaagacggcccgacgcaccagccggttgagcaggtggcttccctgcgcgtcacgccgaacatgtccacatggcgtccgtgcgaccaggtggaatccgccatcgcgtggaaatacggcgtagagcgtcaggacggcccgaccgcgctgatcctctcccgtcagaacctggcgcagcaggagcgtaccgaagagcagctggcgaacgtcgcccgcggcggctacgtgctgaaagactgcgcgggacagccggagctgatcttcatcgccaccggttctgaagtggagctggcggttgccgcttacgaaaaactgactgccgaaggcgtgaaagcgcgcgtggtttccatgccgtccaccgacgcgtttgacaagcaggatgccgcttaccgtgaagccgtgctgccgaaagccgtctctgcgcgcgtggccatcgaagcgggtatcgccgactactggttcaaatacgtgggcctgaacggcgcgatcgttggcatgaccaccttcggtgagtctgcgccggcggagcagctgtttgaagagtttggcttcaccgtggataacgtggtcgcgaaagcgaaagcactgctgtag

SEQ ID NO: 178063 - DNA, 1302 bp, Klebsiella oxytoca
atggacagctatatcgcactgatgctatttggctctttctttattctggtttttattggcgtacctatctccttctccatcggcatcgccaccgtcggttcaatgctgctgatgttcccgtgggatatcgcggtgattaccgtttctcagcgcctcgcgaacggcctcgataacttcgccctgctggcgattccattctttatctttgccggtacgctgatgaacagcggcgggattgccatacgcttaatcaatctggctcaggtgatggtcggacgcgtaccgggctctctgggccacgtcaacgtgctggcaaacatgatgttcggctcgatttcaggctcggcggtcgccgccgccgccgcggtagggggcacgctgaaccccattcagacccagaaaggctacgatccggctttctccacggcggtgaacgtctcgtcgtgcatcacgggcctgcttattccgccgtcaaacgtgctgatcgtcttttccctgacggcgggcggcgtgtcggtcgcgtcgctgtttatggccggctatctgccgggcattctgatgggcctggctattatggtggtctgtgccgtcattgctaaacgtcgtggctatccggtttctgaacgccccacctgcgcccaggcggcaaaagcgtttttcgacgccctgcccagcctgctgctggtgattattgtgatgggcgggatcctcggcggcatttttaccgctaccgaagcgtcggctatcgccgtggtctacacctttatcctgtcggtgctcatttatcgggaagtgaaatggcgcgatctgccgaagctgatccttgaatcggtggtgatgacctctatcgtgctgctactgatcggcttttccgtcggcatgtcgtgggcgatgaccaacgccgacattccctacatgataagcgatgcgctaatgggggtgtcagaaaacccggtggtgattctgctgctgattaatatcgtgctgttaatcgttgggatctttatggacatgaccccggcggtgctgattttcacgccgatattcctgcccatcgcgcaggatttagggatggacccggtgcatttcggcatcatgatggtcgccaacctgtgcatcggtctgctgacgccgccggtaggcagcgcgctgttcgttggctgctccatttccggcgtgaaaattcagcagctcatcaaaccgctgctgccgttctacgccgccctgctgatcgcgctgatgatgattgtctatatcccgcagatctcgctgtttattccgcagctgctggggctgatgtga

SEQ ID NO: 178064 - DNA, 912 bp, Klebsiella oxytoca
atgctgagtaacggagcaaaagattataaagcgaaactgtttgaaaatcatgatgataatattcattttcttttgcatactccactctccattcagcgccaggtctgggagtctgcagccataaaggcaacgctacctgcgggtgtatgtatcgaaactgttaacgatacagaggtgaccgcggagtggatttcatatcccgattcgataaataccaggattattctctatttccacggaggtggaaattctcagggttcgtgtctgactcacagaaaactcgctgcctatctcgcacaatattctggttgccgaactctggtactggaatatcctctggcgccagaaaatcgatttcctgcggccttattaaattgtcatcaggcctatttatggctgcttgctaatggttattcagcagaggacattatcctcgcgggagactccagtggtggtggtctggtcatgtcgcttttactcttgttaaaacagcatcaagatcctttgccgtactcgtctgttctgctatcacccatgttggatttcacactttcaggtaagagcataacgctgtgtaaggatcttgatccgctgctttgcatagaagacctgataatgaccgtgaaatactactgttcggacagtgaacgaagcgatcctcttgtctctcccctgtttggtgatttgtctggacttcctcccgtatttattcaggtgggaagcgaggagttattgcgcgatgatgcattacgcctctcccgatatgctgaaaaggctgggatgcaagttgagcttgagatatgggacgggctctggcatgtatttcagtcatcggtgggaaagatacctgaagcggatgaggcgttacaagccgttgctaaatttatccgaagcagaagagcctgtctgtaa

SEQ ID NO: 178065 - DNA, 396 bp, Klebsiella oxytoca
ttgcgtttcttaatcgcagcacggatcacgctgtccgacgagatcgaacgcaagattattcgcctgttcgcactggggatgagttaccagatcaaagcggtttataccgttctggcgctgaatctggaaggcaaaaaagaagttctgggcctgtatctgtcagaaagtgaagacgctaacttctggctatccgtattgagtgacctgcaaaaccgtggcgttgaagacatcctgattgcctgcttggacgggctgactggcctcccggaggcaataaacagcatttatccgcagacagaggtgcagttgtgcgtcattcaccagatccgtaacacgattaaatacgtggcctcaaagcaccataaagacttcatgaccgacatgaaaccggtatag

SEQ ID NO: 178066 - DNA, 783 bp, Klebsiella oxytoca
ttgccaaactatctaaactggctgatgcaaaacaccctacctggtcaggtgttgctccagtcatggctcactcgtaacggcatagatcgtaagctctcttacctctatgtgcagaatggctggctcaggcggatcgcgcacggcgtatactgccgggcgggccgtgagccggactgggtggacgcggtttattgcctgcaaacgcagtgggaaaaaccggttcgcgtggcgggactgaccagcgttgcgctacagggctatgctcactataccgagccgggcaggcagcaaatctggctcacgcttccggcttacgtcaagctgccgggatggtttgtcgtctttgaaccatccgcgatgtttgtcacgctgtatacctctggcctcaccgttgatataccgtcattcacgacacaacttaaaatcggcgaccgacagttagtgggcagcgtaccggaactggccgcgtatgagatcgcctgcggcgttccttccttgatctcgttcgaacatgccgatgctctgtttcaggggatgaatcttcttagcccgcgtaaattacaggcgctgctcttcgccagtcattcggttaaaaccaaccgcgtgatgctctaccttgcccgacgcaatgagcatccttactttcagtacctcgatcaaagcggtatagaaacaggctcgggaaaacggcaaatcgttcccggcggttggctggagccggattatcaaatcaccgttccccgcgcatttaaaccgggaggagtcgaagatggatctgcgtga

SEQ ID NO: 178067 - DNA, 498 bp, Klebsiella oxytoca
atggatctgcgtgatagttatgcccgacaggtcaggctattaatgactgccctgccgcatgtggcgaaggagtcctgtttcgccctgaaaggcggcacggcaatcaacttatttgtacaagatttccctcgcctgtcggtggatatcgatctggcgtataagacctttactgatcgcgataccgatctggcggtcatcaatgacgccttgatgcgtattactgaatcgctgaacggcagaccggggatcacggctatccgacaggagaataaagcggatgaaaagcgcatcatagttaacaccgctgatgcgaagataaagattgaagtttgtcacaccgttaaatgcggacctcgaatcattatgtgtggagttccatccgctatatgtgaacctcagaccgttatgtgtggacctgactccacacataacgaagcctctctccttaaacaccgatttttcgtgatacctctcaccaaaccaaagcgatttatgtag

SEQ ID NO: 178068 - DNA, 327 bp, Klebsiella oxytoca
atgttgaagaaactcgtttttattgccccgcttttggcgcttatcgctctacttatctggtggttcacgccccgctacgccgaagaggacgtcgcgtactaccgctccgtcttctgcgttattgaccatcaggacagccgtgcgtttctccgcgatatggaaaatatgattgaaggcggcaattcggattatgcgctgcataagacccactacgtgcccgctctgggccaacggatgctggacacctggcagcagttgacgccggaagagcagaaaagtatcagccaggaccagcagcgctgtcgccagctgatgagcgaaaagtag

SEQ ID NO: 178069 - DNA, 1920 bp, Klebsiella oxytoca
ttgattcgctatattcccgtttcgctctctctggtcgccgccggcgtttccggcgtgctctacgctgcgccgataaatacgcccgtactcgctacgatggataatttccgcgatatcgctggcacgacgtctgtttataccaccagccacgacggcaccctgcgcaccggcgttttttatcgttctaatgccctggcattatcctccgcggaccaggcgacgctgagcacgctcggtatcagcgatgtttatgatttgcgcacggccagcgaaatcgccagcagcccggacgtgatgcccgacggggcgcgatatacccatattgatatcatcggcaacaccgcttcgggcagcaacatcacctcaataacgttcagtagcgccgctgaagccaaagcgatgatgcagcagaccaacgtctccttcgtcagcgatgccgggatgcgcgcccggttcaccacgctatttaacgatctggccagcgccgacggcgcagcgctgttccattgtaccgcgggcaaggaccgcaccggctggaccgccgcgatgctgctgagcattgccggcgtcgatgaggggaccattatggaaaactacctcgccaccaacgactatacccgccagcgcgtcgaagcgaccctggcgatgatgccccccgccatggcggcgatttacgagccgctgctgggcgtcgatgccagctatcttcaggccgggctggatgaaatcagccgcgagtacggatcggtagataactatctgaagcagggcctggggctgtcgcaggagacgctctacgtcctgcgcggcaaaatggtgcagtacggccagctgccgggacaaagcgaactgcgggggaatgcggcgcagggcgctgcgctgcttaacgccctgcaaaacagcgagctatcgggccgctacaccgactataactattatctgcaatcggccattgatgccggaaccctcggcggcgtggagactcaggtcggcgggcagatttacgcggacgccgccagctacctgctgcgcagcggctcgcgattagacagggcgttaacgccgaatattgatagccgtcagctgcgggatggggaaggaaaactgtggctgaccgggcttagcggctatcttggcaccgatggttccgcccgcgccgccagcagtaatgagcataccaccggctcgctgctgggctatacctggcggtttaacgcgcagcttagcggctacggcactctgggatatagctggggctcgctgggcagcgccagcgccgatgcggatgccaacaccactctgctggggttcggcggtcgctatgcttttgaggatttaaatcatggcctctttgccgccgccgatctcaacgcaggctggatcgattatagcagtacgcgccggctgaatggcgggctgggtacggccaccggcgatacccatggccagctggttggcggcacgctgcgcctcggctacgtcagtccgctcgattttgccagcgttgagtacgccgtcgggacccgcctgacccacctgcggatggacgctttccgcgaaagcggcagcgagctggcgctcaacgtcgaccgcgtcagtgaaaataacgccagcggtattgccaatgtgagtatcgcatttcattcgcaaaacggcggcggctggcgcttcacgccggcgataaatatcggctatgaacacagtttcagcggcccttcggtacgcactcagggacaggtttatcactatgaggtcgtacagaacgcggccttcgatagccgtgacatggtcaacgctggcgccagtttgagcatcacgcgcggtgcgctgagcctgaaccttggcggccaggctgacgtcgccagcggcggcgacagccacggctacagcggcagccttagcgtgggctacgccttttaa

SEQ ID NO: 178070 - DNA, 2184 bp, Klebsiella oxytoca
atgagcgcaatatccctgatccaaccggatcgtgaccttttctcctggccgcagtactgggccgcctgctttggccccgcgccgttcttgccgatgtcgcgagaagagatggatcaacttggctgggatagctgcgacatcattctggttaccggcgatgcctatgtcgatcacccgagcttcggcatggcgatttgcggacgcatgctggaagcgcagggatttcgcgtggggattatttcccagccggactggaataataaaaacgattttatgcgcctgggtaaaccgaatttgttcttcggcgtcaccgccggcaacatggattcgatgatcaaccgctacaccgccgaccgcaagctgcgtcatgacgatgcctacacggcgggtaacgttgccggtaaacgcccggatcgcgccacgctggtctatacccagcgctgtaaagaagcctggaaagatgtcccggtgatcctcggcggtatcgaagccagcctgcgccgtaccgcgcactacgactactggtctgataccgtgcgtcgctcggttctggtggactccaaagccgatatgctgatgttcggcaacggcgagcgtccgctggtggaagtggcgcaccgtctggccgccggcgagcccatcgggcaaattcgtgacgtacgcaacaccgccatcatggtgaaagaggcgctgccgggctggagcggagtggattccacgcgtctggatacaccggggaaaatcgacccgattccgcatccgtacggtgaagatttgccgtgcgcggataacaaaaccgtcgcaccgccaaaacaggaagcgaagcgcgttaccgtgcagcccccgcgtccgaagccgtgggagaagacctacgtcctgctgccttcctttgagaaggtgaaaggcgacaaggttctctacgcgcacgcgtcgcgtattctgcaccatgaaaccaaccccggctgcgcccgcgcgctgatgcagaagcacggcgagcgctatatctgggttaacccgcccgcaatcccgctctccaccgaagagatggatagcgtgtttgccctgccgtataagcgcgttccgcatccctcatacggcgatgcccgcattccggcctacgagatgatccgcttctcgattaacattatgcgcggctgttttggcggctgttccttctgctcaattaccgagcatgaggggcgtatcattcagagccgttccgaagattcgatcatcaatgaaatcgaagcgattcgcgacactgttcccggttttaccggcattatttccgatcttggcggcccaacggccaacatgtatatgctgcgctgcaagtcgccgcgcgccgagcagacctgccgccgcctgtcatgcgtttatccggatatctgcccgcatatggacactaaccatgagccgacgattaatctctatcgccgcgcccgtgacctgaaaggcatcaaaaagatcctcatcgcttccggcgtacgttacgacatcgccgttgaagacccgcgctatatcaaagagctggctacccaccacgttggcggctatctgaagattgccccggagcatacggaagagggaccgctgtcgaaaatgatgaagccgggtatgggcagctacgatcgctttaagcagctgtttgatacctactcgaagcaggccggtaaagagcagtatctgatcccatactttatttccgcccaccccggcacgcgggatgaagatatggtgaatctggcgctgtggcttaaacagcatcgtttccgcctggatcaggtgcagaacttctatccgtcgccgctggcgaactcgaccaccatgtattacaccggcaagaacccgctgggtaagattggctataagagtgaggatgtggtggtgccgaagggtgacaaacagcgccgcctgcacaaggcgctgctgcgctatcacgatccggccaactggccgctgatccgccaggcgctggaaaccatgggtaaaaagcacctgatcggcagccgtcgcgattgcctggtaccggcgccgacgatcgacgaaatgcgcgaagcgcgtcgccagaaccgccatacccgtccggcgctgaccaagcatacgccgattgtacaccagcgctcgaacggcggggcgacggcgaagaagcccgtaaaacgcggtaaggttgccggtcgttaa

SEQ ID NO: 178071 - DNA, 870 bp, Klebsiella oxytoca
atgaacgatactcaggtaagcccggcctttgccgggcgttttcagcaagtgtgcttgtacattgaacgccatctggatacgccgctgtcgctggagacgcttagtgcgatagcccacagctcgccgtatcattttcaccggcaattcagcgcctatagcggggtaccgctctatcgctatatccagtggctacgtctgcgtcgcgcctgttggcgactggcgtttaatccacaggaaaagattatcgatattgcccttgatgcggggttccagaatcctgagtcgttcagtcgtgccttccgcagcgctttcgcgcaaagccccagccagttccgtcaacagccggactggctggaatggcatcgacgcgtgccgaaacatacgctacaggagcaacacccgatggatgttaaaataatccagctacctaccactcagatcgcgaggctacggcatcgcggcaaccctgatttagtcaatgagaccgccgcgaagtttatcgcctggcgcaaggtgagcggtctgtccccggtcgccagctgcgcaacctggggaatctcctgggacgaccccgcggccacgccggctgacgattttcgtttcgatattggcggtacggtcagccagccggtgccggaaaacagcttcggcgtggtgaatggcgagatccccggcggacgttgcgcagtggtgcgtcatcatggctctctggacacgctcgcgcagagcatctggtttctttatcgcgactggctgcccgcatcgggagagtcgctgcgcaatttccctgttttctttcgctacttcactttcgtgcatgaagtcggtgaacatgagctgcagacggatgtttatcttccgctgaaatga

SEQ ID NO: 178072 - DNA, 573 bp, Klebsiella oxytoca
atgtttaaaaaaacgctgctcgctgttgtcactaccgctgttttttctgcgactgcttttaatgccagcgctgaagatcagggccacggtattgtcaccttctccggtaccgttattaccgccccttgctctgtgacaccggaaagctctcagattgatgtcgatctcggccaggttgccgatagcgtactgaacggcggccagtactctcagcctgcagatttctctatcaaactgcgcgactgtattctgagcacaacggatgataaaggcgtgaaaacgacaacggataaagtgaacgtgaccttcacttctgccaacgtcgacagcaatgacgccagcctgatggtaaataccaaagaaagcaactacggcggcgctaccggcgttggcgtacgtattatggacgcaggttacaacaccgtaaccctgggatccgcagtgccggtagtgtttaccgataccaacccgactcagaacctggacttccacgcccgcatggaatctaaaggtaaaaatgcaaccgagggtgatgtttacgctcaggcaaactacgtcctggcttataaataa

SEQ ID NO: 178073 - DNA, 2433 bp, Klebsiella oxytoca
atgccgctttatgcaatagaattcaataccgatatgattgatgctgaggacaggaaaaacatcgatctctcgcaatttgaaaaaaaaggctatattcctgtcggcacctatgtagcacgcgtacagatcaacaaaaataccttaccaaaagcctatcacctggagtggataaaagctgataacgaaagcggatctcagctttgcctcactaaagagcgcctggcagagttcggctttgccgatgcgtttattgaaccgctacaaatgtggaatcaaaaaggctgtctcgatctcagccatcagccagagctgattattcgtctggataaagcgaacatggtactgacgttaaccgtaccccaggcatggatgaaatatcaggctaaaaactggacgccgccggagtactgggacgacggtatcgcggggcttatgctggattataacctttacgccagccagtacacgccgagccacggcgacagcaaccagagcgtcaactcatatggcacactgggtttcaacctcggtgcatggcgcttacgtagcgattatcagtacgatcaatcgtttactgagcggaaatcaacgggtaccagcagcagcctgccgcgtacctatttattccgcccgattccgtccctggcgtcaaaattcacgatgggccagtacgacctgagctcaggcctctacgatacttttcactttaccggcgcctctctggaaagtgatgaacaaatgctgccgccggatttacgcggctatgcgccgcaaataagcggcatcgcgcagaccaacgctaaagtcaccgttacgcaaaacagccgcacgctctatcaaacgaccgtctcccccgggccattcaccatcgccgatctgggcacaaccttgcaggggcagctggatgtaacgatcgaggaagaagacggacgcaaaagtacgttccaggttggttccgcctctatcccttacctgacgcgtaaagggcaggtacgttataaaagttcagtgggtaaacccacatcaacgacccacaatgatgtgaataacccccttttctggaccggggaggcttcctggggctggttgagtgatgtttctctctacggcggcgctatcgtcaccgccgatgactatcaggcggcaaccggtggggttggctttaaccttaaccgttttggctcattctcccttgatattacccgcgccgaggctaatctacgtaatgacgatcaaggtaaacagcgcggcttcagctatcgcgctaactatgccaaacgttttgaagaaacaaacagtcaggtaaccttcgcgggttaccggttctcagataaagagtacgtcacgatgagcgaatatatcagctcgcgcgatggctccgactccagctccaatgagaaagagagctatgtgctctcctttaatcagttcgttgcgccgctggagctaaatacctatctgagtgtcacacgtaatacctactggaacagtgaaaccaatacgaactactcgttttctctgagccggagctttgatattggtgcgtttaaaaatatttcagcttcattggcgatgagccgcgtgcgctggaatgatgatgaagagaatcaatattacttttcactcaccctgccgctggaaaataatcgcaatattatgtacagcctgcagcgctatggcgacgacgcaacgacgcaaacggcaacctggtacgatggttcagatcgtaataacccgtggaatatgtccgtttcaggcacagataaagagtttggcgatggcgaagcggccatgcgcggatactatcagcactattcaccctatggccggttgaatgtaaacggtagcgtgaagccaagcagctatcgctcgctcagcgctggctggaacggctcgttcacggcaacccgttacggtgcggcattacatgattacaacactggcaacagttctcgcgtcatggtggatgcggatggaatagccggtgttgaggtaaacaatcatcgtagtatgaccaatatgtttggtatttccgtggttccgtcagtgggtaactacacaacggcgatggtgatggtgaacaacaacaacctgccggatggcgtggatgtaaccaactcggtaatccgcaccacgctgaccgaaggcgctattggctatatgcccctgagcgcgaccaaaggctatcagatcatcggcgtcatccgcctggaagacggacgctatccaccgctgggcgtgaccgtaaccgacaaagcaaccggtcgcgatataggtttagtcgctgatgacggctttgtatacctgagcggaatacaggaaaacagcatcctgacgctaaaatggaacgacaacgtgtgtgatttgacaccgcctaaccatagcaatctcgatggtcaggccattattttaccatgtaagcccgcacattaa

SEQ ID NO: 178074 - DNA, 738 bp, Klebsiella oxytoca
atgatgaaaattaagacatttgcgaaaggactattctgtttgttgagtaccagctttgcggtaaatgccgccgtgtcgcccgacagaacccgcattattcttaaccagtcggataagagcgtctccgtgcgcttgaccaaccagagcacaacggcccctttccttgcccaatcatggattgaggataaggataataaaaaatcccgaaactatattactgctgttccgccaatggtgcgcctcgaggcgggtgagcaagtacaggttcgcctgattcctcagccaacgttgacgcagcttccggcggacagggaatcgctgttttatttcaacgtgcgcgaaattccgccgcgctcggaacagaaaaacgtcatgcaaattgccatgcagagccgcattaaaattttctggcgaccaaaggcagtcgaagtgaagaacgggcaggtgaatctgaccggtaaattcgatattagccgaacggccagcgggttaacgttaaagaacaactccccctactttatcaccgtgggttatatcggcacgaatggcaaaacgctgctgccaaaaacatccagcatgatggctgaaccgtttggcctggcgtcgcaggagattaaagacctgccggctaatttccaggtaggctttattggcgattacggcggcctgaatatgtttaaagtcagctgtaattctgtacaagtggtctgtcagtctgaaccggtgaaaaagggataa

SEQ ID NO: 178075 - DNA, 1053 bp, Klebsiella oxytoca
atgaaaagactactaagttttttaacgttattaatcagcctgttttctgtgccatcatgggcagtaaattgctatcaaaataacgaaggaggagcgctttcttacattgctacacttccttcctttaccattcctaacgacattacgcctggcaagaaaatttgggaaagttccgacattaatattaccgtgtactgcgataaagcctcccaatggagtcgcgctgccccaacggaagagctttatgcctggataaaactctcggcgtttaatagcagtgaggtactcaataatccttattttacttttggcgtaacatacgatggtgtcgattacgaaggcattaatcaaggcatcaagacaggcgcctgtctggatagaatagatcagaaaccgctgccaaatatctatcatgacccggtatgtaatggttcggtactgcaaaaaaatgtatcctttaacgcccgcttccgcctgtatattaaagttaaagcgattcctcccgatagctcaacagtctataattttggtgacattaacgtactgcaatttgatggcgaagggggagcaaacctgctcagtgatgccaaaaatttacgttattatattactggattagataacgtgcggtttttgacctgtacagcttccgttaagcttttccctgaaagtcagacagtggattttggcgtcattcatgcttataaaaccgacatgccagcgctgaaaaaaacgttcagcctctccaccatccgggatcaggcggcaggctgtactgaacaattcgatatcacgaccagcttctatactaatgataccctatacgatattactcatttggatatgaataatggctttctattgaatatctatgatagcacggctagtactaacgttatattcaaccaatatatgccattcgctacctatattccgggacgaccatcaaccgtcacgcataactatattgctgagctgacccaaaatccctccgtctcagtcaaggatggcccttttagcaaagatgtgattataaagattaactatcagtag

SEQ ID NO: 178076 - DNA, 1764 bp, Klebsiella oxytoca
gtgtataaaacggggcatatggctggacgaattccacgagtatttatcaatgacctgctggcgcgcaccgatatcgtcgatctgatcgatgcccgggtaaagctgaaaaagcagggcaaaaattttcacgcgtgctgtccgttccataacgaaaaaaccccctctttcaccgtcaacggtgaaaaacagttttaccactgcttcggctgcggtgcgcacggcaacgctatcgacttcctgatgaactacgacaagctcgagttcgtggaaaccgtcgaagagctggctgccatgcataatctagacgtgccgtatgaagcaggtagcggacccagccagattgagcgccatcagcggcaaaatctctatcagctgatggatggtctgaacacgttttatcaacagtctctgatgcaacccgccgccggccccgcgcgccagtatctggaaaaacgcggcttaagcagcgaggtgattacgcgcttcgcgattggctacgcccctcccggttgggacaacgttttaaaacgttttggcggtaatcaagaaaaccgccagtcgctgattgatgcgggcatgctggtcactaacgatcagggacgcagttacgaccgcttccgcgaacgggtgatgttccccatccgcgataagcgaggccgggtgattggttttggtggtcgcgtgctgggtgacgccatgccgaagtacctgaactccccggagaccgatattttccataaaggccgccagctgtacggtctttatgaagcgcagcaggataacgctgaaccgccccgcctgctggtggtcgaaggttatatggacgtggtggccctggcgcagtttggcattaactatgccgttgcatcgctggggacgtcgacgaccgctgaccatattcagctgttgttccgggtcaccaatcaggtggtttgctgctacgacggcgaccgggccggccgcgatgccgcctggcgcgcgctggaaacggcgctgccgtatatgaccgacgggcgccagctgcgctttatgtttctgccggatggcgaagacccggatacgctggtgcgcaaagaagggaaagccgcatttgaagcgcggatggagcaagctcagccgctctccacgtttttgttcaacagcctgctaccgcaggtggatttgagcaccccggacggccgcgcgcagctgagtaccttagcgctgccgctgataacgcaggtgccgggtgaaacgctgcgcatttacctgcgccaggagttaggcaataagctgggaattttagatgatgcgcagcttgaacgtttaatgccaaaacagtctgaaaatggcatccagcgccctgctccgcagctaaaacgcacgaccatgcgtatactgatagggttactggtacaaaacccggatctggcgccgctggtaccgcccctggaagggctggacccgcgtaaaatgccggggcttgggttgttcaacgaactggttaaaacctgtttggcacagccgggcctgaccaccgggctgctgttagagcagtatcgcggcacaaatgaggccgcaacccttgaaaaactgtcgatgtgggacgatatagcagataaggatattgctgaaaaaaccttcaccgactcgctcaaccatatgtttgattcactgctggagctgcggcaagaagagttgatagctcgcgaccgcacgcacggcttaagcagtgaagagcgccgggaactctggaccatcagccaggaactggccaaaaaataa

SEQ ID NO: 178077 - DNA, 663 bp, Klebsiella oxytoca
atgaatagcaagcgtaaaattcagctagctgattttaatagaacggttattttaaccaccgctaatacattatttctaagccgtggaatagaaagtaccaccatggatgagatcgcacatgaagccggttttagtaaaaccacgctttatacctatttcgacaataaaaaggatattctggatcatcttatcctggaggtaatggcgcgtttctatcaggagctcataccaatcgctaatcggcaaaattcatttcgcgaattttatcgcgagctgtgccatgcgctgatggctctccacgaaacaagccttgcctacttttccgcgatagccgggaagatcgcctgttctgaaaaaatcactaaaaacaataaggcgttgaaaaatatcgctatgactggagaacagatccaccagattatcgcaaagcgaatcacagacgccgccgaaaaaaaagagattggattaaatgctcccgtcgcggacgtcatgatgctgttctggctctgcctgaccgggctagtggaaaagtcctcgtacagagaagaatgtcttttacgtcaccttgagaaagaccgtaaagcctttctcgacttcgcttttgacgccctcttattcatgatagaaaaagggaatattagcgattgcgaaaaagctgactaa

SEQ ID NO: 178078 - DNA, 300 bp, Klebsiella oxytoca
atgccaacagcaatcgataaagccctggattttattggtggtatgaacacatcgttgtcggtgccgaatactatggatgaaagtaccgctaagggaattttgaagtatttgcatgaactaggcgtaccggcaaatcctgccgacgtcatggcccggggggaaaaggagggatgggatgccgggttcacggaaaaagtggccggctgggcggaaaaaattgcctccggtaaccggatcgtcattaaaaacccggaattcttcaccgtctatatgcgcgaacagctgcaggcgctggtgtaa

SEQ ID NO: 178079 - DNA, 666 bp, Klebsiella oxytoca
atgtctgatatcaaacgtaataccatcggcaagttcggcctgctgtcgctgaccttcgccgccgtcttcagttttaacaacgtgatcaataacaatattgagctggggctggcgtcggcacccatgttcttcctcgcaaccctgctctacttcgttcctttctgcctgatcatcgcggaattcgtttcgctgaataaaaactccgaagcgggggtttatgcgtgggtaaaaagctccctcggcgggcgctgggcctttattaccgcctacacctactggttcgtgaatctgttctttttcacctcgctgctgccgagagtcatcgcgtatgcctcctacgccttcctcggctacgagtacattctgacgcccgtcgccaccacgatgttgagcatggcgctgttcgccctgtcgacctgggtgtccaccaacggcgcaaaaatgctgggtcctattacctcggtgacctcgtcgttaatgctgctgctgacgctctcctacattctgctttccggcagcgcgctggtgggcggtattcagccagcggatccgattaccgtggatgcaatgatcccgaactttaactgggcgttcctcggcatcaccacctggatctttatggcggccggcgggcggagtccgtcgcggtgtacgtcaatgacgtga

SEQ ID NO: 178080 - DNA, 1344 bp, Klebsiella oxytoca
atgaacactgcccgtatcagtattaaagaaaaatttagctatgggttaggggataccggctgtaatttagtctggcagacggtgatgctgtttatggcctggttttataccgacgtatttggtttaagtccggcgcatatggggaccatgtttctcgcagtcagggtattagacgcggtcaccgatgtattaatgggggcggtggcggatcgtacccggactaaatatgggcaattccgcccttatattttatggttcgcgattccttttggcgtactttgctgcttaacgttttatacgccggatttcggctataccggcaagctcatttatgcctatgtttcttataccttattatcgctggtttatacggcgattaacgttccgtattgcgcgatgatcaataatatctctaacgattcccgcgagcgcgtttcgcttcagtcctggcgctttgcgctcagtacgctcggcggtctgattgtctcgctgaccgcgctgccgctggtggcctggctgggtcagggtaatgtgcaaaacggctatttttacaccatgattgtgatggggtgcctgagcatcattctgttctttatctgcttcggcctgacgaaagagcgctacaccacggatatcgcggtcaacaatcaaagcagcattcttgacgatctgaaaaccctgctcaccaacaaggactggcgcattctcttcgcgctcaacgtcgttaacctgattgcggtgctgtttaaaggcgggaccacgctctattacgtcaacaacattatggggcgggcggatctgggcagtctgctgctgaccaccaccctggcttccggcgtgctgggggcgatgctctccccgtttatctttaaaaatattgataaagtgaaagggtttaaaatctcgatggccattgaggcggcgctgctgataggcatgtacttcgtcccgtcggggaacgtggccgctatctttgcgctggtgattatcatcaatattattcagctggccgccacgccgctgcagtggagcatgctgtcagatattatcgatgcggaagagaaacgcagcggtaaaaagctcagcgggatcgttttttcaacgaacctgtttgccatcaagctggggatcgccatcggcggcgcgctggtgggctatatgctggcatggggcgactacgttggcggcgcagcgcagcaaaccgactccgcgctgcagatgatcaagctgctgttcaccgtcttccccggggtgctggtggcgctgctgattgttatcatgagcaagtacagcctggacgataaacgcctgtcgcgcctggcgcaggacgacctcccggcgtaa

SEQ ID NO: 178081 - DNA, 1644 bp, Klebsiella oxytoca
atgattcagaatcctgtttttaaaggttttaatcctgaccccagtatctgtcggcgcggcgatgattattatgtggcggtctcttcctttgaatggtttcccggtctgccggtttaccattcgagggatttaaaacattggcaattacttactcacgttcttaccgatgataataatccggatttaaaaaagctgccctccgccaaaggcatttgggcaccgagcctgacctggtgtgaagaggaaaagctgttctacgttatttatggcgtgatgaattccatgaattcacgttatttcgatgtagataactatctaattaccgccagtgaaatcaccggcccgtggagtgagccggtttatctccactctgccgggttcgatgcctccattttgcacgacaccgacggaaaaaaatggatcgtttccctggagtgggaaacccgcgaaggttacgaaaaaccgggcgccatttgcctggtggagtattcgccgcaaacgcgaagcgttgtcggctatccgcagcggatctggcgcggcggtaccgatcgcggctgtattgaagcaccgcatttgacgcgccgcggcgactattactacctgatggtcgccgaaggcggcaccggctacggccatgcggtcaccatggcgcgcgcaacgcaggtcgccggcccctatgaaggcgatccgcaaaaccccatcgtcacctcctggccggagaactttaacgcgcgccacgacgcagaccatctcaaaccacactacttcaatccgcaaacctatctgcaaaaagccgggcacggcagctacgtcgagaccccgacgggcgaagtctggttaacccatctttgcagcagacccttccgccaggcgctgcgctgcccgctgggccgcgagacggcgatacaaaagatggtatggagcgacgatggctggctgcgcatggcggacggggggaacctcgctcagcaccaggtggaagagtctaatctgccttctcagccgtttccggctaaaccagacagggatgattttgatgggcagacgctggataacgccttctatgcgccgcggatccgctttcagcgctttaccagccttgaacgtaaagcgggctaccttgccttacgcggccaggagtcgctgagctcgctcaataaagtcagtctgctggcgaaaaagctcacctcggtatacgccaccatcgtcacgaagatggatttcagcccggagatttatcagcacagcgccggcctgacgctctactacgacaacatgaactatctgtttttgcataaaacctgggatgaagcctccggcgcagcgcagctggccatcatttatatggataacggcgagcgtcacgacgacccgcagaaaatccgccttgcggagggagaagtctatctggcgatggcgattaacggccgggagatacggtgctcgtggtccgcggatggcgaaaaataccaaaacatcggcgcggtctacgacacctcgcatttttccgatgaatacagccgctacggcgagtttaccggcgcgtttgtcggcatggcctgcgtggatagcatgctgcatcgtaaagaggcgctgtttgacttctttagctaccgggcggtagaagacgcgataatcgagtaa

SEQ ID NO: 178082 - DNA, 375 bp, Klebsiella oxytoca
atgaaatgggtgagcgcaagcgaagtcattgcctttcatgatcgcattttacaacatctccccggcgttaaaggtatgtccgatcctggtcgggcggaagccataatttatcgtgtacagaaccgctttcactatgaaggggtgaacgacatttttgaactggctgcaacctattgggtcgctatcgcgcgtgggcacatttttaatgatggtaataagaggactgctttttttatcaccatgacgttcctggcccgcaatgggtatcttatcgctgatgaagatacccggttggaagaactcactgtgctggctgcgacaggcgaagctacggtagtggttcttgctgatgcgttacggcaattggcgctctaa

SEQ ID NO: 178083 - DNA, 222 bp, Klebsiella oxytoca
atgcgctcatacagtacatctgaagccagacagaatattgcggccgtcatggacgccgctgccagcggagaaccgattgaaattacgcggcgtgatggaacgtctaatgttttgatcagtaaggcggaatatgaaacgtttatgaatgccaaacttgatgcggagtttgattttattatgcagcgacacggccgcacagttaaggcgttgaccgatcgatga

SEQ ID NO: 178084 - DNA, 168 bp, Klebsiella oxytoca
gtgggcaagaagaaaacaaaaaaagcggtgctggcagcgtcgcagccgcagccgcagccagaaaccataacaacggttagctttggttatgaagagatgttgagcgaactggaggcgatcgtcgcagaagcggagatacggctccaggaagaagaaagcgtcgcctga

SEQ ID NO: 178085 - DNA, 159 bp, Klebsiella oxytoca
atgagtcataatgcggttgatggcagacctgtttcccccattgtgccgcttgcttttgggggcagcgtcgtggacagtcattcatctgtcctgtatttcaacctgccgtatgaagcaaaaacccccgccatcgctggcaggggttttgtagaaagttga

SEQ ID NO: 178086 - DNA, 1002 bp, Klebsiella oxytoca
atgagtcattaccagccgccgtttagcattactcctgccattctcaatctggttgttgagattggtgagctgttagggcactggtcagctcaaacgggacgagcctccccccttctgcgaaaagagaatcgtattcgtacgattcaggcgtcgctggcgatagagcataacagcctgagtaccgatcaggtcactgcgctagtggagggtaaacgtgttcttgcgccagcaaaagatattcaggaagtgagaaacgctcttctggcatatgaaaaaatgcctacatggaaaagccaccggttaaccgatcttttgaccgcccaccggacgctgatgatagggctggttgataaccctggccagctgcgtgacggagatgtcgggatcttccgggatacccgactggttcatatggctccccccgcctctcaggtcgagcgtttgataaacgagttgctgctatggctgaaagtcactgacattcatccgcttatcgctggagctgtcttccactacgaatttgagtttatccatccatttgccgatggtaatggccgaatgggacgcctgtggcaaaccttaattcttagccaatggcgcgcggagcttgcctggctaccagttgaaacgttgatgcattatcagcaggagcgctattaccaggttttagggatgtgtgatagccagagtgacagcacgccgtttattgaatttatgctggaaaatatggttatcgcgttgaaagatggcatgggacaaacagcttctctgtcggaagaaatgtcggaagaaatgtcggaagaaaaagtggaaatgctggcggccgttgaggaacggatcctcaagcttttgtctaaagaacccacgcgcaccgcgaaagacatggctcaggaaatagatgtttctgccagaaccgttgagcggtatctgaagacgctgcagcaaaagggaagattacagcggaccggcgcaaaaaaaaggggagcctggcgcattctttag

SEQ ID NO: 178087 - DNA, 561 bp, Klebsiella oxytoca
atgtcgatgaatcagtggatagggatgctgttatctgcgggaatgttgctgtcaggcaccgttcgtgccgaagagtgccagattacgctctcccggacaaaaattgattataaccagatacgccgtgatgacattgtttctactacccagaattggcacaaactgtctgagtgggaagtgaatgtgaatgtttcctgttctgaaatgcatcagatggcggtgctggttcagggttctgctggcgaaaaaggtcgctttttgtttggcgctcgcggtggggttgggcttaaggttgaaaatattaccgttgatggcaagtcctacagcgctggaaaaacagtggaccagctgaactttacgccggagagcgggacaacatctcctctgtatgtgcgtaacaatgaggcggtgatcgccgtagaaaataatgttgtgccgcaagggaagcagatgagttttcgcgtgatgctgttccccgtgctcaacgagagtatgttcagtggaaataccgataacacaacaattgaagcggatatcgcctggcgactgctcatcaaatag

SEQ ID NO: 178088 - DNA, 2415 bp, Klebsiella oxytoca
atgtttaaaaaacgccgtcttacttctcgctcctgtgcgtcattgtgtggaatcttgccgctggctgcgctctgttccgttgatgtacaagccaaagagataacgtttgataccgagatgattcagtcacgcggattgaatgtcaatctcaaccgttattttgcgcgagctccgcgctttctccccggtacgcattccgtgcaggtgaagattaacggtaaggataaaggaaccgtcgcggcgcgttttggcgaggatggtacgctgtgcgttgatcatgattttattgagttttccgggttaatgccggtccccctgaaaaagaatgaagagtgccatgacatcgtcaatgactacgcgcaggcggtagtgaaagccctgccaggccaggaaatggtcgaactgtatctcccgccggaggcgctgaacgggatgaatggtgatatcaaaaactttcagcacggcggaatagctggattgctcaactatgacctgttcagtacccgcagcgaatatggcggcagcgataccaatctctattctcaggccagtctggaagggggcataaacatcagcgactggtcgttgcgtagccgctatatccttaccgacgataatggcgataagaatgctgaaagtgtttacacctttgccgagcacgtttttgacgcgttgaagatgactgcgcaggtcggggagatcaatgccagctcatatgtcctgagcggagccccgatcgttggcgtacagctgatgcctacccgtgctttgcagggcagcggaagcggcgtcagcgttgcaggaatggcgcataatgctcaggcccgcgtggaggtacgtcagagcggacgacttatctacagcacgctggttccggccggaccgttcacactcgatgatgtaccgatagcgagcagtaatgtggaactggaggtgacggttattgaatccgatggttcaagcaatcgctttattgttccagccgcatccgtcatggcgcggaagctttcccggccgcagggcctggccgcctcttttggtcagatacgcgatattaaaggggattatgaaaatccctgggtgcttaacctctctgacggttggcgtatattgcctcggctgaatctgctggcttctggtgcggcaacgaaaaattaccttggcggcggcgtccatactgaatatctgttgaccgataactggagtgcctccaccagcgtggccgcaagccaggaaaaattcggcgagaaaaacagcggtgtgaaaactgagctacagagttcacttaagctggcagaatctttaagtgcgtcagcgagcgcggcacactttacccccggctatcgtgaactgacggacgcgctgaacgatgattttcaaccctatagcaatacgtattccaccagtttggcctggtttacgccgcctggggggacatttagcgctggttttaactacaaccaaagcagaggggcgggtaatgattcccgctacctgttgctttcatggggcaggagcttcgatcgagccaccgtttctgttaactggcagagagcgatggggaacaaagacgggcgccaggatgatgatctgctctacgttaacctgagcattccgtttggcggttcgcagcgcgtcagtagctatatgcgtaaacagggcaaccgtaacagctacggcgtacagaactctggcgcactgtcacaggattcttactactatatctccgtcgatcgggacaggggagagagtgagaatagcgttaacggcaacctgagcactaacttacattacactcgattaggcattggcggcgggcgcgtgggttcccgccaccgtaattataatgccacgctctcaggtggggttgcggcgcataaaagcggcgtcaccttcacgccttataccattcggaatacgtttgccattgcaaaactgagtgaatcgaaagctggcgttgaaatcagtactccgcaggggacggtctggaccgattattgggggcaggctgttatccctgggctgaatgagtggcgtaattcgcgcattgaaattgacgcgaacaagctgcctgcgagtatgacgctggcaaatggaacaaagtatgtggcagctgcgcatgcttcggtgagcgaagtcggttttaaagtcctgaataaccgtcgggtgatgatccgcgttaagcgtgcggataacagggcgctggataagggattatccatcgttgatgagaaaggcaattatattgtcaccagcgtggatgacgggcatgttttccttaatgaggctgagcaggtttcggcactgtatgtcatggacgacgataataaccgactgtgcaagattgattacatcttaagcgacaagagggatgaagacgcattttacgaagaggtggacggcgtatgtcgatga

SEQ ID NO: 178089 - DNA, 627 bp, Klebsiella oxytoca
atggtgccggaaacaagtttattagtcattgatgaggcgactcacagtggcacaatgaacgtgaaaaatacggatgcgcaccccgcattattgtatacaacggttgttgatttgcctgatgaaagtaaggatttaaagctgatacctacgcaacccgtggttcgcgtagaacccgggcaaacgcaacaaatccgttttattctgcagaataataaaccattggacgtcgagcattttaaacgcgtgacgtttgaaggcattccgccaaaaagtgaaaataaaagaattaaaatcggcttcaatattcgtcaggatttacccgtgctgattcgccccgcgggccttcccgttgtgactgatgcgtggaagtatctgcagtggtcaggctcaggaaatactgcaaaagtcgtcaatcctgataaatatgtcgttcgtctggctcccgagatagtttttcttccctctggtacgaaggggcatattagtaaaagttacatcttgccaggagaaacgttaaatatcaccgtttcaaaaaatattaatggtgataataaagttcaattctatcctgctagccgctatggtattgaagtgcctagttttatttcggacctgaatgcaaaataa

SEQ ID NO: 178090 - DNA, 678 bp, Klebsiella oxytoca
atgaaaaaaacacttctggctgccattctggcaatgagcgcgacttcggctattgctgctaatcccactgctgtattaaaagtaaagggtactttaacaaacgcagcatgcacacccactctggataatggcggcgtggtagactatggcacgattaatctcggtgaattatcttccacagctgttaatcagctggggcagaaaaatatcaacctgaccattaactgtactgccgcaaccaaattatcctggaatttgattgatgagcgtagcagttctaatgctaaattaaccgttgaaaatgctactgctcttggtaactccctggatgatgagcgcgtgacttacggcgtgggcaaggcgggtaacgtcaatattggttcctatggcatgttcgtaaaagtggatagcgtaaccgctgacggcgaaggtgtgaccactattagcgctgattattatgatacaggtgttaagtgggccaagggctccggcggtatcaccgcaggctctttccgcgacttttctgttgcggccttcggttctgaaacaccgattgcattcaaaaccgcgactttcccactggtaacgtctctggctattcaaaacaccagcacgctggctattactgatgacactgcgctggatggcgagttgactatcagcctgcgttatctgtaa

SEQ ID NO: 178091 - DNA, 564 bp, Klebsiella oxytoca
atgggcaaaaagattctgatgctggtgggcgattacgccgaagattacgaaactatggtgccgtttcaggcattacaaatgatcggtcatcaggttgatgcggtctgtccagataaaacaaaaggcgacttcattatgaccgcgatccatgattttgacggcgcccagacctacagcgagaaacccgggcaccgctttgttctcaacgccgattttacaacggtgaaagaacaggattacgacgcactattaatccccggcggccgggcgccagaatatctgcgcctgaatgcggaagtgcttaaactggtgcaggcatttgacgcagcgcgtaaacctattgctgccgtttgccacggcccccagctgttggctgctgcgggggtattaaaaggccgtacctgcagcgcctatccggcctgcgcgccggaagtgcggctcagcggcggacattttgccgacatcggtatcgatcaggcgcatgtggatggcaatctggtgaccgcccccgcctggcccgctcatccgcaatggctggcgaaatttgccgaattgttgcagtag

SEQ ID NO: 178092 - DNA, 777 bp, Klebsiella oxytoca
atgagtgctatcacgctggaaaacgtatcgctcgcctttgcggcgaagccacagccgttcacggtgctggaagatatcagcctgtcgctccacaaaggggaatttgtggtgttactggggccttccggctgcggtaagtccactattcttaacctggtcgccgggtttaacaaaccggatcgggggcgcgtggtggcgggggggaaaccggtccgccagccggggccggatcgcggaatgatcttccagcagcctaacctttttccgtggctatcggtactggaaaacgtcacctttggtcctcggctgggtaagcatcgcaaagatgaaattaacgcccgtgcgatggaatggcttggactcgttggcctacaaggctttgagcaccattcgccctggcagctttcaggcggcatgaaacagcgggtagcgttggcgcgcgcctggctacccggcccggatgtgctgttactggatgaacccttcggcgcgctcgatgcgcaaacccgtctgatgatgcaggaactgttgcgtgaggcctggcttaataccggcaccactctgctttttgtcactcacgacgtggaagaggcgctattcctcgccgatcgcattctgattatgtcagcaaacccaggaaaaattgttgaggagatcgccctgccttttggccgggaacgtgatatcgagaatctgtctgaacacccggattacagtgggatcaaacatcatgtactgcaccgggtgcgtaaggaggctaaacgccatttaggttga

SEQ ID NO: 178093 - DNA, 771 bp, Klebsiella oxytoca
atgagattgagttatcacattgccatcagcgtcgtttcggtcactgttttctttatcgtctggcaggtggcggcctcgcggcaatgggttgatccgctgctgctgccatcgctaacggatataggcctgacgaccgaagagttgctggcggatggttatcgtcaggtgccgctgtgggagcatgttgccgtcagcctggcacgtgcgttaagcgctttttctgtggcaatcatcatcggtattcctctgggattattgatggggctgtcggaaggtctggcggcggtgctgaatccgtttgtgcagtttttgcgcccgctgcccaaaattgcccttattccgctggcggtcgtctggctggggattggcgaggcctcgaagttctttctcatctttattgccactttccttagcgtggtggtgggggcatctgctgcggtagagcgtattggtcgttcgcgcattcgtgtggcgcaaacgcttggtgcttcacgcaaacagatctttctgcgcgtggtgttaccggatacgttaccggaactgttcaccaccgtcaggctgtcgattggcattggctggacgtcgcttatcgcggcggagatggtcgctgccagttcggggctgggttggatggtcattaacgccagctcctatttacgcaccgatatcgtcatgcttggcattttgctactgggtggcattggctacgcgctggatttactgctgctggggctgcagcgcctgtttgtaccttgggcggggaaagaataa

SEQ ID NO: 178094 - DNA, 1008 bp, Klebsiella oxytoca
atgaataaaagtctctgtgtcttacttgcagcgggtggcctgtgggttaatagcagctttgccgaaacgccagcggaagttcgggtggcatatagcggcggttctcaggtgctgatgctggctaaggccgatggttctttggataaggcactcaacagcaaggtgaaatgggtgcaatttgcgtccggtgctgatgcgttaaattactttgccagcaatgcgattgatattgctaattttggatccagcccggcaacggcaggcattgtcagaaaactgccggtggaaattatcggcgtctctggcgtgattgccagctacgagcgtttaattggtaaagacggtattgccagcattaaagatattgagggtaaacgcgtagcctatccgccaaactcgacggcgcaatatgcgcttgaggccgctatcagcgttaaccatctcgaccgcagtaaaataacgttattgccgctgcgtccggcggaaatggtcgcagcctggaaacgcggtgatatcgacgcgggctatgtctgggcgccgtttgctcaggaactggagacttctggcgggcatcaggtgttcgcaaccaaagatctgcaaaaagatggctacctgatttataacaactacgttgtgcgtaaagcttttgctgagcagtatccgcaaaccgtcagcgcgttcctgcgtgttcatcagcaaaaagtcgatgagtttaagaaagacccggagcgcgcggcggccattgttgcgaaagaggtgggcgcgccggtgacgaccgccgtcaatacgttgggtgggctggaatatcccacgctgagccagcagggtacggcgcaatggttggggaacggtacgcaaaccaccgacagcgggattgggaaagcgctgaccaaaacctctcacttccttgctgatatcggtgagattcgccaacgtgatatcccggccagctgggacagcgccattaactcccgttatatccgtgatgcagcggtagccgcgcaatga

SEQ ID NO: 178095 - DNA, 720 bp, Klebsiella oxytoca
atgagtacaccatttctgctgggaattcttggcggcatggggccgctggcgacgctggatctgatgcataaattgctgcgggcaacgcccgccagcagcgaccaacagcaaattccccatgtggtatggaatgtgccgcaaattgcggatcgccagcgggcgctggcgggaacggggccatccccgctgccgcagttgttgtacggtgtggaacagctgaaccgcgtgggcgtcagtcatattgccattgcttgtaatacggcgcaccactggtatgaggtgctggcgcagcatagcgacgcaccgttgctgcatattgtggacgccacgctggcggtattcgacgggaaagagaaaccccggcgggtcgggattattgctacccagggcacgctggatgccggttggtttcagcacggatttaccgcgatggggatcgaaagcgtacagccgacgcaagaagaactgcggcagtggtttgtgccgggatgctatgcggtaaaacgcggcgaactgcgtaccggcggagaactgctgagtctacaggcccaggcattgcgcgatcgtggcgcagagcggctggtgctggcctgtacagaagtgccggttgcgctggctgaggtgacctcaccgcatctggccgtgtcaattgatcccgcagaagcgctcgcccggcagtgtgcccggctatggctggcgcaacgcgagacatggcattaa

SEQ ID NO: 178096 - DNA, 1014 bp, Klebsiella oxytoca
atgcatctggcgcgtttcccccggcttcattttggccacttcccgacccctctggagcctctcacgcagctttcacgcttgctggaggggccaaatatctggataaaacgagacgattgcacaggcctcgccactggcggcaataaaacccgcaaacttgagtttttgctgggcgatgcccaggcaaaacaggcggatattatcattacccagggcgccacgcagtctaaccatgtgcgtcagaccgtcgcggcggcagccagactgggtctggaaacgcatatttttctcgaacaacgcgtcacgacgctgggtgatgagtatcagcaatccggcaatgtgctgctggacggtttactcggcggcaaaattatcgctcatcttcccggcggtacggatatgcagcaggcaatggaacaacacgcggaaagcctgcgagccaggggccacaccccttacgtcatccccggtggaggctcgaacgctatcggcgcgctgggctacgtctcctgcgcggaagaactgctttggcagtccagccagctacggctgcgcatcgatcatatcgttcatgccaccggtagcgcaggtacacaggctggcctgattgcgggcttaactgccacgcacagcggtattcctctcctcgggattagcgtccgcgctccgcgcgaaaaacaggagcacaacgtctggcgtctggcgcagcagacgcgggaactgctcggtgtaccgggtgaattgccgcgtgaggcggtggtggcgaacagtgattatgtcggcgaaggctatggcttgcccaccgaagggatgcttgaggcgctgcagttgctggcgcagcacgaggggattctgctcgaccccgtctattccggaaaaggcatggccggattgattgatctgatccgtaaaggtcatttccgcagggatgagaatgtggtgtttatccatacggggggaagtgcaggtctgtttggctaccgtcaggtcatcgccgattctttgccatcatga

SEQ ID NO: 178097 - DNA, 1023 bp, Klebsiella oxytoca
atgcctttattttcggatcattatttacgttcgcttttgcagcgccatctggtaagggttggcaccggacctgatatcgctcaaaaggtcgcggataacctggtcgaagcctcactaaaaggccacgactctcatggcgtgaccctgttaccgcgctatattcgggccattctggcaggggatttgaaccctggcgccacgctcaccatgttgtctgatgccggaccgatcgtctcttttgatggggggcacggcttcggccaggcgttgggcgaacaggccatggccgtgggtattgagcgtgcgcgcgagtttggggtggcaataatcggattgtctaatacccaccatcttggacgaatcggcgcatgggcggaacaggcggcggacgccggactggtctcgctccattttgccaacgtggcagcgccgtcggtcgtactgcctttcgatggactcggtgcccgactcggcacaaatcctttttgtgtcggggtaccgctcgcgaaccggcccccggttatccttgacttcgcaaccagcgccatagcaggcaataaagcgcgcatcgcatggaatgaagggcgagccatccctgaaggatgtgcggtagatgcgaacggacaacccaccaccgaccctgcggtattaatgacggaaccgttcggtgccttgctgccttttggcgggcataaaggcgcaggattgtcgctgatttgtagtctactcggcgctgcgctgaccggcggcgaaaccgaaagccagcaaattccgccacgtgccggaataatcaacaatatgctatcgattttatttgatcctgcgcggctgggggcgcaggagagttaccagcaggcgctattagcgcaggtggactgggtgcgtagcgggcaggaagggcgcaatgtgcagatccccggagagccggaattgcgcgcgtatacccgccgtcggcaagagggtatctggatcgatgaggtgagctggcaggcatttgtcgccctggaagcattaaatacctga

SEQ ID NO: 178098 - DNA, 1008 bp, Klebsiella oxytoca
atgaataaaacaagcagaatactcgcctgtacgctagcgctttccgccctgggcgggataagccagccggcattagcggaaggaaacattagtatcgcgcagcaatttggcatcggctatttaattcttgatgtggtacgtgaccagcggcttatcgaaaaagagggtcagaaagaggggctggatataaaagtagagtggcgcaccatttccggagtgaccgggatgaatgaggccctgctctctggcgctctggacgttgcgtcagccggggttcctcccgtactcaccctatgggatcgcaccaaaggtaagcaaaatgtgaaagcgattgcctcgctggggtcgatgcccaattatttgttgagtaataatccggcggtaaaaagcattaaagatctgtccgcaaaagatcggatcgccgtaccggcagcaggcgtcggttttcagtctcggacattacaaatcgagaccgcgaaattatatggtgacggggacttcaaacgcttcgataaaattagcgtcagtttaccgcatccggacgccagcgcggcattaattgccggcggatcggagattaccacccacttctcaagcccgcccttccagtatcaggcgctggaacataaaaacgtgcataaagtgctcagctcctatgacgtactggggggacaggcaacctttaatgttctctataccacccagaaattccatgatgaaaaccccagaacctataaagcgttttatcgcgcgctcagcgaagccgcaagtattattaaccgtgacaaaaatgccgctgccgaaacttacattcgcgttgagaaatcgcggctgcctttaccgctggtacaaaaaattgttaacgatcccgaaataagctttacggtttcccctgaacgtactggcgtatatgccgaaaaactccatgagcttgggatactgaaaaataaggccggctcgtggaaagattatttttttaacgaagcatgggaaaaccccggcagctaa

SEQ ID NO: 178099 - DNA, 843 bp, Klebsiella oxytoca
atggtcaatcagcaaattgatggcccgctgctgcaggtcagccatgtcgatattgaataccgcacgcgtgaacgccgggtacgcgcgacgcacgatgtcagttttgatgtctggcctggggaccgctttattctgcttggcccctcaggctgcggaaaatcgagcctgttgaaagccgcaggcggttttattgccccgcgcagcggtcaaatttcgcttgcagggacgccagttagcgcccccgctccggaccgcatgatggtattccaggagttcgaccagttgccgccgtggaaaacggtgctggaaaacgtcatgtttcctctgctcgccagccgcaaagccagccgttcacaggcaaaagagacggcgctgcatttccttcacaaagtcggtctggcggaatttgctgacgcgatgccccatacgctctccggcggcatgaagcagcgcgtcgccatcgcccgtgcgctggcgatgaaaccgcgcatcctgctgatggacgaacccttcgccgccctggatgcgctgacgcggcgcacgatgcaggaagagttgctgacgctctgggaagaagagcgctttacgctgcttttcgtcacccactcgattgaagaggcgctggtcgtgggtagtcgtattgtggtgctttcgccgcatccagggcgcgtccgggcagagcttaattgtcatcagttcacgcttaatgatttcggcagcgaggcgtttcaacacgcggctcgtcatattcaccatctgttattcccgacgaccggcaacggtccgtctcactcatccggcgaggagccagcgtatgtcccagccaccgtacattcgtcctga

SEQ ID NO: 178100 - DNA, 867 bp, Klebsiella oxytoca
atgtcccagccaccgtacattcgtcctgaattcgaacgcgaattaccgccgctacgtaatctgccggtagaaacgccgctacccttaagccagcgcctgtggaatcaggcatggctgcgtaagtctgtgattgtcgccctggtgctggcgctatgggagatcgccgcgcgaatacagcaaaacgatctgatgctgcccggggtatttcagacgctgcaggcgttcagtgaagacctgcgcaatggcgaactgccggaaaaaatcgtcaattcactcagtaccctactgaaaggatatctggcgggcagcgcgctggcgctgattgccagcgccctggcagtgaccacgcagtttggtcgcgatctgctcagcacattaaccgcgatgctcaatccactgccggcaattgcgctgctgccgctggctctgctgtggtttggcctgggaaatgccagcctgatatttgtactgatacattccgtcatgtggcccatcgctctgaatacctggtccggatttagcagcgtgccggaaacgctgcgcatggccgggcgcaactatggcctccgtgggccacgctatgtgatcacgattcttattccggcatcgttgcccgccatcctttccggtttgaaaataggctgggctttcgcctggcgaacgctgattgccgccgaactggtattcggcgcctccagcggcgaagggggtctgggctggtatatattccagaatcgcaatgagctgttcaccgaccgggtatttgcagggctgttaacggtcatcgcgattggtctgctggtggaaggcatcgtattcgccagtctggaaaagatcacaattaagcgctgggggatgcagcgttaa

SEQ ID NO: 178101 - DNA, 1524 bp, Klebsiella oxytoca
atgacgccattgccgtgctggaggatgttgaagtgggtgaatattatgactacgagtaatttattcacgcttccctatgcgcccggcggatgggcgggcgacgcgccctccgcgcgtgattatggtctgcccgacgcgcgcgatctgcaggggctgcctgacgatgcgcccgcacgcccgcgtgcgaccgaagccgcttacgcgccgcgggtgctgccattgggccaggagagcagggcggatatagcgcctcgcggattcgcgcctttaccctcttccagcgtaaaaacggcgccgccggcgcgggttggacagatcccggtggaacgcatccgcgctgattttccgatccttagcgaacaggtggacggacatccgctggtgtggctggataatgccgcgacgacccagcgcccgaagcaggttatcgatcgtatcagccactattatttacatgagaattcgaacgttcatcgggcggcgcatacgcttgccgctcgttccaccgatgcttatgaagccgcgcgtgagaaagtgtcgcgttttatcggcgcccgcggcccggaaaatatcatcttcgtgcgcggtaccacggaagggctcaatctgatagcgcacagctacgtgaagccgctattacgaccgggggatgaaattatcctgacgttgcttgagcatcacgccaatattgtaccgtggcagcttattgcccaggaaacgggcgcgacgatccgcgttgcgccggttgatgagcacggtcagctgatcgttgaggaatatatccggttgttcaacgataagacccgctttgtctccgcgacccacgtttctaacgcgctgggtaccgtcacgccggttcaggagctggtgcagatcgcccatcgttttggggtgcgcattgccatcgacggcgcgcagtctatttcgcatatcccgaccaacgtgacggcgctggatgccgatttcttcgtcttctccggccataaaatttttgggccgaccgggatcggcgtggtctatggcaagcaggaggtgctggaagaggcgcgcccttaccagggcggcgggaacatgattgccgacgtgacctttgaactgacgcgctatcagccctcgccgaataagtttgaggcagggacgggcaatattgccgatgccgtcgggctgggggcggctatcgattatgtcacctcgctggggatagaaaacattgcgcagtatgagcacgccttactggagtatggcatcgcgaagctgtcggctattccgggcctgacgctggtcggtaccgcggcgaacaaaaccagcgtcttatctttcgtgctggcgggtcatgaaaatgcagccgtggggcgctatctcagtcaggtcggcattgccgtgcgatccggacatcactgcgcgcaaccgatcctgcgccattttggttatgagagtaccgtccggccttcgctggctttttataatacgccgcaggaaattgattttctcgcagagcatgtcgcaaggtttgcttcgcgatag

SEQ ID NO: 178102 - DNA, 945 bp, Klebsiella oxytoca
atggcagaacaaaaaggcattaatgcactggggcgtgaagccgcgtatcagttagcgaacgtgaccaaaacggcaccgcaatttgcggcaatcaccccgcgctgggtcagccgttttctcgattataagggcctggaatcgggaatttaccgggtgaacaaggtcgtggagggggagacgccgctggatgtattatgcagccaggatccgtcgcgcgttgaaataccccagggctatatcgagtatcagaccacgccgcgtgaataccagctggattcgattacgaccattataaacgtcgataccaaaatcgccgatctctacagctcgccctacgaccaggcctcagagcaaatcgcgctggcgattgaaagcctgcgcgagcgccaggaaagtcagctgatcaataacgatgaatatggattgctgaaaaatatcgacgactcgcagcgtattcagacccgcaatggccgtccaacgccggatgacctggatgagctgttgtccaaagtctggaaggagccctccttctttctggcccatccgcgcgcgattgccgcatttcagcgtgaggctacgcgacgcggcgtgccgccggtcaccgtgaatttgcatgggggcacgtttatcctgtggcgcggtattccgctgatcccttccgacaagctgtttgtcgatggtctgaaaaacccgaaaggccagggcggaaaaaccaatatcctgttgattcgttccggtgaaagcaaacgcggcgtgctgggactttatcaggaagggctgccaaacgaacagtctcgcggtttgtcggtgcgcttccgggggatcgacgataacggcgtggcttcctatttactctcactttattgctccgctgcgatcctggccgatgacgccattgccgtgctggaggatgttgaagtgggtgaatattatgactacgagtaa

SEQ ID NO: 178103 - DNA, 1176 bp, Klebsiella oxytoca
atgagcagaccgagcattatcccgggtgaccgtctgacggagctgacgcatgcggaaattgcccgctacagccgccacctgctgctgccggaagtcgggcttgaggggcaaaagcggctgaaggctgcccgcgtattgcttatcggcaccggcgggttgggggcgccggtggcgctttatctggctgcggcgggggtcggtaagctggggattgtcgattttgattttgtcgacgtctccaacctgcaaaggcagatcattcacaacaccaaagatatcaaccgacccaaagtggcttcggcgaaagacaagattaaagccatcaaccccgagatacaggtggtgacctataacaccaccctgagcagcaaaaacgcgctcgaaattattggggaatatgacctcgtcgtcgacggtacggataattatcccacccgttatctgatcaacgacgcctgcgttttgctgggtaaaccgctggtctatggctccattttccagttcgaagggcaggccagcgtcttttatgccggggaaggcccgtgctaccggtgtctttatcccgagcccccgccgccggggctggtaccttcctgtgccgaaggcggcgttgtcggcgtgctgccggggattatcggcaccattcaggcggcggaagcgatcaaactaatcgtcggcggcagcgagagcctgattggccgcctgttgctcttcgatgtgtggcagatgaagcaacgcgagctgcggctggagagggctcccgactgcccggtatgcggtgagcatccctcgattcatgcgctcatcgactacgaggagttttgcgggctgaaacctgatgaagcagaagttccggttgaaagcgtcacggcgcttgagcttcacgcctggatagaggagggaagacccctgcagctgatcgacattcgtgaaccccacgaaagggcgattgcaaaatttccgcaggcaaaagtgatgccgctgggccagatagtcagacgtatcggtgaattcgacccgacggtcgatgcggtatttctgtgcaagatagggcagcgcagtattttcgccattcgggcactccagcgcgcaggttatcaggggcgcgtgatgaatttaaaagatggcctaaacgcctgggcacgggatgtcgatacccgtttgccgcagtactaa

SEQ ID NO: 178104 - DNA, 291 bp, Klebsiella oxytoca
atggcatcgacattactgattcccactgcgctacgcgccttcaccgacggtcaggggaaagtgatcctcgaaggccacaccgttgggcagctggtcgcagcgctggcggagcgatttcctgacattcagccgcatctgtatgacgatacgggcgcgctgcgcagtttcatcaatctttacgtgggagagaacaacattaaaaccaccggcgggctggagactccggttagcgatggggcggaagtgctgctggttcccgccattgccggcggcgtcgggaaggcgatatga

SEQ ID NO: 178105 - DNA, 429 bp, Klebsiella oxytoca
atgattgaattaactcaagaaatcaccaggctgattggcgctgaaggggaaaaggcctatcccaacgaatgctgcggtgcgctctttggccacttttacgcgcagggcgatgcccgcgtgacggcgattttccccattgttaatgctcgcgagtcggaggagcagtaccaccgttttgtcatcaccgccgatgactccctgcgggcggaacgcgctgcgctggctcaggatgtggacgtgatcggctattaccattcgcaccccgatcacccggccattccatctgaatttgatcgcgaacatgcgctgccgttttacgcctatatcatcgtggcggtcgcgcagcgcgaggcgggggcactgaccagctggcggctgacccaggaccgccagcgctttttgcaggaggacgtgcagatcgttttataa

SEQ ID NO: 178106 - DNA, 906 bp, Klebsiella oxytoca
atgaatttacttgaaacgatcggcgctactccgttaatcacgttaccctcttttgccgccgagctacctggcgtaacgctgctggcaaaagcagagtttatgaaccccagcggctcggtgaaagaccgcgcggcgaaagcgatggtgctggacgggattgctcgagggttattaacgccgggtaaaacgattattgatgcgaccagcggtaataccggcattgcctacgcgatgattggcgcggcgctgggatatcacgtccggctatatctgccgcagaataccagcccggagcgcaaacgtattattcgtcattatggcgccacgattgtggagaccgatccgctggaaggttctgacggcgcctatattgaagttcaggcacaagttgctgcgcatccggaacgttatttttatccggaccaatataacaaccccgtcaatccgaatacgcatttcgcaacgaccggaaaagagatttgggagcagagcgggcaacagatcacccattttgttgccggtatgggcacctccggcagcttcgtcggcaccgcgcggcggcttaaatatgaaaatccgcgcgtgaaaacgctcgccgtacagcccgcttcgccattccacggcattgaagggaccaagcatatggggagcagcattaaacctggcattctcgacgaaaccctgttcgacgacgttattcccgtcaccaccgaggaggcttatgcgagcacgcggcgcctcgcccggcgggacggcatttttgtcggcatttcctctggcgctaatgtcgccgccgccgcgcggctggcccgcacgctgccggcgggatcggtggtggtcacgctgctgtgtgatgtcggctcgcgttatctgactgacgctttctggaatgaaacccatgattga

SEQ ID NO: 178107 - DNA, 957 bp, Klebsiella oxytoca
atgccggaagcgggtgaattgtatctcatgccgaaaagagaaaataactggcatttaaataatgtcgtcgatgaactccgtcgcgttcgtcaggcgtggcgcgatgaacatgcgaaaaataattatcgtaataaacgtagtttaccttcccgggaaagcgttaattcagtcaccgataccttgataaaagtgctttatccgatgcgattaggtgatattgaattacgcaaagagggcgaagattattacgtcggtcatttgctaggcacctcgctagaccgattgaccgaagaagcggtcctggaactttattatcagtcagatgagcaggatgcgagtcacacgctgtcgcaggaggcggtcaggcgggttcagcagtttgccaaccgtttgccggtcatccgccagcgtctcgatcgcgatatcctcgcggcgtatcagggagatccttccgcgcgcagcatggatgaggttctgctctgctatccgggaattcacgccgtgatgcactatcgtcttgcccacgagctgcatcagctcggtctgcctctgctggcgcgaatgatatctgaaaaagcgcacagccagaccggaatagatattcatcccggcgcgcagattgatgacggattctttatcgatcacggaaccggcgtggtgattggtgaaacggccatcgtcggtaaacgcgtgcgtatttaccaggcggttacccttggggccaaacgatttattgccggcgatgacgggcagttgcaaaaaaactatcctcgccatccaatcattgaagatgatgtcgttatttacgccggcgcaacaatattagggcgaattactatcggcgcgcgttccagcattggcggaaatatatggctgacccgtgatgttccgccggatagtcatgtgcagcaggcccgggtacagcaaaaacatttcagcgacggtgacggaatttaa

SEQ ID NO: 178108 - DNA, 786 bp, Klebsiella oxytoca
atgcgcgctttatccgatgctcccgctaatgaattcgagccagtacgttttgtcctcaccgatatggatgaaacgctcacctggcagggccgtttgtcggccgccgcctatacctcgcttgaacaattgcagtccgccgggatacgggtgatcccggtcaccgccgcgccggcgggctggtgcgatcagatggcgcggatgtggcctgttgacggcgtcattggcgaaaacggcgggctttttttccgccgcaccgcggacgggcatggcatcgagcatcattactggcacgcggacgacgccacggcatccgtcgccgcccggctgcggaccatcgccgaccgggtcctggcagcgctaccggaagcccgtctggcggacgatcagcccttccgcctgaccagcctggccttcgcgcggcctgccgacccggtactggagcgccgcatcgtcaacacgctgcggcaggcgggtgccgacgctaccgtcaacaacttgtgggtgctgggctggctgggtggctacgacaagctgaccatgacgcgccgtactctggctcagcactacggcgtcgatatcgatcgggagcgggaagctattctctacagcggcgattcaaccaacgacgcgccgatgttcgcttttttcaaacacacggtaggcgtcagcaccgtccggcagtatctggatcacctccccgtagccccccgctgggtaacgctcggccccggcggcgcggggttcgtggagatggcgcaggcggtattcggccaaaaatccctctga

SEQ ID NO: 178109 - DNA, 654 bp, Klebsiella oxytoca
atgctttccgcggggctgaaattcaccattcccttaacgctgatctcttttattcttgggctgtcgctcgggtttgcggtggcacttttgcgtctgtacggcccggcctttttaaagccggtgatacggttttacgtctggctgattcgcggtacaccgctgctggtgcagctatttttgattttctacgcgttgccgagcgctgggctaaccattgatgccttccctgcggcggtgattggctttaccgtcaatattggtgcgtatacctcagaagtgatcagggcaacgctgctggccgtgccgaaagggcaatgggaagccgcccattccatcagcatgacatgggcgcagtcgctgcgtcgtattattctgccgcaggccgcgcgcatcgccgtgccgccgctctctaacacctttatttcgctggtaaaagacacttcgctggcgtcggtgatcaccgtaccggagatgtttcttgccgcgcagcaaattgcggcagtgacctatgaaccgctgattctgtacagcgaagcggcgattatttatctgttcttcagttcggtgttatcgcatttgcaagagaagctggagcggaaattagcgggtacgacagtaaaaggtcaggtcaatgataacgctctccagcattga

SEQ ID NO: 178110 - DNA, 753 bp, Klebsiella oxytoca
atgataacgctctccagcattgaaaaaagtttcgacggcagccgggtgctgaagaacatcaatttaacgattgaagaaggcacggtaaccacgctgattggcccttcaggcagcgggaaaagcaccttattgcgctgcattaatttgctggaaattcctcagtccggggagctgaccatcggcaaagagcgcatcacattcgcgccggacacgcggataaaaggcctggatattcgtcgtatcagccgccagaccggcatggtgtttcagaacttcgcgctgtttccgcatatgaccgccctcgccaacatcaccgaagggctgattacggtgcataaatgggatcgcgaacgcgcccgccgccgtggtgaagaactgctggataaagtcggcatgctgcacaaatgcaacgccctgccgaatacgctctctggcggccagcagcagcgcgtggcgattgcccgtgctctggcgccgtcaccggcggtgctgctgtgcgatgaaccgacttccgcactcgatcctgagctctccggcgaagtggtggccgtgctgcgccagctggcgctggaaggaacaaccatgatcatggcgacccatgatttacgtctggcggcgaatatcgccagccaggtggtgtttctggaagccggggaaattgttgagtccggctccgctaacgatttgtttttacacgcgaagagaccccgaactgcggagtttatcgcctctttaagcaccgcgctcccgtaa

SEQ ID NO: 178111 - DNA, 771 bp, Klebsiella oxytoca
atgaaagcactcgcaacattagtcgtcgccgggattatgcagcttggttttgcccacgcagcgctggcgcaggatgatttggcaaagattcagtccgctggcgtactgaaaatcggtactgaaggcacctatccgccattcactttccacaatgcttccggcacgctggagggttttgacgtagagattggccgtgaaatcgccaaacgcctgaaagtgagcccgcagttcgtagaagggaaatgggacggcctgatcgccggtgtcgatgcgagccgttacgacgtggtgattaaccaggtcggcattacgccagaacgccagaagaaattcgacttctccgagccgtatatcgcgtctaaagcggtgctgatcgtcaatgacaaaagcagcattaaaagttttgaagatctgaaaggcaaaaaatcggcccacacgctgaccagtaattatgcgcagatcgcgcgtaaatacggggcggatattgtgccgaccgatggctttaaccaatctgtggatttagtggtgcagggccgtgccgatgcgaccatcaacgacaacctgtcgttcctcgacttcaaaaaacataaaccggatgcgccagtgaaaattgtcgcaacccagtctgacgcggagaaatccggcgtgttgctgcgcaaaaacaacccgcagctgaaagcggcgattgataaagcgctggaagagatcaaggccgacggcacctacgaacgtatttcccagaaatacttcggtgcggacgtatcgaagtaa

SEQ ID NO: 178112 - DNA, 543 bp, Klebsiella oxytoca
atgccgtacaagctctatacagccgtgttgcttctcgctgcctcaagtttctctgcaacggcaatttctgcttcaaccccttcgattggcaatttgatcaatgaacgtttgtccttgatgaaagacgttgccggatataaagcgcaacatcaccaggcgattgaagatctacagcaagagaagaaggttctggagagcgccactgctgatgctgattcgctgggattaaaaggcgagagcgtaaggccatttattcaggcgcagatggacgccgccaaggcgattcagtaccgttatcgcgccgactggttggcggcgccggaaactgactggcggcctcgcccgcttcaggatgtccggacgcaaatcggccaacttagccatcgtattctgcaaagtgtggcggcacgattaaagtccgggcaacctctgacggaacagggccaggaggcatttatgcacgccgtgcagcagaagaatttacacaagcaggataagcatagaatctgggaaacaatgaaagggatttcgttgaaagattaa

SEQ ID NO: 178113 - DNA, 717 bp, Klebsiella oxytoca
atgacactggtgcgtgaaaacattacatcgctctaccggcagattgccgataccctgcggcaggaaattgccgccgggcattttcaacctggcggaaaactgccctctgaagctgcgcttgaacagcgatttgcggtcagcagggtgacggtacggctcgcgctgaagcatctgacagagcaggggattgtcgagcgcaagcagggaaagggaacctacatatcgggcaagaaggttgcacatggcatcaacgtcatgcgtagctttcatgagtcgctaaagcagcaggggctgaatgccacaatgcgtttgctggtcaaagaggaggtgccaacgccagagtcgctgcaatcgctgtttcaaatgtcccggtcgctgacgtttatttcacggctgcatctggtggataatgatcccattgcggtgggttacagtcatttcccggcatttcctcatgagctgagctgggaagagaccgagaaggaaccgacctgggtcctgttagaaaaagccacgcaacatcacatcagtcgctccgatattgccatccggctggccttcgcggataagggactcgttgacgtgctgggaaccgataaaaacgcgccgctttttctactggagcgaacatcctggtttgaaaacgggcagtgcgctgagaactctcgctttttcattcgtccggaacgctacgagtttattttgagcaacagctga

SEQ ID NO: 178114 - DNA, 807 bp, Klebsiella oxytoca
atgacgctcagcatgacgaattttcaaccatacgcactggcggtagacaatatcacttttcgctatcccggcggcgcgccggtattcagccatttcagttttcatgcccgccagggagagtttgtggtgttgctgggcccctcggggtgcggtaagagcacgttactcaatctgctggccggtttcacagagccagagcggggagccgtgcggattggcggtgagcgtaccacgccggaaaaccatcggcttggctatgtttttcagcagccacagctctttggctggctgaccgcgctggagaatgtccggttcggattgcggatgcaaaggcgcgaggacgtggcctctcagcgccgacgcgctatgacatatctgcaacgtgtgggcctggtacatgccgcacatcagttgccgcaccagatgtccgggggcatgcagcagcgcgtgtcactggctcgcgcgctggcgctggagccggatgttctgttaatggacgaaccatttgctgcgctcgatgccatcacccgtggggacatgaacgaggagacactacgtctctggtccgccattgggcagacaacggtcttcatcacccacgatattgaagaggctgtgtttcttgctgaccgcgtcatcgttctgaatcgtgcacccggtggcgtacacagcgaattgtctatcgccttaccgcgcccgcgaagcaatctggagacgcgacagcttccggcttttgccatgtaccgtaatgaattactgaagcgcattaccgaagtgatgcagcagtccgacaaccactcactctaa

SEQ ID NO: 178115 - DNA, 996 bp, Klebsiella oxytoca
atgggtaaatcatttcttgctgtgctgatatcaggggttttattcaatgctgctgacgctgcggattcccagccgctgcgtattggctgggtctatgcgctggccaacgcgcctgcacttatcgccgagaaagagggtttttatcaccaggaagggctgaccgtcgagcttaaatcctttggtgatggtcccgtcatcagtcaggcgctggcggcgcatgaacttgatgcagcctatatgggggcgacaccggtattccagtggttttcgcgcgggctcaaggggcaaattatcgctaaggtgaacagcggacaggccgcgctgatcgttcccgcacagagtgctatttcgcggttggctgacctaaaaggcaaacgcatcgctggcgtcaaaaaagggagcggaatggatgttctgctgcgcggtgtggtgctgcaacagcaggcaggtctggttgctgacaaagatgctcagatcctgagtatgcccgccggtaacatgcccgctgcgctgcagcagggcgttgtggatgcagccttcacctgggagccctttgtcagcgaagcactgctgcgcggcgacgccagactgctgctcgatgtaaacaaagtccaaccgggttatccgtggtatgtactgatggcgttaccggagaccctgaaggaccgcccggacgatgtggtgaagcttatccgtgcgcatcagaaagcagtggattttatcaatcagcatcctgcagaagccgatcggatcatggccgatgcgtttaagctgcgggccattaaaaccgctgacggtaaaacgctgccgccggaggcgctggttcaggaagcccgtaaacgtattgagtggtctgtgtcactgacgaagaaagatggcgccttttttgagcagctgatgaaggactcacagacgctgggctacatgcaaaaggcgccagagctgaatgaatttgttgatacgcagtggctgacaaaagcagggataacgcagtga

SEQ ID NO: 178116 - DNA, 747 bp, Klebsiella oxytoca
gtgaagttcaaaccaaactggggctgggcttccctgcccgcgttactcatggtctgggttatcgttgcgagtcactatccctcttatgtgttgccgcaaccctgggacgtatggcgggaagccatacgctggttcagtgatggttccatctggggtcagctacaggccagcctgctggaagaattcaccggctttatgactgccgtgctgctggcactgattcttggcgtcagcgccggactttccgatcgcgtcagggagttccttacgccactgaacagcctgtttatggctatcccgcccatcgcatgggcaccgctgatgctgctgatcttcggcctgggattcgtttccatcgtggtggtgattgtcatcgctgcgctgttcccgatgtgtctggccattcaggaggggatccgcggcatccgtggcggtgaagtgcgtgcagcacgcacgctgggagctcgaccgtttcaactgcttcttcatgtctatctgcccagttccctgccatttatcaccgccgcactgcgcatcggattcagccaggcgtggcgtgcgctggtggcagcggaaatgctcggcgcctctcagggcataggctggatggttgccatgggcggacagacgggtaacagcagtcaggtactactgggaatttgccttatcgggcttatcgcctggttaatggaaaatcttgtttttcgccgcattgaacagcgctatcagcgctggcgcgcccaataa

SEQ ID NO: 178117 - DNA, 2364 bp, Klebsiella oxytoca
gtgagtcagttcgatatccgtgatgcaggcgattacatcgctccgaagggcttgtatgagcagaataaagcccggccgtttctgggcagtgtggcctgctcgcatactcagttgactgctggtgcgtgggaagagatccaactggtatataccgtgggcgccagcgggcttgctgacggcgcatggctgaagctcgcctttaaattttactcggactgggcgctgtttcagaccagcgatccctcggcagccaactatgtcagcgccgagtatcaggcaggcccgctagtgccaggacagagccctgccacggtccagcatttgaaggtgcgttttgatcagaaggggcacgagcgtccgttccagaaagccattctgatcgacattattgatggctacatcaatccgggagacaaaatcattatccgcctgggcgatcggcgccatggcgggggcggtacgcgtgtacagagtttcgttgagaaagatttccgcttccgcctgtttgttgatccgctggggagctcaaaatttgctgaggtacccggcgatacgctgctggatatcgtgcccggtgagcccgcttctcttgccgcgatcgcgccaaggttactggcacctgaaacgcctttctccgttatcgtccggctggatgaccgctgggggaatacctgccggagcctgccgctggcaggacgcctgacgctgacctcatcgggaggtgaaacagagcatcatgatttccggctggccgaagagggctgggcgattgcgcgtatcagcgatttgcatctctgcgcaggagaatggtcgttcagcgccgcactgggcacgctgcccttgctggaaggcaaaggatggataacggtggaggaaaccgccacaggtctgcgcccgctctatgccgatcttcatgtgcattctgatgacacggttggtaccaacgacacgctgtataacctcagctacgggcgtgatgtcgccggtctcgatattcttggctataccgccaacgattttaatgtgactgaagcgcgctggaagcaggcggtaaagctgattaatgcgctgaaccagccagacagttttgtctgctattccggtaccgagtggtgcggtaatacctgcgccggtggcgatcataatgtggtgttccttgaagatgatgaacctcagttcccgtttgataatcaggggcggctggtgcgttcattcgagtggaatgagttcactgccggaaccatcaaaccgggtgcatggccacttgatgaactttatgcggcctacgcacgcgaaccgcacaaacatctgttaatcccgcatgttggcgggcgccgctgcaacctggactggcatcacccggagctggagcgcttgatagaagtcggttccgcctgggggcagtttcactgggtctatgccgaggcgctcgaacggggctatcgtctgggcgcgaccgccaacagcgatgaacatcaggggcgatgtggtggtggcgtgcctgcgacagccgtcttcggatcccgtggaggcctgactggcgtacttgctgaacaattcgacagaaaaggtgtggctgcagcgcttcgtgcccgccacacctatgccacaacaggtgaacgaagctatgccgagttgcgtgcgggcgatgcgctgatgggagatgtagcggaattcagttcagcagatgtactgcgttatcgtctgttaggcgatgcgggctgggaagcggtaacgctttacgatggagaaagagaggtatggcatcgcgatttgcacgcggaatttgggcgctctaaatatcagttccgggtgcgtctggggggggcacgcattaaggaccgctatcggggtgcttactggacgggacatattgaggtcacagggacaccaatcaatgcgttttccctctcgggcgcagatcacccggagcagaccgtctggcgtaaaagtcatacacagattggcttgcggaccgacaccaatggtgacagcgacacagttactgtcagtaccggtgggctggccggagcaaaaatacacgttcatctggacatcagtagctatatcaaagtgggcgatccgcttttgccacaaccacatgcctgggcgccggtttttgaaacggatattgatggtcaaacgcttctgattgcaggcaaagagacttttacgcttccaggcaccgaacttcaggtagatattgaactggttaccgaacagccgcttccacgtgatatcagcggcgaaattccactttctgaacttatcctgtcagaaaaacgggaacatccgttcttcatcagtgccaggcaaaaggaccagtcccggatttggacctcagccatcttcttaacacgttaa

SEQ ID NO: 178118 - DNA, 1224 bp, Klebsiella oxytoca
atgactttactctctaccggcaccgactatgaacagctggcggcgaccttccgaccgatttttgcccgtatcgcgcagggagctgcggcgcgcgaacaaaaccgcatcctgcccgatgagcagatccgctggctgaaagaggccggatttggcacggtacgcattccgcgggaaaaaggcggctggggcgcgtcgttgccgcaattaattgcgctgcttattgagctggctcaggccgactccaacctgccgcaggcgctgcgggcgcatttcgccttcgttgaagaccgcctcaatcaacctgactcgccggcgcgcgatcgctggttccgtcgcttcctcgacggcgagctggtgggcagcggctggaccgaaatcggcgcggtcaggctgggggaggttttcacccgcgtaacgcccgttgaaggcggctggcggctggacggtgagaaattctatagcacaggtacgctgtttgccgactggatagatgtcttcgcccggcgcagcgacaaccagggcgatgtgattgcgctggtcagcacgagccaggccggcgttgaacgcgaggatgactgggacggcttcggtcagcgtctgaccggcagcggcacgacccgcttcaaacaggcgcaggtggagcaggatcacgtctacgactttgcgcagcgctttcgttatcagaccgcgttttatcagcatatcctgctggcgacgctggcgggaattggcctggcggttgagcgtgacgtcgccgaaggcgtgaaaaagcggacccggatgtacagccacggcaatgccgccgtgccgcgcgacgatgcgcaggtactccatgttgtgggacaaatcagtagctggagttgggcgacgcgggcagcggtattgcaggcggcggaatcgttgcatcaggcctaccttgcgcatgccagcggcgacgaagcgctcattgaacagcgcaatcgtctggctgaagtcgaagcggcgcaggcgcaggtaattgccagcgactggatcccgcgtgcggccaccgagctgttcaacgccctcggcgcgtcggatacgcgagtgagtaaggccctggatcggcactggcgcaacgcgcgcaccgtggcatcgcacaatccggtgatttataaggcgcgaaatatcggtaactggctggttaacggcgaagcgccaacctttatctggcagattggcgacggcgagaaatcacagggctga

SEQ ID NO: 178119 - DNA, 1422 bp, Klebsiella oxytoca
atgagtactctgtctgttgataatgctggcgccgtttcggcaccggtgagtagcgtcggggatgtggcgcgattaattaattccggcagggagcagagtaaatatgcgcggatgattgtattcctcgcgctcggcggtgtattcctcgacgcttatgatttaaccacgctctcttacggtattgatgatgtggtgcgggaattccagctctcgccgcttttaaccggcattgtcacctcgtcaataatggtcggcacgattattggtaatttaatcggcggctggctgacggataaatatggccgttattcggtgtttatggccgatatgctattttttgtggtatcggcgattgcggcgggactggcgccgaatgtctgggtattaatcggcgcgcggtttctgatggggattggcgtcgggatcgatctcccggtcgccatgtcttatctggccgagttttcccgctttagcgggaagggtaataaggccgcgcggctcgcggcctggtgtccgatgtggtacgccgcctcgacggtctgttttttaatcatctttgggctctatttcctgttgccaaaagaacatctggactggctgtggcgcgcatcgctgctgttcggcgcggttccggcgctgctgattattgccgtgcgcagtaaattcatgaatgaatcgccgttatgggcggccaaccagggtgatttgacctcggctgtgcgtattctgcgcgactcttacgggatcaacgctcacgaagcaccgccagaacgtcctgctccgccgcccaaagtgagctttcgcgtgctatttgcaaaaccgtaccgcgaacgcactattgtcgccggggtgatgaacgtctgtatctcatttgagtatacggcgatcgcctttttcctgccgtccattctcgcccaattccttggcgctggcgtgttcgaaaccatctctgcctcgctgggactcaatgcgctgttcgcctttaccggtgggctgctggggatgcacctggcatggaaatacccgtcgcgacacgtcgcgatcgccgggttcgcactgcagtttatcgccctgatcgtcctcgcgctggtggggcaaccgcaggccgcgctgggtgtagcgctggcgattgcgatgctggggctgtggctgtttgccgagggctttggtcccggcgcgcagttgatgatctatccggcgctttcatacccaaccgcgattcgcgccaccggggtcggctttagccgcgcactttccggtattggcagcgcgctggcgctgtttgtgctgccgctgctgcaggcatcgctcggtacgcaaatgttctgggtcgtatcgctggccgccattatcccgattttcttcctgctcgcggtacgccatgagcctacccaatatgacattgacgacagccaccattga

SEQ ID NO: 178120 - DNA, 879 bp, Klebsiella oxytoca
atgacaacagaacagtttgaactccgtaaagcccgccgctggccatggctggcggcgctggcagcgatcgcggcgctggccgtcgcgttctggtggtggcgcggatacgcgcaggcgccgcaggtcgttttcggtacgacgttaaaaattcactacgaaccggcgatggcgggcgagcagcgaattattgagtacatcagtcagcatattgcgcccgattatggcctgaagctggaggcggtgggcgtacaggatccggtacaggcggacagagccgtggcggaggggcagtatgccggcactatctatcaacatcagtggtggcttaagcaggtggtggacgccaacggctttgcgctttcgacgaccgtgccggtttttcagtgggccttcgggatctattccgaccgctataaatcggtacaggatttgcccgtcggggcgaccctcgtcgtgccggatgatggcgctaaccaggggcaggcattatggttgctgcaaaggatagggttaatctcactcgatccggcggttgagccgcgcacggcgaaactgaaaaatattgtcggcaacccgcacaagttcaattttaaagagctggatttattaaccatgccgcgtgcgctgaattcggtggatgccgctattggttatgtttcacaatttgatgccggaaaagtcccgcgagaaaaaggcatattattcccgcctgcgcctaaaacgtttgcctcgcaattagtcatcggtacgccgtatttatcgcaggagaatattgtcaaattaaaacaggctttttccgatccgcgtattcagacgtggttaaagaccactgacgatccgctggtcaaagacgtactggttccggtctcagcaaactaa

SEQ ID NO: 178121 - DNA, 699 bp, Klebsiella oxytoca
atgaaaccgacagtgataagccaggatacgccgtggcatgaaatccatacattgctgctgcctgcttatggggaaacctggctgatggttgccattgtgatgctgtttgtggtgactcttggcggcgtagtgggcgtggtgttattcaacgcctcgccgcgaggattatttccgcatcccgcgctttaccaggtgcttaactggggcgtcaacatggggcgctctctgccctttctggtgttaatggcggcgattatcccgtttacgttctggcttacgggcaccactatcggcatccctgccgcggtggtgccgatgattgccgctggcgtgccattttttggccgtctggtggaaaacgccctgcgcgaactcccggcggaggttaccgcggtggggctggtgtgcggcggttcgcgctggcagataatccgccacgcgcagctcagcgaggcgctgcctgcgctggtggcggcggtcacgcttaacctggtgtcgatgatcgaatattcggcgattgccggcactatcggtgcgggcgggatcggctatctggcggtcgtgtacggctatcagcgtttcgacaatcacatcatgatcgccaccattgtcgtgctgatcgccacgattcagatcattcaattctttggcgaccgtctggtcaataagcttcgccacactcaggggatttcttcatga

SEQ ID NO: 178122 - DNA, 1020 bp, Klebsiella oxytoca
atgattgatatcgataatctgcataaacgctaccgcacggcggatggccgcgtcagcgaggttctgaagggattatcgctcagggtgcccgccagctccatcactgcggtggtagggccgagcggtgcggggaaatcgaccctggcgcgctgcatcagcctgctggaacgccccgatagcggcagtatcaaggttaacggcaaagacttgtcattactgtcaggggaggcgctgcggcgtgaacggcgcgcgatcggcaccgtttttcaatcctcagcgctgctgaatcgcaaaacggcgtggcaaaacatcgcggtgccgctggagtatctgggcgtggtggaacgcgacattaaggcgcgggtcggtgaactactggagagcgtagggctgagtcacaaagcggaggcctatccgtcccagctttccggcggacagcgtcagcgcattggtatcgctcgcgcgctggcattacgtccgtcggtactgctggcggacgaggccacgtctgggctggatccccaggcgaccgccacggtgctgggtttgctccgacagctacgtgatgagtaccggctggcgatagtcctgattactcatgaaatggatgcggtacgcgccgcggcggatgcggtggcggaaatccgcgatggcgcgatagtccagtacgggcaggtgaaagagctgctggcccgtccggattccctgcttggtcagcagctattgccgctgtcgcccatcgctgttaacagcgatctgctgctgcgcctgagttatcgctgggatgtgccggtggcgactgactggatcagccgtctgagccaccagcatgcgctacagatagatttgctcggcggccatgtggaagtgatcaacggtcaactggcggggcgtttacaggtcggcgtccgatttcagggacaacgactgtcagcggatcgaacgatcgcgcttttagcgcagctgggcattgcggcggaaatccttgcacacgcccccgagctacaggaggcggtatga

SEQ ID NO: 178123 - DNA, 1407 bp, Klebsiella oxytoca
atgccatcgcaacgagaaattcgccttaacgcgtttgatatgaactgtgtcggtcaccagtcgccgggcctgtgggcccatccgcgcgaccgctcctggcaatataaagatctggaatattgggtcgatctggcgcgccttctggagcgcggcaaatttgacggcttgtttattgccgatgtgcttggcgtttacgatgtatttaacggcaacggcgatgcggcgattcgtcaggcgacgcaggtgccggtgaacgatccgctggcgctgataaccccgatggcgctggtgacggaacacctaggctttggtctgaccgcatcgctgtcatttgagcatccctatccatttgctcgtcggctgtcgacgctcgatcatctgaccaaaggacgggtgggctggaatattgttacctcgtatctggaaagcggcgcccgcaatattgggtatcaggcgcagaccgaccatgatgcgcgctacgactacgccgatgaatacctcgacgtcgtgtataaactgctggaaggcagttgggaagacggcgcggttttgcgcgatcgcgaacggggaatttttagcgatccgcagaaaatccatccgattaaccatcagggcaactttttctccgttccgggcatccatctgtgcgagccgtcgccgcagcgcacgccggttctctatcaggcgggggcctccagccgcggaaaacagtttgccgccacgcatgccgagtgcgtttttgtcgctgcgccgtcgaaagtcctgttgaagaagacggtcgcggatattcgtcgtcgcgccgcggaagccgggcgcgatccgcgcagcattctgattttcaatctgcaaacggcgatcgtgggcgaaaccgatcgcgaggcgcaggccaaatggcaggaatacaaatcatacgttagctatgagggcgcgctggcgctgacctccggctggaccggcattgacttcggtcagtatcggccggaccaggtgctgaaatacctgcataccaacgccatccagtcggcggttgaggcgttttccaccgccgacccgaatcgtcaatggacggtggaagcgctggcggactgggtgggtatcggcggctttggcccgctgctcgtcggcagtgcggaaacggtggccgatgaactgcaatcctgggtcgaggaaaccgatgtcgatggcttcaatctggcctacgccgtgacgcatgaaaccttccgcgacgtggtggagctattaataccagagctgcaaaaacgcggcgtctttaagcaggattaccgggaaggcacgctgcgtgaaaaactgttcggcgccgggccgcgcctgaccgcgccgcatccgggggcagactaccgtcgcggcgtgcgaaacgatgtcggggcgaaggagacggcggcatga

SEQ ID NO: 178124 - DNA, 273 bp, Klebsiella oxytoca
atgacgcagaaagctgacgataatatcaacatattggcgttctctcgccgtagattgctctcgcagagcaaccttagcggagaaagcgaggaatggcctggcgactatcggcagggaacgctgcgccagcgcttcctgcatcatctgcgtagctactgggatgtgtatcgttatcggaaagcgccacaggtggccgatcgtgctgccgccattgccggagaaacgctggcgacgctgggtttcagcctgtccgcccgatgtcctgagtcctga

SEQ ID NO: 178125 - DNA, 2307 bp, Klebsiella oxytoca
gtggagcatcattcaggcgactttcaggttgtggttcgcgatatccggcagctgagccagcaggaaaacgatgctctgacgctgctatggctgcttgagggcagcgttgaactccgcgatggcgagacgggtcggtatctgcaggccgatgaactggcgatagtgaatcgtcatcgccgctggagcctgcacagcaagacggcgaacgtcgtgatggcgctgtcgctgaacgccggatggctgacccgcctcgacggcgatttttttgcctccgcctaccagagcagcagcgaaacgcgcgatgccgaagacaccctgcgctacctgatgcgccagctgctggtcctcggtctggtcaatccgcaggcccactaccggctggaggccaaccgctggcttagcgaaattgctctcctgctggcgtcacgcttcagccgtcccctcaccgcccaggcgcctcgcggagccgaacgctggagccagcgaattaacagagtggtggcgcgaatcgacgccaactatcaacggcgcctgtcgctgcaggagatagccgccgcggagtttgtttctgaggcctggctctcgcgtctgttccgcaaagaggtgggcgtcagctttatgcagtacatcaccgggctgcgcctgcgcaaagccgcggagcagctgacgacgacgcgtcaatcgatacagcagatcgctcagcagcagggctttgccagcagccgggtgatgagcgacctgtttaaacgcgagcacggcctgacgccgcgccagttccgccagcagcacccgcagacggcggtcgaatctctccgcccgcacccacagcagaccgagcgatggcagccggtgtcaatcgatcggctgtacgcccggctcaacgcgccgcaaacctacggtctggatagcccgccgctgcggctcagcccccaacaaacccgccatctcgatgttcgcgaactcccggcgcgcggcgcgccgctgcgtcacacccgaatggtgattaccgttcgtgaactggacgatctgctgcgcgaggatgtccgccgcgaactggaacagctgcacgacgcgctgccgatattcgccatcgatattcacgatccgtttctcagcagccgcctgttcggcaccggctgggacgatccgcaaatggccgggtatgcctgctggtataacctgcagcgcatttttagctggctggcgacccagggcttggcggtgatactgcataccgggctcaccacccgcggcgacctgctgcaacgtttcctctctctgtccgctaaccattttccgccggcaaccctcgccagctggcacttcgtctggcactggtcccctcaggccagcgacgaggcccgccagcacgcctggcggcaacaaaaggcgatcctgcagaggctatcgccgcagtcggcgctggggatctggcaccgttttcctcaacaggtggaggacgatccccttctgcgttcaccgctgctggtcgaggcggattttctggcctgccaggccgatgctaatgaactgctggatctcgcgcaggtggatagccagaaactggccgccagcgaaaactatccggtacacaaattgcgcaaacttcatagcgcgctgcgccagcggcagctcctgctgccgctttggctgctctcgtggaataccctcaccggcgatacccgcgataccaacggccgtttctttcgcggcgcgctgctgatggataatctgctgggactggcggatcaggtttggctcgcggggttctggctgaattcagggctgcagggggaagcccgcgccaacggcaagctggatacttccagcctggcgctgcactatctccacggtctgccgcgaccggtctactgggtgctatggctgtggcgcaggctgcggggcgaggtggtgatcaacgacaagaacttgctgctgctgcgccataacggccattatcagctactgctgcgcaacacggtagttttcaatccctggctttccagcgaggaggcgtttatccagcgctttagtcagccctggagcgtgcgcctgctcggccttgaaggacgctggcgaatcaaacatcatctgttcgatcggcaccatggcgcgctcttcccgctgtttgaggcctttcgcagccaaagcgggcctgacgatgaggactatcgctggctgatgcacagagcgcgtccggcgctgcgcgtcagtgaagagacgccggatagcgaccgctggcagcttgtcgattcgctggagagcaatgcgctggcgctttatgaattcacgccgctcggcgattga

SEQ ID NO: 178126 - DNA, 1158 bp, Klebsiella oxytoca
atggagcaacgccgcgttaacggcaaaaaccactggtatcatgagacccagtcaacaatttgcccggtggatgtattgccgctcgtccctgaagccgcccatgtcgaagatcgttttctactcgatctgactctcccccgggagctgctcgaggcgcatgcgcgctggcttacgcccgcccgtcggctggcagataccctctttcccgcgtcagtgacggttaaccgtctacagacatttagcgcctatgaccggctaagtacggcgctgaccgtcgcccaggtttatggcgtacagcgcctgtgtaatcactacgccgctcgcctggcaccgcttcccggcccggactcctcgcgtgagagcaaccgtcgtctggcgcaaattacccagtacgcgcgtcagctcgcgagctctccttcgctgatcaacgcgctcgcccgcagccagctggacgaagtcggcctgaccagtcgcgatattatccttatcaatcagattattggctttatcagcttccaggcccgcgctatcgccgccttccatgccgcgctgggttacccggtgcgctggatccccggcatgccgcagcaggaagatgccccggaagcgcttttcgtcacgagggagagtgactggcagccaggacttgacgacgcggacttacgctatgccgacgatgagcgccagtctcttttagcgaactggcgaaaacatccgggcctgtttgaacttgccccgctgctggcggctcaggaacctcctctggctctgcaggaacagcttctgacacacctcagcgatcggcaaccgttcgccgcgcaggtggcgctgatcgctgcgcggattaatggcagcatcagctgctttaacgcgtgggcctcgcgatgtccagatttagccgatctcacggacgctttgcgtggtaatgaatccggcgtccagccatggggagacaacccgtcaatggaacgccagcttctacaatccgtacagcttttgacccgcgcgcccgaccgcttcagcgccgcccagctaactcccctcacagattacgggctttcccgtagcgcggctatcgatctactcgcctggtgcgggctgtgcggttggatgaatcggctgaaaatcgccctcgggaatgtacgtcaggagacgtaa

SEQ ID NO: 178127 - DNA, 1563 bp, Klebsiella oxytoca
atgcaaacatcaaaaccggcactcgagcttctcaccagcgacgccatctatcgggaaaaccccacggcgctgttccaccagctatgcggcgcgcgtccagccaccctgctgctggaatccgcggatatcgacagtaaggatgatttaaagagcctgctgctggtggatagcgcgctgcgcattaccgcgctaggtgacactgtcaccattcacgcgttttccgccaacggtacggcgttactcgaactgctggatagcgcgctgccatccggcatcgataaccagcgtcagccaaatagccgggtattaaccttcccgccggtcagcgcgctgttggatgaagatgcccgcctgtgttcactctcggtattcgacgcttttcgcctgctgcaggatctgataaccgtcccgcagcaggagcgcgaagcgatgttcttcggcggcctgttcgcctatgacctggtcgctggctttgaagacctgccgccgctggagagcgacaccgcctgcccggattactgcttctatctggcggaaacgctgctggttatcgaccatcagaccaaaaatacccgtatccaggcgagcctgttcacgccgctggaaagcgaaaaacagcgtctgctacagcggctcgctcagcttcgtcagcagctaaacgagccgccggcgccgctgccggtgaccacggttgccgaaatgagctgcgactgcgatcagagcgacgaagagtacggcgccgtcgtgcgtaaaatgcagcgcgccatccgcgcgggcgagatttttcaggtcgtgccgtcacgccgcttctcgctgccctgcccgtcgccgctggccgcttatgatgtgctgaagaagagcaacccgagcccgtacatgttctttatgcaggacaacgatttcaccctcttcggcgcgtcgccggagagttctctcaagtacgatgccaccaatcgccagattgaaatctatcccattgccggtacccgcccgcgcggccgccgcgcggatggttcgctggatcgcgatctcgacagccgcattgagctggagatgcgcaccgaccataaagagctctccgagcatctgatgctggtcgaccttgcgcgtaacgacctcgcgcgcatctgtacgccgggtagccgctacgtcgccgacctgaccaaagtcgaccgctactcctttgtgatgcacctcgtctcccgcgtggttggcgagctgcgccgcgatcttgacgtgctgcatgcctaccgtgcctgtatgaatatgggcaccctcagcggggcgccgaaagtgcgcgccatgcagctaatcgccgccgctgaaggcaaacgccgcggcagctacggcggcgcggtgggctactttaccgcccacggcgacctcgatacctgcatcgtgatccgttccgcctacgtgcaggatggcgtcgccacggtgcaggccggcgccggtatcgtgctcgactccgttccccagtcagaagcggatgaaacccgtaataaagctcgcgcggtgctgcgcgctatcgcccaggcccaccacgcgaaggagattttctaa

SEQ ID NO: 178128 - DNA, 456 bp, Klebsiella oxytoca
atgcaagatgcacataataattacgacatcagcggctttcacggcgcgctgctcgatatcatcagcgtgatgaaccagccaatgcgtgacgagcagatactgcaggcggctggggtccagctcgatcggatcctcttcccgctgctggtggcaatagggcgcaggggacccgttggggtcgttgaactggcggatagcctcggtcgcgattacaccaccgtcagcaggcaggtgaagaagctggaagcgcagcagctggtactcaagcagcccaatgcaaaagatcgccggattagcgaggtgacgctcagcgaagcggggcaggcgatgatcgatcgtatcgcgggagcaagaacgcggctgatgaatgaggtgctggccggatggacgcaagaagaggtgatggcgctgtttcgcctgacgcgtaaatacgccgacagcttacagctgaaataa

SEQ ID NO: 178129 - DNA, 948 bp, Klebsiella oxytoca
atgaaagcagccgtggtttttgacctgcagcagggtccggtgtggtccgattttcgcgatccgcagcccggtgagcatcaggcgttagtcgaggttcgggccgccgccatcagtcatgtagtgaaagggcgggcctccggtaagcattatagtttcgatggccgcctgccttttgtcccgggtattgacggcaccggtatcttacctggcggagagcgcgtctatttcgccttccccgtcgcgccctggggcagcatggcgcaacgggctcccgtcgccttaaaccactgtctgccgctgccggatgcgctggacgatatcaccgccgcggcaatggctaatccggggatgtcggcctgggcggcgctggtcaaacgcgccgggatgaaagccggggaaacggtactgatcaacggcgccaccggcagcgccgggcagctggcggtacaaatcgcccgttttctcggcgccagaaaagtgatcgcctgcgggcgaaacgtggagaagctggccaccctcagcgctgatgaaaccgttaacttaagtcaggatgaggcggacttacggacgcagtttgccgggctggcggcgcagcagattgatgtcgtcgtcgattatctgtggggacgtagcgccgaacttttgctgccagcgctggcaaaacacagcccaggaaatgcgccggtacgttttattcaggtcggttccctttccgccgccgatatctctctcaatggcgcggtgctacgctcctcgccgctgcagctgatgggcagcggaattggcagcctttctgtgccccagctgctggccgccaccggggagatgctgcaggccgccgtcgccggcggattgactatcgccacgactccccggccgcttcgcgaggtcgccacggcgtggccgcaggacgacagccagaaacgcaccgtctttgtcgtcgattaa

SEQ ID NO: 178130 - DNA, 900 bp, Klebsiella oxytoca
atgaccgatcctgatttcaatttactggcggcgctggatgtactgttgagcgagaaaagcgttgccggggcggctaaacggcttaagctcagcgcttcggcgatgagccgcacgctgacgcgcctacggcaggtcaccggcgacccgctactggtcagagccgggcgaaacatggtgctgactccgcacgcagaaagtctgcaggcgcgggcaaaaaacgttgtctccgagatgcgcgcggtgctcaacgcttcgcctgcgccgctgagtttatcgaccctcgagaagcgatttactttgcgtaccaatgagggatttatagacgcttttggcccggcgctggtgaacgccgccgcgcgggaagcaccgggcgtgacgctggagtttgtcgctaagccggagaaagatgcccgatctttacgcgaggggcgggtggacctggaaattggcgtactgaaaaatatggggccggagatccgcctgcaggcgctgtttcgcgatcgttttgtcgtcgcgctggccaaaaaccatccgctggccgcctttgccgacatgtcgcgggaacaatttgtttccgtggggcacgtcattacctcccgtcgcgggttgatacgcgggccggttgatgacgcgctggcggcgtgtggcatgcgccgcaggattgccgcggtggtgcctggtttttccgccgcgctggccgtggcccgggattctcagctcatcgccgttgtcccggcctcctgcctgcagagcgcggcgggaaaagagatggtcgcttttcctctcccggtgagtacgccggagataacggtgtcacaaatgtggcatcctcgccacgagcatgaattggcacatcgctggctaaggcagctggtgcgcagagtgtgtcgacaaccataa

SEQ ID NO: 178131 - DNA, 705 bp, Klebsiella oxytoca
atggtcacttcccctaaaacagtattgatcgcaggcgcgtcacgcgggcttgggcacgccatggctgaacagtttctgctgcatggctggcaggtcatcggcaccgtacgcgatctctcacaaacgacgccgctgcaccatctggccgaggcttatcctggacgggtgcgcattgaggcgctggatatttgtgatagcgacgggatcgcggtgctgcgcaatgcgcttgccgatagcgtgctggatatgctgttcgtcaacgcgggcaccaccaaccgcgatcccacacaaaccatcggcgagatcgcgacggaagagtttattcacgtcatgctgaccaacgcgctcgcgccgatgcgggtcatagaaaatctgcaggcgctggtgctgccgcaggggctgattggcgttatgtcttcaggacaaggcagtttgagcaataataccggcgggcagcgcgagctgtatcgcgggagcaaagccgcgctgaatatgtttatgcgcagctttgccgcccgccctgccagcgtatcgcatccgatggtggtcatggcgccgggatggatccgcacggcccttggcggcgagaacgccccgctcaccatggcggagaccatcccctcgctggtgaacgtgctgctgaaaaaacaaaatcgtcccggattagagtatctggattatcgcggatgtcgcgtgccgtggtga

SEQ ID NO: 178132 - DNA, 1317 bp, Klebsiella oxytoca
atgcgtgcaaaccgcttttcatcactctctctgcttttcttcctcggaaaatggctgctcctcgcctttatcatcgcggtgctggcgggtacggcatcggcgttttttcttttctcactgcagtgggccacggcaacgcgtgaagctgacctctggcttatcgggctcctgccgttggccggttttgccgtcggctggatctacctgcgctacggcacccgcgtggaggccggcaataacctgattctggaagagattcacgaccctcagcgcatcattcccttgcgcatggcgccgctggtttttttcggcaccgttgtttctcatctgtttggcgcctccgtcgggcgtgaaggcacggcggtgcagatgggggcctcgatcgccgaccgttttacggcccttttccgccttaacgacgatgcacggcgaatgatactgatggccgggatcagcgccggtttctcttcggttttcggtaccccgctcgccggagcgctattcgggctcgaggtcctggctatcggccggatggactacagcgccattcttccctgtctgtttgccgcgattatcgccgatcgggtcggcatcatgtggggcgtgcagcatacgcactactttattaccggctttcccacgctggcgctctggacgctgctggccatcattatcgccggctgctgctttggcctcgcggcgcgcattttcgccgacagcacgcatgcggtcggcgccttgatgaaaaaacggattcactacgcgccgctgcggccgtttattggcggactggcgattgccggcgccgtctggctgctgcacggagagcgctatattggcctgggcataccggtgatagtagacgctttccagcatccgctggcgccgtgggactgcttcggcaaactgatcttcaccgttgtctctttaggaagcggatttaaaggtggcgaagtcaccccgctgttttacgtcggcgcgacgctgggcaatgcgctggcgccgctgctgcatatgccgccaggttttctggccgggataggttttgtcgccgtctttgccggcgcggcgaatacccccatcgcctcgacgctgatggcgattgagctatttggcgcggaaatcggtgtttacgcggcgctggcctgcgtggtggcatggctggtctcgggctataccggtatttatcgttcccagcgcatagcctgcctgaaacaaagctatgtcccgaccggcatcagactggctgagctcccggcgtggtaccaatcgcaaacacgccgtcaaaaaaccgacaacgaaacccccacctcctga

SEQ ID NO: 178133 - DNA, 2043 bp, Klebsiella oxytoca
atggtgaatttgctttttcgggggctgcgcaccctcgtcctgctgctgcttctgaacatcagcgcggcttttgccgccggcgacatgatcatcatcaaggatgcttcccagcttcccgttggcgctattccagcgtatgaacatatcctctctttcgatgcccgggcgcgctttaacccggacggtagcatggagatgcgggaaaatatcaaagtactttctctgggcaggcagattcggcgggggattttccgtacgctgcccctgacctggaaccgccaggacggcaagatctttcgcgtgtattacgcgatcgagtcggtgtcgcgcgatggcgtgcctgagccgtttagccttgatgaagcagaaaaaaacctgacggtacgcattggcagcggcgaacgggtcctgaaaccagggatctataactacgagattcgctatcaaatcagcaaccatttcagccgcttccccgaatgggatgagctttactggaacgtgacgggcaatgactgggcgtggcctatcagcaaggccagctttagcctggcgctaccggatagcaccgcaaatctcaacgctgatgccaaagatgccaggctgcgctcaattgatatctataccggggttgcaggggcgaaagagcacaacgcaacggttcttcctgacggtagcgtacgcaccctgcggcctctggcgcggggggaggggctgaccgttgtctatacctggcctcggtcgatccttgccgacgctccggcgccggaggccgctttgccgctggtgcatctccttatccccaccctaaaaacctgcgtggtctggctacctctgctgctgatggccgcttattacctgatgtggtggcgaaaaaacgtcaccaaagccggactaaaaatgccgccggtcgttgcgctttattcgccgcctcccggcatgtctccgggctacctgcgttttatcacccggcgtaaatatgatgatgtggcttttagtagcgatttattagcgctggtggctaaacgcggaatggcggtcagcggggacagtcaacacacccctaacccgtggcttgcgaacgccggcgtaaaacagcggctgacccgtttgcccgtcgagggaaaccggcaattaaactatgatgacaggcagctattaagtacgctctttaaaggtaaacaaaaaaatatcgatctcagcaaggcccatcagcgatcgatgcagacagcgcgtgcagagcaggaaaagcgttgtgaagcgcagcgggataaattatttcgcaaatgggggcagccgctgcggcgctgcatctacattgcgctgtgggtgccggtggcctgcggtctttgggttaatacggaggccgcgctgctgacgataccggccgcggtttttatgctgcttggcggagcgatgctcgcctgtttgctgcgctttatatgccgcccgcgggaaatgtggcgtgcctgggggccggtgccgctcttttttttggcgatcttcggccccttcgcgacgctgggaggcgggatttttctctttggtatactgcccatcacccagcttccgtcaggatacattggcgcgcttattgccgcgctggtgctgtgcgttttcgttgcctggaaaacgcctcgctatacgcagcgcgggcttgatgaactggctatcgcgaaaggattgatgcgctatctgggcaccgccgaaaagcatcgttatcagattatctatccgcccgagcagatgatttcccattttgaagcgctgctgccggttgccctggcgcttggcgtagggaaaacatgggcaaatacctttgcccactacctgagtagtacaggcgccgtgtcgcatgcgtttgccggcgccgactggggaagcgtccaccacttcagcgaagcctgccgaaccgcctctatgtcaacgccggatagcggttcagggagcggttcatcatcaggttccggttacagcggctccggttcctccggaggcggttcatccggaggcggctcgggcggcggcggcgggggcggctggtaa

SEQ ID NO: 178134 - DNA, 966 bp, Klebsiella oxytoca
gtggacgactttctggcacttactctggcggggcgtctgccccaccatttccatggtcaaaccgcgcattttcgctggcactggattgactgcggtattctgcagctcattcctcatgaaccctgcgatcggtcattggttttgtcatccgggcttcacggcaatgaaaccgcgccggtcgaaatcaccgatttactgctgcggcagctgtttcgtggggaaataccgctccgctggcggctgctggcgatctttggtaaccctccggcgctgcgggccaacaagcgctatatgcacagcgatatcaaccggatgttcggcgagcgatggcgcgcttttagcgccagcgatgaaaccgttcgcgcccggcagctggagcatgcgctggcgcgattttatgccgggacgcccggcgagcgctggcacctggatttacataccgccatacgcggttcgctgcatacccgctttggtgtcctgccggcgcgggatacgccgtgggatgaagcgtttttgcgctggttaggggcggcagggctggaggcgctggtgtttcatcagcagcctggcgggacttttacccatttcagctgcgaacgcttcggcgcgcgctcctgcacgctggagctcggcaaggcgctaccttttggcgaaaacgatctgcgcttgttcgcggcgactcaacgcgcgctgtcgctgctgctggcgggagaagtggcggcggaagaggcgcacgcgccgctgcgctacagggtggtacagcaaattacccgcagcagcgacagtttccggctgcatatgtcggcgcagacgctgaactttacgccgtttgccgccgggacgctgcttgctgaggatggcgatacccgctacatagtggaaagggagcaagagtacgttttgtttcccaatcccagcgtcgccttcggccagcgcgccgggctcatgctggagcgcttccggtga

SEQ ID NO: 178135 - DNA, 663 bp, Klebsiella oxytoca
gtggtgatattgagcattgtcgcctgtattattcagcaatcgggttttgccgggctggttacccattttgatcgtctgcgcgaaatgatccgccagagcggcgccttcggctatacgctctatattctgctgtttatcgtcgccaccctttttttgctaccgggcactcttttagtgattgccggcggggtgattttcggtccgctggcgggaaccttgctatcgctgctggcggcgacgctcgcctcctccgcatcgtttctgttcgcccgctggctgggccgcgagctgctgcttaaatacgtcgggcagacggcgatttttcaggccattgaaaaaggcatcgcccgtagcggcaccgattttttaattctgacccggctcatcccgctgtttccctataatgtacagaactacgcctatggcctgacggcgattccattctggacgtttacctttatttccgccctcaccaccttgcccggcatatttatctatacgctgatggccagcgagcttatccgcgagggtatcacccccctgtttatactgaagctgaccctcgcggggctggctttatttgtcctgattcaggcggcgaaaagatatgcccgctatcggcgaatcgagacatcacggatacaggctcacgatgaaaaatag

SEQ ID NO: 178136 - DNA, 633 bp, Klebsiella oxytoca
atgttgatcgtcaaaaacctgactctcagcctcaacggagagccgctgctgcgcaacgtcgacttttccgttgctcccggcgagatactgaccctgatgggcccctcgggcagcggtaaatcaactctgttcgcctggatggtcggcgcgctggcggagaattttcgcgccgccggcgagctgtggctggataaccagcgctgcgacagtttacccaccgagcgacggcgcatcggcatcctgttccaggacgcgctgctgttcgaccacttcagcgtcgggcaaaatttactgctggcgcttgccgctgacgtccgcggcccccagcgcaaaacccaggtcgaacaggcgctggagcgcgccggtctggcggggttttatacgcgcgatccggccaccctttccggcggccagcgggcgcgggtcagcctgctgcgcgccctgctggcccgaccgcgggcgctgctgttggatgagccgtttaaccgcctcgacgttgcgctgcgcgccgattttcgccgctgggtgttcaatgaactggcgcggcaggcgatccccgcggtgctggtcacgcatgatgaccaggatacgcccgccggcggacgctgtttgcatatggggctctggcaatga

SEQ ID NO: 178137 - DNA, 420 bp, Klebsiella oxytoca
atgattcacatgctaaaaacccttgatgttgttgccgccattatcgaacgcaacgggcaaattctgctggcgcagcggccgccccacgcggatcagccgggaatgtgggagctggccggcggtaaagtcgaacccggcgaaacccaggcccaggcgctggcgcgcgagctccaggaggagctggcgatcgacgcccggccggaatgctacatcgccagccaccagcgcgaagtgtccgcccgcctgatacatcttcacgcctggtgggttccgcattttaacggcgaacccatcgcccgctaccacagccagctgcgctggtgttcaccgcaggaggcgttaaccttccctcttgcgccagccgatattcccctgctcgaagcctttatcgcccagcgcgccgctctccattcccgctaa

SEQ ID NO: 178138 - DNA, 747 bp, Klebsiella oxytoca
atgaaaaagcgtgttctcgccgtttgcctggccagtctcttctcccttaacgctttcgccctggttcccgccggtaacgacgtcaccacaaaacccgatctctactacctgaccaacgcccaggccatcgacagcctgacgctgctgccgccgccgccggaagtgggcagtatcgcgtttttaaacgatcaggcgatgtatgagaaaggccgtctgctgcgcggcaccgagcgcggtaagctggcggttgaagacgccaacctgagcggcggcggcgtcgccaacgccttctccggcgccttcggctcgcccattaccgccaaagatgcgccggagctgcacaagctgctcaccaacatgattgaagatgccggcgacctggcgacgcgaggagcgaaggagaagtacatgcgcattcgcccatttgcgttttatggcgtcgccacctgtaacaccaaggaacaggatacgctgtcgaaaaacggctcctacccctccggccacacctctatcggctgggccaccgcgctggtgctggctgagattaatccccagcggcaaaatgaaatccttaagcgcggctttgagctcggcgagagccgggtgatctgcggctatcactggcagagcgacgtagacgcggcgcgtatcgtcggttcggcggtcgtcgccacgctgcataccaatccggccttccagcagcagcttcagaaagcgaaagacgaattcgcgaaacgacagaagtaa

SEQ ID NO: 178139 - DNA, 1158 bp, Klebsiella oxytoca
atgatggaaaacgcagcggtgcagggaacccctcgaaagtttaaaaaaataagggcgctaaacaggcgtcgaaattatttttttaagaaaatacgcaatgacctgcgagtctatatcgctaaagcgttctgggatagtcgcgcgcgccgcgaagctgatttaacctccgcgaaaacggtgctgttaatgcgtaatgaaggtgcgatcggcgatgtagttgttgattcagcgctggttaaatgccttcacgaggcgggaatgaccgttgactttctgttgaccaaatccaatagtcaggtcatgcgctataatcctcgcattcgccatatctatgaggccgagaatgttgactcggcggattatttgcacaaatttacccataacgttcctcagtcagttattactgagcttgcgaataataagtacgatattgtaatcgacccgtcgttgtttgatattccggtacacaggatgctgttgttacgacagataaagcccagagcggtactgggtttcaataagtggccttctattaaacactacagcaagtcttttgattttgactgtgaaaactggcacgtcagtaagacattttcttttatcgctgattatctgcagctggataaaaaatctctgcaatcttatgatctgcatataccacaggatatctgccagcaggttcgtgattatctggcggcgctcaacgggcgtaacgtggtgattaatatttttgccgggcatcaggaccgcagcatgtcgcaggcgcagctggcaacgcttctggccaggctgtgtgaggattatccggacgtcaatatcatattgctcgatcatcgcaatgaaatccggatccccctgccggagaaggtctgcgtgaatccgtttaaaacgctgcaccactgcatggcgcttatcgccgaggccgacttagttatctcgccggatacctcggtggtccatatggcggcggcgtggaaaaaaccgcttatcgcggtctacaaagatgtgcggatgaataatcgactctgggctccggggtacgacaacgcgcggcagattatcgttaaatgcggcaaggtataccagctggagagcttgcccgacctgataatgtcggagattgatcccgtcaccctgcaacaggcgcgagccgggtaa

SEQ ID NO: 178140 - DNA, 1497 bp, Klebsiella oxytoca
atgaaattacagaataaattactccgtcatttcatttctgcgggggtggttgtcctgacatcttcatttctggtgtatgaattagtcgccagccatcgggatatgtcggaatacatgcgctacatcgtcgagaagggcgaatccgcctttctgtacgataaatatcaaaatcagctggttatctcccaggtctcgcgaaagctggatacgcatcccactgccgaaaaggcccaacaggcctgcgctggcgtgcagaccaatggcaacgtatacgggctcaatatcgccgggcataccttccccgggcttcacggtacgctcagcaccacccagccttcgtgcgagccgtggattaacgatctcccggcgctgcaggcttttgatgccgctatcgcccaaagcgatattatcgccgcgctgaattcggcaaccttcaaatccgataaacgcttccgctattacctcgatttagacaataaatacgcgtatttctattcgccgattgagatagatagcagccccgttgataactggaactttcttcacgacagtaaactgggcatcactcagttcagtcttaacggtttacttcgcgggcgtacgctaatttccagcatctatgctgacgcattaaccggacagaatattttgtcgttcttaaccccggtctatcatcgggatcggctgaagggcattgtgatggtggacgtcactcgtcacgatattgagaagctgctctataccaccgaccgccccctggtctggcgctatctcgacatcaccttaacggactcggactcaacgtctgaaatccgcgttcaccgcagcaacacgcattttttcagctacgcccaccatagccagcaggtggcggaaaacctgcacatttcgctgtcgctggatatgtcctattttctgcttagctcctggaagctatttttgttttacctgatatctaccggcgttctgctgcacctggtacgcatgcactttcgcctgtataccgacgtttttaaagaaaacattagtgattctttaaccggtctgtacaaccgaaaaattctctcctcgctgctggaatcgcgtatgcaaaagctcaccgagcaaggcgtgaatatcgtgtttatggcgctggactgcgaccggctaaaataccttaatgacacctggggacacgatgaaggcgaccgcgccatcgtgctgctcgcccagtccatttccgccgccatacgtaaaagcgattacggcatccggctgggcggcgatgagttcttcctgatactgatcgattatgaggaacaggaggcgaaaaatatacccgagcgtattcgccagcacctgaaggaaattgacattaaccagcgcgttaatttctcatggggggcctgcagcatggcgccgggggatagcctggccgacgtcatgaaaatcgcggatgcccggctgtacgaaaataaaaagcaaaaaaaacacgcttacccggggcgagaggattaa

SEQ ID NO: 178141 - DNA, 510 bp, Klebsiella oxytoca
atgaaggacaaaattttggttagcgcctgcctgatgggctttcaggttcgctataacggcagctataaagcccggctggctaacgcgctgtctcgctggcagagcgaggggcggctggtcacccactgcccggagctggctgccggattgcccatccccaggctaccggcggaaatccttggcgcgcagggagcggatgtcatgcaaaaccgtgcgaaaattgttgaaagtgacggccaggacgtcactgcgcgctatcagctggccgcctggctggcgctaaaagcagcgcaggaggaaggctgtaccgcagcattgctcaccgacggcagcccaacctgcggcagtcagtttatctatgatggtacctttaacggacagcgcaagcccggtgccggcgttgccgccgtcctgcttcgcgaatacgggataacggtattttccgagcagcagttgccgcagctgcttgcctggatggaacagagggagagtgacgatgattcaatgtaa

SEQ ID NO: 178142 - DNA, 345 bp, Klebsiella oxytoca
atgattcaatgtaaacgggtttatgacccgcaggaagcgagcgacggctaccggatactggtagaccgcctgtggccgcgcggaataaaaaaagaggcgctgaattacgatgagtggtgcaaaatcctggcgccatcgactgatttgcgtaaagcttttcacggcgagacgcttgattttgcccactttagccagcgctatcgccaggagctggaagcccaccgcgatgaaggcgagcgcctggccgcgcttgccaggcagcagccgctgacgctgctctacgcggcgaaaaatacccggcaaaaccatgcccaggtgctggctgactggctgaaagcgctatga

SEQ ID NO: 178143 - DNA, 240 bp, Klebsiella oxytoca
atgaaggggatgatagtcatgctgcctctggcgcttgccggatgcgcgcagagtcagccagcgcagcaagcacacccgatagggatggctaacccggcttcggtatactgccagcagctgggagggaaacaggttcctgtccaaagcccgcagggcgtgcgcaccgagtgcaagctacccagtggtgaaacgttagatgaatgggcgctctggcggcgcgatcatccggctaagtcatag

SEQ ID NO: 178144 - DNA, 999 bp, Klebsiella oxytoca
atgaaaccgttccgtcgcgcgttttttatctggggatgggcgctgctggccctcagcggcctgttctggctgagcctgttctgctattcgcctatcccgatttcgccgctcaacgcccttcacgccctgctggcgcctgagtctccttcgcttgcggaggcgctggtgcttaatctgcgcctgccccgcagcctggtggcgataatgctcggcgcctcgctggcaatgtcgggggcgttattacaaacgcttacccataatccgctggcatcgccttcactgctcggcattaatagcggcgcggcgctggcgatggcgctgaccagcgcattcagtccggcaccgctggcgggcttttcgctggcgctgattgccgcctgcggcggcggaataagctggctgctggtgatgagcgccggcggcggctggcgtcaacagcaggatcgccaacggttgatcctcgccggtattgctctctcggcgctatgcatggcgttgaccagaatgaccctgctgctggcggaagatcgcgcctggggcattcttacctggcttgcgggcggcgtttcccacgtgcgctgggccgagttctggcagcttttcccttttgtcgcgctgattacccccggcgtattcctgctggccaacgcgcttaatctgctcaacgtcagcgataccgccgcccattcgctgggggtgaatttgccgcgcctgcgcctgcttatcaacgcggccgcgttgctgcttaccggcgccagcgtcagcgtcgccggaccgattgcctttgttggcctgctggtcccgcatctggcgcgtttttgggcgggtcacgatcatcgtacttttttgccggtcagcgccctgctgggcgccctgtttatgctgctggcggatatgctcgccagagcgttggcctggccgggtgaactgcccgcgggcgcggtgctggcgctggggggcgggccctgttttgtctggctggtcaggagacgcgggtga

SEQ ID NO: 178145 - DNA, 954 bp, Klebsiella oxytoca
gtgaaacaacgcatcgtgtttttatggctcgcgctcacgctgttaaccctgttctcgctgcggatgggggcgatcccgctgccgtggcgagcgctgctcagcggatggcatacggacagcgagtatcactacgtccttatgcaatatcgcctgccgcgcgtggtgctggcgctgattatcggcgccgcgctggcggtttccggggcgctggttcagggtattgtgcataatccgctggcctcgccggacattctgggcattaaccacggggccagcctgacctcggtggcggccctgtggtttttgccgtccctgcccctgccgtggctgccgctgctggcctttatcggcggaatggtggcgatggtgataccgctcgcccttgccggtttttctcgcccaatgcgcctggcgctgaccggaatcgcgctgtcggcctgttgggccagcgtgaccgactacctcttactgtcgcggccgcaggagatcaataacgcgctgctgtggctgaccggaagcctgtgggccagagacggcgcattcgtcatcatcgtcctgcccctgctggcgattttgctgcccttaagcttcgccctcagtcgcgatctcgacctgctggcgctaggccatgagcgcgcgggaacgctcggcgtcaacgtacgctggcttaacggctacggcttaacgctggcggtggccctcgcgtcgattggcgtcgcggtctgcggtcctgtcgcctttatcagccttgtggtgccgcatcttgtgcgtcgcctcttcggcggccgccatctccgtttattgccgctctctgcgctcacgggcggactggttctgctgctcgccgatctgctggcgcgaacgctgcatccgccgcttgaactgccggcaggcgtgctgacggcgattatcggcgccccctggtttatctggcttcttgtgagaatgcgttaa

SEQ ID NO: 178146 - DNA, 1191 bp, Klebsiella oxytoca
atgcataatatcgccttaaaatcagcattgatgcttaccacccgcgtcatacaaattattaaccctgaattacacctgcatatgcaacgaacggcgctgatcgcgctggagcttgcgcaggcgtcagggctctcgcgtcagcagcagcagacgatcttttgcgccgcgctgctgcacgacattggcgttctgggcgataaacgagtgttctcctcgctgaacgccatcgataaccttaacgacccgcatcagcaccggggagcagaaatgctggccgggttagcgaccctggcccccatcctgccgattatccgcgatcaccattttagcccacaccacaaaggcagcctcgaacagcatatcgtctatttcgccgacgtttttgaacgcctgcttgctggcgataagcacgcgacaacctttcaaaccgatatgattattggtaaatttcgcgcgctttaccaggcgatagatccgccgctatgccagactttgtgccagctcgcacaaaaagagcatttttggctgcacctcaatcccggacatattcagcgaatgctggagatcatcggccctatcaaccatgtttatatcgatatcgacggtctgaaagatatctgcctgttaattgccaaaattgtcgatacctacagcagcttcaccgccagccatagtctgaaggtcgggcgaatttcgcgcacccttgccgcttatatgaatctgccggagatggagtgtaagaaaattgagattgccggctatttacacgatattggcaaagtacacattccgctgaaaatcctggagaaacagggcgaactgaatgacgaagagctgcttcaggtgcgggaacatagctatatgaccggcgaaattcttagcaccttcagcgaactcggcgaaataattaactgggccgcgaatcatcatgaaaagctggatggcagcggctatccgcttcatctcaatgagcattacctgcagcttccggatcggattatcgccatcgcggatattttcaccgcgcttaccgaagaccgcccctatcgccctggaatgagccgtcagcaagcgttacagctgatagagagtgatgttataaatggcgcgctggataaagacgtgtaccgcattttgcatcaccatgccgaagcgctgcacgctattattactcacacgctacacccgtaa

SEQ ID NO: 178147 - DNA, 447 bp, Klebsiella oxytoca
atgccaacgcgtgaaaaaatgaaaaacgaaacctgccccgtcgcccgaagcgtggatattatcggcgatcgctggtccttgttgattgtacgcgacgcctttgatggcatacgccgcttcagcgattttcagcgaagcctcggtatggcgcgtaatattctctctgaccgtctgcacaaattggtaaactcaggtattctcactatgcaatccgcctcggatggcacggcttatcaggaatacgtactgacggcaaaaggagagcgtttgttccccgttgtcgttgcgctacgccagtggggagagctgcatctgtttgcccatggggaaccccattccgtactgatcgataaacgtacgctgcgcccgataccgatgatgtcgcccgcggccgaagatggactcatcctcaccgcccaagagaccgaggtacaaaaaatcgaataa

SEQ ID NO: 178148 - DNA, 198 bp, Klebsiella oxytoca
atgttcgcaagatgtgaacttgctaacgctattcgtacgctgagcatgaacgcagtacagcaagccaaaaccgttcacccgggtgccccgatgggtgtggctgacattgccgaagtcctgtggcgtgctttcctgaatcgtaatccgcagaacctgtcctggagcgaccgcgatcgttggcatgaccagcttcggtga

SEQ ID NO: 178149 - DNA, 1263 bp, Klebsiella oxytoca
atgctgcagtttattattcatgatgtgcttggcacaccagcaatactggtcggtcttttttctttaattggtttgctattacagaaaaaggctatctctgatgttatttccgggaccctgaaaacgattatgggtttcgtcatattaacatcaggggcggcgattattgccacgacgttaacaacatttagccagctgtttgaacattcattccatattcagggcgtggtgcccaacaccgatgcgatggccgcgctggcgcaaaaaaactacggtacggcgaccgcgatgatcatggtgctggggatgctgtttaacatcgttctggcgcgcattactccgctgaaatatatctttttgaccggtcaccatacgctgtatatgtcggcaatgctggcagtgatcctgtccgttggcggcctgacgcctttctgggttgttgctctcggcgcggcgatcctcggcgcgatgatggtggtttccccggcaatcctgcagccctttacccgtaaaattaccggcactgacgatctggctctgggacactttggttccaccggctatctgctgtcggcgctggtcggtaaagcgataggtaaaggcagcccgtcgattgaagaattgaaggtaccgaaatcgctgaactttctgcgtgattcatcggtggccatctcgctgactatgatgattctgttcctgattctggtactggtggcggggaaaacctttgttgaaaccagcattagcggcggtcagaacttcattatcttcgccattattcagtcgctaacctttgccgccggggtatggatcattcttgccggcgtacgcatggtgattgccgaaatcgtcccggcctttaaaggtattgccgataagctggtcaaagacgctaaaccggcgcttgattgcccaacggtattcccgttcgcgccgaatgcggtcatcgtcggcttcttgtcgagttttgccgctggtctggtaagcatgttcctgtgtccactgtttggcctcagcgtgattgttcccggcctggttccgcacttcttctgcggcgcaaccgcgggcgtatacggcaatatctgcggcggccgccgtggcgccattgttggcgcgtttgcacaaggcttactgatttctttcttacccgccattctgctgccgctgatgggcgacctgggctttgcatccaccactttcggtgatgcggactttggcgtggttggcatcgtgctcggacacgttgtggcctggtttaattaa

SEQ ID NO: 178150 - DNA, 267 bp, Klebsiella oxytoca
atgaagaaaattttgattgtatgcggtaatggcttaggcagcagcttcattgttgaaatgaacgtcaaaaaaatcattactgagttaggtaaagaggctgaagtctcgcataccgatctcacttcggcaaaaagcgaatctgcagatattattttaagcgctaaagatatcgctgagcacctgaccgggcacagcgctcaggtttttggtttaaataacctgctggataataataaaattaaagaaattcttgtggctaacctttaa

SEQ ID NO: 178151 - DNA, 441 bp, Klebsiella oxytoca
atgatttccacctggttaacagaaaggaagattcaaatagttgatagcgtcagcgactggaaacaggcgattactatttctgcgcagcctttgctagccgatgaatcaattaatgaaaactatgttgaagctatttttcttagccatgaagaattaggtccgtattatgttttagcccccggtctggcaatgcctcacgcacgcccggagcagggggctaaaaaaaatgggttatccttactgcacataaaggaaggcgtttcttttgatgctgatgaaaatgatcccatttttgtcgtgattatgctatgcgcggtttctggcgatgaacatatccgaatgattaccgcgctggcggaaattttctgcgacgaagcgcgtcttgatggcctgcttaaggcatcgacgaaagaaaaaataaacaatattatcaatggctaa

SEQ ID NO: 178152 - DNA, 1059 bp, Klebsiella oxytoca
gtgcagacgttacaaacggatgacggcgcaaaagaaaaacgcagaaagaacaccggcaaaatcacgctggcagaagtcgcaaagctggtgggcgtcagtactatgaccgtatcccgcgcgttacgtatgcctgaaaaggtcaacccagaactacgcacgcgcatcgaagccgcggtcagcgaactcggctatgtgcccaatttgcaggcccgaagcctggcttcagcggactcaacgctggttatgggcgttgtcccctctttttcatcgcccggttttatcgccgcctcggaaacgctacaaaccgtcctcgcgccgcagggctataccatgatgtttatcgaatctggtcagggcgggcaaagtgaagagaaggcttttcggcagatgctggcctataatccggcggcaatcgttcagttcaatatcgataacgttgacagctgttcgcagatgctgatgaatgccggtataccgatggtagaaatcggcgcgattaaccacgaaacggccggtattagcattggggtagactactccgccgcgctaaaaaaactggtctcatcgctggcacaggcgggctataaaaaccttggtttactctgcacggcgtcaaacaacatcatgttcaggcaggtattaagcggctggaatagtgcaatgctctcaatcaaccactctccgcaccgggtagtgacgccgcatttaccttcagggatcaccaccggtttcaatctgctgaatgatattcgcatcacctggccagagctggatgcgctgatctgtacctcggacgagctggcctgcggctgtattatggcctgtcataacgcgggaattaaggttccggataccctggcgttggccagcctaagcggcggtacgcttgccgcggtctgctcgccggcgttaactgcggtagagtttccatggagcgaggcgggaaccgttgctggtaaaacgctgctggatttactggctggaaatacgctggagagcgccattgagctcccctccagcctgaaggtccgcgccagcagcagaaagccgctgcgctaa

SEQ ID NO: 178153 - DNA, 810 bp, Klebsiella oxytoca
atgtatttgataaatggcgctgaaagtgaaacgcttgcggtgaacgatcgcagcgttcagttcggcgatggctgctttaccacggcgcgcatcgtcagaggccgggttcagctgctgtcagcccatctggcccgcctgcagaaggcctgtgaacagctctttatcccctacgacgactgggcgctattagcgcaggagatggcgcatctggcgcagccccatcaggatggcgtgctgaaggtcatcatcacgcgcggggcgggggggcgcggatacagcgctgccggctgcgtgaatcccgtgagaatcctcagcgtatcgccctggccggagcactatcttcgctggcgcgaggaggggatctccgtgacgttgagccctgtcaggctgggacgcaatccctcgctcgccggcctcaaacaccttaatcggctggagcaggtgctgattcgttctcatcttgagcagacggacgccgatgaagcgctggtccttgacagcgacgggtggcttacggaatgctgtgccgcgaacttattctggcgtaaaggatccgacgtctttaccccgcgcctcgatcaggcgggggtcaacggtattatgcgccagtacattctcgctaagctggcaccatcgccgtttcgcgttgtcgaagccaccatgcgccccgaggcgttacgcgaagccgacgaggtccttgtctgtaacgcattaatgccgctggtgcctgttcgccgctggaacgataaacgttggtccacgcgcgagctttatcattttttagcccccttgtgtgagctgtctgattag

SEQ ID NO: 178154 - DNA, 129 bp, Klebsiella oxytoca
atgatgagagagatgatgcgtcgcctgttcgaattactggttaacaacgtccgcgaacattttatgatttatctggcgctgtggcttctgctggcgtttatcgatcttatctggctatggtttttctga

SEQ ID NO: 178155 - DNA, 1251 bp, Klebsiella oxytoca
atgccctctgctgatacccccattaactggaaacgtaatctcaccgtcacctggctcggctgctttttaaccggcgccgcctttagcctggtgatgccgttcctcccgctctacgtcgaacaactcggcgtaaccggccatagcgccctcaatatgtggtcagggctggttttcagcattacctttttattttccgccgtggcctctcccttctggggcggtctcgcggaccgcaaaggacgcaaaattatgctgctgcgctcggccctcggtatggcaatcgttatgctgctgatgggcctggcgcagaatatctggcagtttctgatcctgcgcgcgctgttaggtctgctcggcggatttattcctaacgccaatgcgctgatagcgacgcaaattccccgtcataagagcggctgggcgctggggaccctctctaccggggcggtcagcggcgcgctgctggggccgctggccggcggtttcctggccgatcactggggattgcgtaccgtcttctttatgacggcaggcgtgctgtttatttgtttcttatttaccctttttctcatccgcgagaactttgtcgccgtcagtaaaaaagagatgctcagcgcgaaagacgttttcacgtcgcttaaaaatccgaaactggtgctgagtctgtttgtgacatcgctgattatccaggtggctaccggttccatcgcgccgattttgacgctttacgtgcgcgatctcgccggcaacgtcagtaatattgcgtttatcagcggcatgatagcttcagtccccggtattgccgccctgcttagcgcccctcgcctcggtaaactcggcgaccgtatcggtccggaaaaaatcctgatcgtcgcgctggtgatttctgtcctgctcctgattcccatgtcgttcgtccagacgccgctgcagctgggtatcctgcgcttcctgttaggtgccgccgacggcgcgctgctgccggcagtgcaaacgctgctggtgtacaactccaccagccaaatctcgggcagaatattcagctataaccagtcgttccgcgatatcggcaacgtcacgggtccgctcatcggcgcatcggtttccgccaactacggcttccgggcagtctttttagtcaccgccggtgtggtgctgttcaatgcggtctactcgaccctgaccctcggtcgctcccgccgcccccgggcaacggacaatccgggttccggcacgcattcggtaaattaa

SEQ ID NO: 178156 - DNA, 306 bp, Klebsiella oxytoca
atgaaaacaattagatatgcttcgcttgcagccctgtttatattaccctcgtttattagccctgcgatcgccgaacagaccgtggctggcgtcgtccatttttacggacgggtggtggaagcaccctgccagctcgatgcaatcaataatcaggttattatggattgcccgcgggcggagacgattaaaatttccgctcagcagcttgagaaagggaatatccgcaacgaaaatatccgttctgcgcaattacgctatattaatccgcaacggaccctcgccattctggatgttgattatcggtaa

SEQ ID NO: 178157 - DNA, 861 bp, Klebsiella oxytoca
atgaaacaaattacaggtatctacaccgcgccttcacagcactgggtaggcgatggtttcccggttcgctcaatgttctcttaccagactcacggcgaacagctaagccccttcctgctgctcgactacgcaggcccccatcacttcccggcggggacaggcaaacgcggcgtcggcgaacatccgcatcgcggatttgaaaccgtcaccgtggtctattccggcgaagttgaacatcgtgactctaccggcagaggcggcgtcattggaccgggcgatgtgcagtggatgaccgcaggcgccgggatcctgcatgaagagttccactcggcggaatttacccgtaccggcggcgagctgaagatgattcagctctgggtcaacctcccggcgaaagacaaaatgacgcagccgggataccagagcatcactgctgatgtgattcctgacgttgagctgccgaataatgcgggccatatgcgggttattgccgggcgctacgaagatattgtcggccctgcgcacacgttttctccgcttaacgtctgggacctgcagcttaaccagagccaggaaatcacgctgcatcagcctgccggctggagtacggcgctggtcgttctggaaggtgaagtggtggtgaacggcgagggtagcgcccgcgagggtcagctggtggtgctcagccagaaaggagaagcgctccacctctcggccagtagcaacgcaaaagtactgctgatggccggtgaaccgctgcaggagccgatcgtgggctatggcccctttgtgatgaataccaaagcacaaatcgcggaagcggttcgtgattttaatagcggccgcttcggccaaatctga

SEQ ID NO: 178158 - DNA, 678 bp, Klebsiella oxytoca
atgtctaccccagctaactttaatggttctcgtccggttattgatgtcaatgataccgccatgctgctgattgaccaccagagcggtctgttccagaccgtgggtgatatgccgatgccggagctgcgggcgcgcgccgccgcgctggcgaagatggcttcattagccgggatcccggtgatcaccacggcgtcagtgccgcagggaccaaacggcccgctgatccctgagattcatgcgaacgcgccccatgcgcaatatattgcgcgtaaaggagagattaacgcgtgggataacccggaatttgttgccgcggtaaaagcgaccgggcgtaaaacgctgattatcgctggtaccattaccagcgtctgcatggcgttcccgtccattgccgccgtcgccgatggctataaggtttttgccgtcattgatgcttccggtacctatagcaagatggcgcaggaaatcaccctcgcccgcgtcgtccaggctggcgtcgtgccgatggataccgcagcggttgcttctgaactgcagcgcacctggaaccgcccggatgccgctgagtgggccgaggtgtataccaaggtcttcccggcataccagctgctgattgagagctacaccaaagctcaggacgtggtgaagaataacgaacagcttgattcacagcgttaa

SEQ ID NO: 178159 - DNA, 3075 bp, Klebsiella oxytoca
gtgaaaatagcgccgtcaaaaaatcgctttaacctttctgcatgggcgctggaaaacccgcaaatggtcagtttctttatgctgctgattatggttatcggttcgctcagctatacgctgctgccgcgaaatgaagatccggcttttactatcaaaacggcggtagtctcggcgcagtggccgggcgcgtcggtaacggataccacgcatctggtgacggatgtcctggagaaaaaattacaggaaacgccctggctcgattatatcgaaagtgaaacccgagccgggcaaacggttatctatattaatctccgcgatgacaccccggcgcacaacgttccggcgatctggtaccagatccgcaaaaaaatgcaggatattgcgccatcgctgccggaaggtgcgcagggaccgagcgtgaacgatgagtttgacgatacgtacggcaccatttacggatttatccctgacggatatagccttgaagaggtgcgacagcgggtggagacgagccgccgtgaactgatgtccgtgccggatatcggcaaaacggtcctccttggcgagccgcaggagcagatagtcatcgctttttcgcccgcccggctggccggtatggggcttaccattcagcaggttgcggacgctctgaaggcccagaatgccgtggcgccggcaggaaccctgcgcaccgggcaggagaatatcacgctaaacgtcagcggggccctcaggagcgaagcgagcctgcgcgccgtcatcctgcacatcaacgatcgctatcttcccctgaccgatattgccacgattgaaagaagcgcggccgaaccgccttcagcggcgtttcgcgttaacggacgtcctgccgttgggctggcgatttccatggcgccgacgggcaatatgctgcgctttggcgagacgctgaataacagaatgcgcgccatcggcgccgggctgccgcacggcatcgagatagttaaagtggctgaccagtcggcggtggtcagcggcgccgtaagcggatttgtccgggtactggtggaagccgtgctgattgtgctggcggtttcttttgtctcgctgggattaagggccgggctggtggtggccgcggcgatcccgctggtgctggcgatgacctttgccgggatgctgctggcaggcattggtctacagcgcatctctctcggggccctgatcgttgcgctagggctgctggtggatgatgccatgatcgccgtggaaaccatggtatcccggcttgaggccggcgatacgcgacggcaggcggcgacgtacgctttccaaaccacggcatttccgatgttgaccggtacgctggtcatgattgccgggtttattcccgtcggttttgcctcatccagcgcgggcgaatactgcttttcgctgtttgccgtggtgctgatggcgcttctgaattcatgggtcgtagcgattctgttctcccctttgaccggaacgtggctgctgccggaaaagctgaaacatcgtgccgcaggtccgggccgcatggcgcggggatatggacgacttctgcgtacggtactgcgccaccggcttgccaccctggggattgcgctggccgcgctgggactgtcggtgtacgggaccacgtttatgcagggggagtttttcccttcatcggatcgcccggagctgctggtcagcctgacgcttccggccaatgcttcgcagacggaaacggagaaacaaacggagaggctggaaagggcgctcgccgggaatcgcaatattgaccattattcgacctatattggggcgggcgccatccgcttttatctgccgatggatgttctgctggataatgaaaatacggcgcagctggtggtggtggcgaaagacctggccgcccgcgaccgcctgcgggaacagttaaacgcgctgctgaccacgcaattcagcgatctgacctcgcgcgtttcgcctctggagctagggcctccggtgggctggccgatcaaataccgggtcagcgggcctgattatctcaaggtcagagagtatgccgggcgtctggccgaggcgatagggcgctcgtcgttaacccgggaggtaaatcagaccgccggcgagccggagagaaccatcgtcctgcaggtgaaccagactgccgcgcgggcggcgggcgtgtcatcgcagagtctggcgcagacgcttaataccgtctggtcaggcacgacggtcacatcgctgagagacaatgaccggctggttgatgtggtgctgcgggcgaacgacagcgagcgattgaatcttgccaccctgtcatcgctgacggttgaggggcgcggtggagaaaaagttcccctcagcgcagtagccacgccaacctggggagtggacgatccggtgctctggcgtcggcaaagattgccgtttatcaccgtacaaaccgacctcgcgccgggaatgcgggcagaaggcgtatcgaacggtctgcgcccgatggtggatcaactgcgcgcgggtttacccaccggttacagcattgtcgaaggcggagtggtcgcggagtccgaaaaaggcaacagctcggtattgaatattttacccgtcaccctcggcattatgctgttattgctgatgcttcagctccggcgctattcccgtatgctgctggctctgttcatggccccgttcggcttgccggggattgttatggccatgctgccgggcgacacgccaatgggatttgtggctctgctcggcgtcatcgcgctggcggggatgattatccgcaatgccgtgatacttatcactgaagttgacggcaatctggctcagggcatggaaagcgatgccgctattattgccgccgcagagcaccgggccaggccgatatttctgaccgcctgcgccgcgatactgggtatggtccctatctctcaccaggtcttctggggaccgatggcgtatgccatcattggcgggctgattgtcgcgacgctcgtcacgttaaccgtgctgccggcgtcctttagcctgctgctggagaggggaggataccgggaaaaacgtcccgccgcttaa

SEQ ID NO: 178160 - DNA, 1149 bp, Klebsiella oxytoca
atgttatatgagttagttctttcccttcgtcagtgcgtgtacgctttgctcggcgcagaacggacgctatcctggtttgcgctgttgccgccgatcgtactgatcctgatgatcgtaccgcttgtgggctgcggcgataaaagcgccgaaaagcccgcgccggcccgcccggtgcgctacgtggtggtgggttccccggcgacgcttcccgctctggaaagaacgggcgaaatccacgcgcatgatgagacggccctgagctttcgtacggcgggcaggatgctgacgcgcgcggtggatgtcggcgatcgggtcaactacgggcagctgctggcgacgcttgaagagaccagcgcgcgaaatcagctggacagcgcgacggctgacgatgagagcgctcgagcgaccgcccgggtcgccgcgctgaacgttaaccggatgcagaagctcatcgccacgggcgcaatcgcccgctctcagctggacagcgcgcaggcggactggctggtcgccagcgcccgggtgaagagcagcgaggccgctttgcgcaacgccagggaaagcctgggctggacgcgtcttacttcgccgggtgagggggttatcacggcggtcagcgcctctcccggtcaggtggtcagcgccggagagacggtggtgacgctggcggcgggtcaggcgcgcgatgtggtatttgatatcccggatcccgctaaggttgaggcgcaaagggcggaagaatttcaggttgctttgctcagcgatgccggggtgaaggcttatgctgtgttgcgtgatattagcccacaggccgatccccagacccggacatggcgcgtcagggcaacgctcaagaaaccgcccgccgcgatggcgctgggcgccagcgtcacggtaaggctgccgtcatcaggctcgacggggtacgctataccggcttctgcgctgagccgctgcggagataaaccggccgtctttgtcatcaccccgcagatgcaggcgcagctgcgcgttgtcgttcccgccagctacacggcttcttccgcgatcatcgcttccggccttgtgcccggcgaccgggttattaccgccggcgttagcaaactgcgcccgggcgaaaaagtcgtcgccggagagaggctgccgtga

SEQ ID NO: 178161 - DNA, 1197 bp, Klebsiella oxytoca
atgatgaagacccgtcactcctctctctggcgctggatttgcgggcgcattctggcgctggccatcggcagcgtgatggttatcgccacctgtatgtggctgcgtttcgccgtgcagaactattggatcatgcacaaaatgccgcccgctttgcgggaggaattcattgcgctcagccgcaatccggaggccaacccggcgcgttttcatcagattgtcgatacctggtggggattgagctattccacgccctctatcgcctcggcggactgggtgaccgtggcggtgctggtgctggtcatgatccccttcattgtcgttatggggctccgctacgcccgtccgctctcgctgcagttcagccgtcttcgtgatgcggcgaaggacgtcaccggggggcaatttggccgccaggcggagctgattgaggacgcgccagcggaaatgatccgctttgctgccgactttaacaaaatgaccggccagctggcccgctatgataaagaactccgcgcctcgcatgttgcgatggcgcatgagcttcgctccccgctgacggcggcgattggccgtctgcagggcatgctggatggcgtttttgatacccagccgcagcagctggagatggtgatgaaacaactccagcatctgaatcgattaaccgatgagctgcatctgctttccctggcggatgccggcaatctggtgctcgatgagcggctattttgtctggatgagctccttcaggagcgagccgcatggttaacgccgcaggcggacgcgcagagcgtgacgatcgccattcagccatcgccgtcctgtcccttccgcggcgatgcttttcgcatgggccaggtatttagcgtactgatggaaaatgccgtacgctacgggcgcagggggggacatctggcaattacgttgcgccgcggcgagggcgcttacaccattgattttgtcgatgacgggcccggcgtggcgaggcattttttaccggatatgtttgaacgttttacccgcgaggaggcgtcccgcgccagacactccggcggcagcggcctcggattatccattgcgcgcgctatctgcgtggcgcacggggggcgcatcagcgcatcgctaccggcgagcggcggcctgcagattcgcgttgttctgccgtacgctcccgccgcagaagaaaacagcctgccttga

SEQ ID NO: 178162 - DNA, 696 bp, Klebsiella oxytoca
atgttgtccagaagagtgttgataattgaagatgacgccgatgcggccggggtgcttgaggcctatttacgccgggaaaactatgatgtggcggtcaccgtggatggcctcgctgggctggatatggcgcagcgctggaaacccgatctgattctgctggacgtgatgctgcccgggctgaacggcaccgaggtgctggccagcctgcggcggaaaagcgatgtgccggtgattatggttaccgcgatgggggatatgcccgatcgtattggcgcgctgcgctatggcgccgacgattatgtggtgaaaccctatcatcctggcgaggtggtggcgcgagttcaggccgtgctccggcggagccgcaaagcggagacgcaggaagacattctgcgctggcaggggctggaggtggacgtcgctgccatcgtcgcggccgtcagcaatccgggggaatctgtccatgttctcgatcttaccccgaccgagttttcgcttctggctacgctgatgcgcgcccccgtccgtcccttttcgcgacagtatctgctggagcgctgccttcctgagagcgaagcgcttgagcgcgtggtggatacgcatatctataacctgcgtaaaaaactggagggggcgggggtatccggggtgctagtcaacgttcgcggcgtgggctacaggttcagacagccatga

SEQ ID NO: 178163 - DNA, 789 bp, Klebsiella oxytoca
atgatagccagaaaaatttcgccgtatatggtcgtgccgtttttaatggcgataacacccggcgcgcgtgccgatgaagccaccgcgccttccgatgggctgactatcggggtgggcggaaaatacgcgcctcgttacagcggctctgacaagcagagttggcaggtggttcccgtactacaggggcggaaaggcgctttctttattgatagccaaaaaggcataggctatgacctggctggcgacagcggtctctacttcgagcacacgctcggttatgacctcgggcgagcggaaaaaaactcaggctggcgcgatggggcgaatacgctgaaggggatgggtaatattaaagccaccatgaataccgccttcgccgtcggctggtcggtcacgccgtggctcaccgttgaaggtaaggctacgcttccgctcaccgacgcccagggcgtgcattatcagacctccgcaaccctcctgctgctccagaattcgcaggatatcgttgccttacagtccggcgcgctgtttggcgacagccggtacgccaataccttttacggggtcgatcaacgacagagcgcccgttccggctatcgccgctatcgcgcccccggcggattttacggcatcgacaacgcgctgacctggagccatcaatatgacgagcattggggttccacgctcagcgccggctatacctggctcggagaacacgccgctgacagcccgatagtctcacggcgcaatgaaggttccgtgaccgcggcaatcacctggacattttaa

SEQ ID NO: 178164 - DNA, 1281 bp, Klebsiella oxytoca
atggctgagcaaaaatatgatgttaatcaaccgtcccggcggcggttgttaaaagggatcggcgcgcttggcggcgcgctggcgatatccggcggctgcccggtggcgcacgcggcaaaagacaatagctctccgggcacggtgtcgccggatgcgcgtcaggaagcgcagccgttttatggtccacatcaggcaggagtgctgactccgcagcaggcgtcgatgatgattgtcgcctttgatgtgctggccagcgataaagcggaccttgagcggctgtttcgcctgctgacccggcgtatcgcctttctgaccaaaggcggtcccgcgccggagacgccgaacccgcggctgccgccgatggactcaggcattctcgggccgtggatcgccccggataatttgacgatcaccgtctcggtggggcattcgctgtttgacgagcgtttcggcctggctcatcaggcgccgaagaggctgcaaaagatgacgcgttttccgaacgattcgctggatgcggcgctgtgccacggcgatctgctgctgcaaatttgcgccaacacccaggatacggtgattcacgccctgcgggatgtgattaagcacaccccggatttgctcagcgtgcgctggaagcgggaagggtttatctccgacagcgccgcgcgcagcaagggtaaagagacgccggtgaatctgctgggcttcaaagacggcaccgcgaatccggtgagcaccgataaggcgctaatggataaagtggtgtgggtcaccgccgaccagggagagccagcgtgggcgacgggcggcagctatcaggcggcgaggattattcagttccacgttgagttctgggatcgcacgccgctgaaagagcagcagactatttttggccgcgataaactgagcggcgcgccgcttgggatgcagcacgagcacgatgtcccggattacagcaaagaccctgacggcgataccattgcgctcgatagccatattcgtctggcgaacccgcgtaccccggaaaccgaatccagcctgatgatgcgccggggctatagctattcgctgggggtgaccaattccggtcagctggacatggggctgctgtttgtctgctaccagcacgatctggaaaaaggcttcctgacggtgcaaaagcgcctgaatggagaagcgctggaggagtacgtgaagcccattggcggcggctatttctttgttctgccgggggttatcgacgatcggcattatctcgggcaatcgctgctcgaagcctga

SEQ ID NO: 178165 - DNA, 225 bp, Klebsiella oxytoca
atgtttaacaagcatatcatcggtcttattgggccgttgttgattctgacttcattccatagcctggctgacgccgggcacccgtcaattcgtgaacgtattgtcgagcaggtgttaaaaccctgcgaaggaaaaaaagccggcgataaagtgctgatcgtcgaccatcgcggcggcaagcatgcggctatctgcacgctggcggcggtaccgctaccggagtaa

SEQ ID NO: 178166 - DNA, 192 bp, Klebsiella oxytoca
atgatgcagatgtttaaatatccgcagggagaagggggccgtcatggccgcatggaatgcgtcgccaccgccgctcgtcggttctttttaccttttgatttgccattaaccccgttgcgaagcaggttggtttcccggtctctacgaccgcaaacccaggtgtgcagcgggggaaatggctatgtctattaa

SEQ ID NO: 178167 - DNA, 1491 bp, Klebsiella oxytoca
atgaaaataaatccgattctggccattgatggttataaagtttcccatcgcgtgcagtatccgcaggggacaacgaaggtttactctaactttaccccgcgcagcgatcgttttttccagtcgccgcaggccgatggcaagctggtatttttcggcctgcagggctttctacagtggttcctggtcgatctgtttaacgaggcgtttttcgcccgcccggaagaggaggtcgtcaacgagtataagcaggtgatggacggctatctgggccgcgatacggttggggtggaacctattcgcgctctgcatcggcttggctatttaccattgcatatcaaagcgctggatgaaggcaccaaggtgccgatgaaagtaccggtgctgaccatcaccaatacgcaacctgagttcttctggctggtgaactatctggagacggtgctttcggcggagctgtggaaagcgtcaaccaacgcgaccatcgcccaccactatcgcctgatttgcgaacgctgggcggagaaaacctgtagcgatctgacgcaccttgatttccagtgtcacgatttttcgtttcggggaatgtccgggctgcacgacactgcgcagtcgggctgcggacatctggccagcttcaaagggaccgatagcctgccttcgctgctgtatgcccgtgattattacactcgcggtgaagatgagctcatcggtgccagcattccggctacggaacacagcgtgatgtgtatgggcgagcgcgagcgggaaattgaaacctttcgccggctgattaccgaagtccacccgcagggtttcgtctctatcgtctcggatacctgggactactggcaggtgctgaccgaatacacccgcgagctgcaggcaataattatgcagcgtcaggggcgcgtggtattccgtccggacagcggcgatccggtggcgattctgtgcggaaccgcagctgacgacgacactcgcagcgagcgcagcgccgaggagaaaggctccgtggaggttctgtgggaaatttttggcggcactatcaacgaaaaaggatacaaggtgctggatccgcatgtcggcctgatttacggcgattccattactctcgccagagcggatgagatcctgcgtcgcctggaagcgaaaggctttgccagcgctaacgtggtgttcggcgtgggttcatttacctaccagtacaacacccgcgataccttcggcttcgcgatgaaggcaacctggggggaggtgaacggcgagggaagagccctctttaaggagccgaaaaccgataatggtcttaaacgttcggcgcgtggtctgctgcgcgtggaacgcgacgccttgggggaactgcagctgtacgatgggcaaacgctggaacaggagcagcagggcgagttaaaaacgcgctttctggatggcaagctgtacggctatgtctcgctgtcgcagatccgcgcccggctggcggcgcagcgctaa

SEQ ID NO: 178168 - DNA, 870 bp, Klebsiella oxytoca
atgagcgaaaaatttaccctggaactggatgatgaggcgtttacgcttgccagcggcgtctttcccgatggcgctgtgtggctgaaggtgaccgatccactaccgccttccgcccgtctgatgcgcatccgggcggttgctctgcgcgacatgaacgattttatgctgctggcgcagctggtggaggccgtgcgtcatgttaccgacgtgacgtttagtcatctggaactgccgtggctgccgtgggcgcgtcaggatcgtcatatggtgccgggagacagcttcgcgctgaagatctttgcccggcagcttaatacccttggctttgacaaagtcgtggtacttgacccgcacagcgatgccgcagcggcggcagtcaataatatggtcgcggtggctcaacagcactgtcttctgcagagcgccggtctgcgtcaggctattgctgccggggagctgatgctggtggcgccggatgccggcgcgctaaagaagattcatcctgtggctaaagcctgcggtgccggagagttcgcgatcctcggtaaagagcgtgaccttgccagcggcgcgttaaccggtttttccctgctggccggtgatgtcgcgggtaaagcggtgcttattgttgacgacctctgcgacgctggcggcacctttatcggctcggcgcaggtgctgcgcgaggcgggcgcccgcagcgtgagtctgtacgtcacccacggtattttttccaaaggcgtagagcatctgttgaataacggcatcgatgccgtttacgccaccacctctttgacttctcctgccctggctcatccgcagctggagcttatcgatattgacgccatctaccgcgcacattggggataa

SEQ ID NO: 178169 - DNA, 720 bp, Klebsiella oxytoca
atgaccaacgatgccgaatacctcagccaatacgatgccagccgctttccctcgccgctggtgaccgtcgatagcgtcctgtttaccctgcatgaaggggcgctgtgcgttctgctggttgagcgcgctaatccaccgcagcagggggcgtgggggctacccggcggctttatcgatctggcgcacgatgattcaacccgcgccacggcgctacgtaagctcacggaaaaaaccgggatttcaccgtcatggctggagcagctcgacaccttctccgggccggatcgcgatccgcgcggctggagcctgactatcgcctggtttgcgttaatctcgtgggtagagtgtcagccgcatatcgccagcgtcagcgatgcccgctgggtgccggtggcgcagctggatagctattcgctggctttcgatcatcaaaagattatcgacgccggtctgcatcgcttacgccaaaaaacgatgtactctttactgccggtttactgtctgccggagacctttacccatggtcagctgctggaagccacggaaatcatccttggtcagccgattcaacgcaaaagcctgattcgccgcttcgaagcctccggaatgtttgaagagaccggtgaaacagcggcaaccggcgcgcggaaagcgcggctatggcggcgtaaacccggcgtcgattttcatctcttttcacgtaacctgctgaccgattag

SEQ ID NO: 178170 - DNA, 441 bp, Klebsiella oxytoca
atgcagtgggacgttgaacgttggctgacggggcgcaaatatctgttcatgatatccgtcgctctggtcctcatcgccgtaatcgggttctggctactgctgcctctccaggcagaaacgtcggcggggcgctcgccgcaggtacaggcgcagtggcgaaaactgctgccgctgcgtagcgctttacagaccgccggcatggaggaagacgcgacccaggtttttacgcctattgatcttccgattgccggggcgacgcttatcgcctggcggccagggggctccgcaggcgagatgcagctggcggttgactggcaagcggtgcccgcgctcttttcctggctggctcgctgcgggatgcgcgctacggctttctccctgcagccggaaaagcaggcgttacggttgaccctgcatctggaggcggaagatgcgccttaa

SEQ ID NO: 178171 - DNA, 540 bp, Klebsiella oxytoca
atgagccacatcgttaacttccttccctggcgcgaaacgcgtcgacggcaacgtctgcggatggcaggactgctgattgtgggtttgctacttattctgcttgtggcgatcctcgcctcacggctcaacaaacgggccagccactcgcttgaaacggcgaggataagcgctgacgacctgctttatagcgcattacagcagcgtgaacgcgccatgcgccagcgcctgcagcagcaggaacaacggcgcctgcgctatctgcggcgcgagagaaccgccgcctggcagccaacgttacaggcgatagcgtcgcgtatgccggagcacgcctggttaacgctgctggaataccgacagaataccctggtactgagcggactcacgttgcatctaaaggggctggctgagcttgaaaaggcgctggggagcgttgccggcttgcgtccgccaaaggcgggagaaacgcaccgcgacagcgaagggcgctggttatttcacttttccatggccgaagaggacgacaatgcagtgggacgttga

SEQ ID NO: 178172 - DNA, 2391 bp, Klebsiella oxytoca
atgtcacagacttcttttaacaaagctcagtttcaggctgcactgacgcgtcagtggcagcattttggtttacagtccgcttccgagatgacccagcgtcagtggtggcgcgccgttagcggtgcgctgtccgagctgttgtcggctcagccggtagcaaaagcggccgaagggcagcgccacgtaaactatatctccatggagtttttgatcggtcgcctgaccggcaacaacctgcttaaccttggctggtatcagcaggtcagcgatgagcttcaggcccacgacattaatttgaccgacctgctggaagaggaaatcgacccgggtctgggcaacggcggtcttggccgtctggcggcttgtttccttgattcaatggctaccgttggccagtcggcgaccggctacggcctgaactaccagtacggtctgttccgccagtctttcgctgacggccagcagatggaagcgccggatgactgggggcgtaatagctacccgtggttccgccacaacgaagcgctggacgtgcaggttggcctcggcggtaaagtgaccaaaagcggtgagtggataccggcattcgtgattaccggcgaagcctgggatctgccggttctgggctaccgcaacaacgtggctcagccgctgcgcctgtggcaggctaagcacgcgcatccgtttaacctgaccaaattcaacgacggcgatttcctgcgtgccgaacagcagggcattgacgccgaaaaactgacgaaagttctctacccgaacgataaccatcaggcgggtaaaaaactgcgtctgatgcagcagtacttccagtgcgcctgctcggttgccgatattctgcgtcgccatcatctggcgggccgcaagctggcggagctggcggattatgaagtcatccagcttaacgatactcacccgacgattgcgattccggaactgctgcgcgtgctgattgatgagcatcagctgagctgggacgacgcctgggcgattaccagcaaaaccttcgcgtataccaaccacaccctgatgccggaagcgctggagtgctgggatgagaagctggtgaaagcgctgctgccgcgccacatgcagatcatcaaacagattaacgaccgctttaaaacgctggtggataaaacctggccgggcgataagcaggtatgggcgaaactggcggtggtgcacgataaacaggttcgcatggcgaacatgtgcgtggtgagtggctttgcggttaacggcgttgccgcgctgcactccgacctggtggtgaaagatctgttcccggaatatcaccagctgtggccgaataaattccataacgtcaccaacggtattaccccgcgccgctggatcaaacagtgcaacccggctctggccgcgctgctggataaaaccctgaagaaagagtgggccaacgatctcgaccagctgatcaacctcgaaaaatatgccgatgacgctaagttccgtcagacgtatcgcgacattaagctggccaacaaggttcgtctggcggagtttgtgaagcggcgtaccggtatcgagattaatccgcaggcgattttcgatatccagattaaacgtctgcacgagtacaaacgtcagcacctcaacctgctgaacatcctcgcgcagtacaaagaaatccgcgagaacccgcagacggaccgcgtaccgcgcgtgttcctgttcggtgcgaaagcggcgccgggctactacctggcgaagaatattatctgggcgatcaacaaggttgccgcagcgatcaataacgatccgctggttggcgataagctgaaagtggtattcctgccggactactgcgtctcggcggcggaaatgctgatcccggcggcggatgtctccgagcagatctctacggcgggtaaagaggcctccggtaccggcaatatgaagctggcgctgaacggcgcgctgaccgtgggaaccctggacggggcgaacgtggaaatcgctgagcaggtgggtgacgaaaacatctttatcttcggtcataccgtggaagaagtgaaagcgctgaaggccaaaggttacgatccgctgaaatggcgtaagaaagacaagctgctggacgcggtgctgaaagagctggagagcggcaaatatagcgatggcgataagcatgcctttgaccagatgctgcatagcctgctgaaaggcggcgatccgtacctggtgctggcggattttgaagcctacgtggcggcgcagaagcaggttgatgcgctgtatcgcgaccaggaggcctggacgcgcgcagcgatcctgaacaccgcgcgctgcggcatgttcagctccgaccgctcgattcgcgattatcagcaacgtatctggcaggcaaaacgctaa

SEQ ID NO: 178173 - DNA, 1341 bp, Klebsiella oxytoca
gtgagtacattaacgcttgttttaacagcagtcggctccgttttgctgctgctgtttttagtgatgaaggcgcgtatgcatgccttcgtggctttgatggtggtttctattggagcagggcttttttccggaatgccgttggacaagatcgcggcgacgatggaaaaaggcatgggcggcacgctgggctttctggctatcgtcgtcgcgctgggggctatgttcggtaagatcctgcatgaaaccggcgcggtcgaccagattgccgttaagatgctgaaatctttcggccacaatcgcgcccactatgcgataggcctggccggacttatctgcgcgctgccgctgtttttcgaagtggcgatcgtgctgctgatcagcgtggctttctcaatggcgcgccacaccggcaccaacctggtgaagctggtgatcccgctgtttgctggcgtagccgctgcggccgcgttcctgctgccggggcccgcgccaatgctgctggcctcgcagatgcacgccgactttggctggatgatcctgattggcctgtgcgccgcgatcccggggatgattatcgccggaccgctgtggggtaactttatcagccgttacgttgagctgcatattccggacgatattagcgagccgcacctcggcgaaggcaaaatgccgtcattcggcttcagcctgtcgctgattctgctgccgctggtgctggttggcctgaaaaccatcgccgcgcgctttgtgccggaaggctctaccgcctacgaatggtttgagtttatcggccatccgtttaccgcgattctggtggcgtgcctggtggctatctatggcctggcggtacgtcaggggatggccaaagatcgggtgatggagatttgcggtcatgcgctccagcctgcgggcattatcctgctggtcatcggtgcgggcggcgtgttcaaacaggtgctggtcgactctggcgtcggtcctgccctcggcgaagcgttgaccggtatgggcctgccgattgccatcacctgcttcgtgctggcggcggcggtgcgtattattcagggctccgcgaccgttgcctgcctgacggccgttgggctggtgatgccggttatcgaacagctgcactacagcggcgcgcagatggcggcgctctctatctgcatcgccggcggctctattgtcgtcagccacgttaacgacgcgggcttctggctgttcggtaagtttaccggcgcgaccgaagcgcaaacgctgaagacctggacgatgatggaaaccatcctcggcaccgtcggggcgattgtcggcatgattgcgtttacgctattgagttaa

SEQ ID NO: 178174 - DNA, 660 bp, Klebsiella oxytoca
atggaaagcaagtatattgccctgaatagcgcccttctcttttggctgcttggcctgatggcctggtgctgcgaatccacgtatctggcctggctatcgggctctttctccttgtcatctttcgtttttcattttcaatatcatcggattaaccatatgtttaaaaagaataaaaacattgaagcgacgccacagacggcggctacgccggtactcaacagcgcatccccgttagccgtttcccgcaaacctgccgccacggttatcgccagcggcatccgctttgacggcaatattatcgccgagggagatgtcgatatttacggtaccgtaagcggcaatatcgacgccgaagagagccagattaagattatggccggaggcctggtcgagggaaatatcacctgccgcgagctgattatcgacggctgcatcctcggtcagtgccgcagcgagacgattgaaatcgataagaacggccaggtcaccggtacgttggcctaccgcacgctggccattaacaagggcggcgttttttccggccaggcagagctgctgcctgcggcggcagataagagcaacgtggtgggattcatcacagataccgcggtagaaacgaaagagagagcggaagcgcatactgccgaagcggcgcagtag

SEQ ID NO: 178175 - DNA, 492 bp, Klebsiella oxytoca
atgagcgacatagtgatacgtcacgccgagccacgggatgctgaacctttacgccagataactgcgcatccggaggtctatcacgacacgctacagctccctcatccttctatggaaatgtggcaggaacgcctgctaccgaaacccggtagccgtcatctggtcgcgacaatcgacgaacaggtggtgggccacctcaggctcagcatcgaacccagccctcgtcgcagccacgtggcgacctttggcgtcagcgttgccgcgcaggcgcacggccgtggcgtaggcagcgcgctgatgcgagagatgattaatctctgtgataactggctgcgcgtcgatcgtattgaattaaccgtgtttacggacaacccatccgcgatggcgctttaccgcaaatttggctttattgtagaagggaccggcaagcaatacgccctgcgcaacggcgaatatgtcgatgcctactttatggcgcggctgaaggggtga

SEQ ID NO: 178176 - DNA, 333 bp, Klebsiella oxytoca
atgaataaatcacaggtggagatattcatgcttatggttcgggaggggagtgttcattttgtatcgcagcggctgagtattgcgccttcgttgataacaaccagcgtatgtgcgcttgaaaatgaactgggtttcaacctgattaagcgcggcaggaatatcagaaaagttatcttaacggaaaaaggacacgctttttatcggcttgctccagagttactgagattgcttaatgcgattgcggatattcgggcgggaataaaacagcccggcaagtccttcccgccgggcaaaataatcagttcagccccaggaaatactgggcaattttga

SEQ ID NO: 178177 - DNA, 783 bp, Klebsiella oxytoca
atgaaaacgatcgcgtggcagaccacgggcgaaggaaattgtcatcttgtgctgctgcacggatgggggctgaatgccaaagtgtgggattgcatcacgccgcagctggcttcgcattttacgctgcacctcgtcgacctgcctggctatggccgcagcggcggctttggcgcgatgtcgctggaagagatggcccagcgggtgctggaaaacgcgccggagcgcgctatctggctaggctggagcctcggcgggctggtggccagccaggtcgcgttatcccatcccgatcgcgtgcaggcgctggtcaccgtggcctcttccccctgctttagcgctcacgacagctggcccgggattaagcccgacgtgctgagcggatttcagcagcagctgagcgaagattttcaacgcaccgtcgaacgctttctggcgctgcaaaccctgggtaccgaaagcgcgcgtcaggatgcgagagcgctgaagagcacggtgctgtcgctaccgatgccgtcgccggaggttttaaacggcgggctggagatcctcaaaaccgccgatttacgccagccgttgaccgccctcgccatgccttttttgcgcctgtacggtcggctggacggtctggtaccgcgtaaaatcattccgcttctcgatgcactgtggcccaaaagcacgtcgattgtcttcgataaagccgcccatgcgccgttcatttcacatccgcaggcgttttgcgctccgctgatcgagctgaagcgtgagatcgataaatttttttag

SEQ ID NO: 178178 - DNA, 1272 bp, Klebsiella oxytoca
atgaaactgcacatcacgcttctcgcatcggcgctcatgctggcgctgccggcattggcgaaagaggttcctttgaatcaggcggcggcaatcgccaacggcgtgacgccagccgccgccagtccggggtttgacgcgctggagagccaaagcctgtcgcagctgcgcaacgcgctgaagggcgatgcggcaaccctgactcgcgaccagcttgaacacgccagacagaataaaacacaggcggataccgcgtggctgaaggccagcggttatgacttccagacaaaagccaaccagcaggcgggaatcgagctgctctcagcgttcagcgcgctgccgaaggcggtcatacagcaaaacctggcgaccgtcaccgccattaaccgcgatgccgcacagagcgctcgccaccaggcgctggcggatgccgaaggcatcagctatctctatttcctcagcgatgcgctggggccgcgcctcggcaaggcgttcctcgccgcctacgacaaaggcgagctcggtaaggcggcggcgctgatcaaagcttcggaagtgagtaccggggcggcgaaaaagcacttcaataacccgcgcccgttcctgattcagggcaataccattcatctggtgccggacgatgtagtcgttaaggacaataagccctataccgccgacggcggctcgtttccgagcgggcacaccaacaccggctataccgacgctctgctgatggcggagatgatcccggagcgcttcgacgcgctggtgacgcgcggcgcccgctatggctattcgcgcatcgtgctgggcgtgcactatccgctggacgtgatgggttcgcggatggtggcgcagcgcaatgtcgcccactacctgaatgacgcgaagtatcgggggctgtttaatgaggcccgcgaccagctgcgtaccgcgctggagaaagagtgcggcacgacgctggcggagtgtgcgaaagtgcctgcgaaagacgatccgtatcgcgacccggcgatggtcgcgttttatcgctttaccatgacctacgatctgccgcagcagaagggcgaaaaacagagcctgaaggtgccgcaaggggctgaagtgctgctggaggctgcgctgccgaatctgtccgccgcgcagcgtcgggcgctgatgatcaaaacggcgttgcccgcagggtatccgctatccggtgataacgacgcgcagcagttctggcagcggctgaatttgccagcggcgtatgcgatggcgaataaagcgcattaa

SEQ ID NO: 178179 - DNA, 549 bp, Klebsiella oxytoca
atgcctgaactggttaccccacgtctgcgctgctcgccgctgcagcttgacgactggcccttttttctcagcttacagcaagacccccaggtgatgctttacgtcgcggatccccgcccggtagcggacattcgcgacgcttttgatgcccggcttcccgcgtggtcgccgggcgcggcccactggctgtgcctggtagtgcgcgaccgctacacccacgctcccctgggcctcaccggctatcagcatcacgctcccgatagcgccgaagcgggctttctgttcgctccccgggcgcagggcaaaggttacggctatgagtctctgcgcgcactgtgcgattacgctttctccgccggcggcatccggcggctgacggcaaccgtcaccgcgggcaatctggcgtcaaaaaatctgctgcaaaaggtcggttttcaccaggagggcgagctgcgcgactgctactggctcaacggtcgctggcacaacgattggctgtttggcctgctgcgccgcgattaccaccagcctgggccatctggcgaatag

SEQ ID NO: 178180 - DNA, 429 bp, Klebsiella oxytoca
atgtccccaaccataccgccgctaagcctgcacgggctggagtttattaagcgaatgcaggggttagcgctcgccccctatcgggacgaaagcggcctgcgcgtgattggctacggccacgttctcaatgattacgaatcgttccctcacttcacgcgcgagatcgcggagactctgcttatcgtcgatcttctgcagtgccagcgcgaacttaagcgcaggctccaggtcacgcttaatcaagcgcaatatgatgcgctggtctctttagcctttagctgcggggcggcgtctccggcgcttgataccgtcctgacccatcttaatcatcagcggttcgctgacgcgctgagcgcatgggaaaatattcgcagcggccgcgaacagcgacgcgaagagtgcgcaagattcaaaaccagagccgattaa

SEQ ID NO: 178181 - DNA, 609 bp, Klebsiella oxytoca
atgcagatactcatgtttgacaggcagtcgatatttattcatggaatgaaaattggcctccagcaatacattccagagattgatatttttggcacctgtcaggctgaacagctctggcagaagctgacggcgcatcctgacgcgctgctcatgctggacggggatatgcacggtgagttttgctgttggctgctggaggaaaaacagcgtcgttttccgcacgctcaggtcctgctgatcgtttctgacgataataagggctggctacagcgcgcgctgtcttataatgtgcgggccatcgtgcagcgcgaggaaagtttgcccactttcgctcagaccatcaaccgtctccggcgggggctgccctgcttgccggacaatggattaataatggcggaggtgagcgataataaacgagttcatttgagccagcgccagcgggagattttgcagctgctggccgccggtgactctaataaacagattagccggacgttaaatatcagcaccggcacggtaaaggcccatcttgagtcgctgtaccgtcggctggacgtgaagaatcgtacccaggcggcgatggtctttcatcgcgttagcgaaacttaa

SEQ ID NO: 178182 - DNA, 282 bp, Klebsiella oxytoca
atgcgcctgtccgggctacaaaacccgcaggcggcaccgacctgtagccccggtaagcatagcgcgaccggggaacattcccgggtggcggctgacgccttacccgggctacatggtcacaaccaccatcgggccggtagcccggacaaggcgcccctggcgccgcctccgggatgcagcgcgctatgcagcttccgcgccaccggaggggaaatcgggctgcctggccggaggcaacgagtatacgcgaagagcgccgtggagtggcgccctgtcgcataa

SEQ ID NO: 178183 - DNA, 2343 bp, Klebsiella oxytoca
atgaacagaaaactctctttgatttgtgcagtagcggtgggtattagcggatggtctcccttcgcttcgtatgcggaaccgacggcggcggcgactcaggccgcgccgacgacgacggtgcccggtatcgctggtacggtgggggacagccagcccacggcgacgcttgccgatccggcagcgccggtggtggtgctggataacgctccgacccgcgacgtgaagctgaccttcgccaaaatcgccccgcctccgggcagcatggtgctgcgcggcgcgcgccctgaggggtcggtagagttcggtatgcgcagcgatgaagtggtggcaaaagcgctgctgaatctcgactacacgccctctccgtcgctgctgccggtgcagtcgcagctgaaggtgtatcttaacgatgagctgatgggcgtgctgccggtcaccaaagagcagttgggtaaaaaagtcagcgcgcagatccctatcgatccgctctatatcaccgactttaaccgcgtgcgccttgagtttgtcggccactatcgcgatgtctgtgaaaacccggccagcagcaccttgtggctggacgtcggtcgcgaaagctatctggatttaacctaccagtcgctgaacgtgcgcaacgatctttcgcatttcccgataccgttctacgattcgcgcgataaccgccagctgacgctaccgatggtcttcgcctccgcgccgggtgtcctgcagcagcaggcagcggccatcgtcgcctcctggttcggcagcaaggcgggctggcgcggccagcagttcccggtgcagttcaacgcgctgccggaccgtaacgccattgtgtttgcgaccaacgataagcgccctgacttcctgcgcgagcatccgccggttaaggcgccgacgattgaaatgatcgaccacccggataatccgtacgtcaagctgctggtggtcttcgggcgggatgacaacgacctgctgcaggcagcgaaggggatagcccagggcaatattctgttccgcggcagcagcgtgacggttgacgatgtcaaacagctgcaggcgcgtaaaccctacgatgcgccgaactgggtgcgtaccgatcgggcggtgacctttgccgagctgaaaacctacgaacagcagctgcaatccagcggcctggtgccggactccatcaacgtagcgctgaacctgccgccggacctctacctgctgcgcgccaacggcatggatatgaacctgaactatcgctacaccatgccgcctatcaaggacagctcgcgcatggatatcagcctgaacgatcggttcttacagtccttcagcctcaacagctcgcaggatgtgaataagctgatactacgcctgccggtgctgcaggggctgctggacggcaaaacggaagtgacgatcccggcattgcgcctcggcgccatgaatcagctgcgctttgactttcagtatatgaacccgatgccgggcggttctatcgataactgtattaccttccagccggtgcagaaccacgtggtgataggcgacgactcgaccatcgatttctcgaagtactatcactttatggcgatgccggatctgcgcgtatttgctaacgcgggcttcccgtacagccggatggccgatctcgccgataccctggtcgtggtgcccaaatcgccgaccgagggccaggttgccacgctgctggagacggccggcggcattggcgcgcaaaccggcctggcggccattaacctgcgcatgaccgacgacggcagccagattaaggacaaagacgccgacctgctgctgattggctccattccgcaggcgctgaaggacgacacgaaaatcaacctgctggttgaagcgaccaaaagctgggtgaaaacgccgatgcgccactacgatctggccagcatctatcccgataccgaggccagaacgccgaatacccgcaccgacgtcacgtccaccgggccgatggcggcgattattggcttccagtcgccgtacaacgatcagcgcagcgtcgtggcgctgctggccgacagcccgcgcggcaacgaactgctgacccaggcgcttaacgacagcggtaaacgcgcggcgatgtttggttccgttgcggtgattcgtgagtcgggcgtcaacagcctgagggtgggcgatatttactatatcgggcacctgccgtggttcgaacgtatctggtttgcgctctccagccatccggtgctgctggctattctggccgcggtcagcatcgtcctgctggcatgggtgctatggcgcatgctgcgcattatcagccgtcgccgcctcgaccttgatgatgagtaa

SEQ ID NO: 178184 - DNA, 2619 bp, Klebsiella oxytoca
atgattcgcctgagcaccctactgctggcgccgccggtcgggaaacggctgaacgagcgctatcgcgactatcgccagcacggcgcgtcgtggctgtcggccgcgctgggctgcctgtgggcatctctggcatgggcgtttatgccgctggaaacgccgcgctggcaggctattcgcgaacgtcacggcgagtttttcccgcatattaatccgcatcggccgcgcccactggacccgattcgctacctgctgcagtgcgtgtggctgctggcgacgcgggtgccggagccggacaaaaagatcaactggcgttcgctggcggcgctggaaggcgttcaggggcgctatgcccagtggctggaaaagctgccggaaaaggttaacgcccgcaccggtcatctggataagcataaagagctggctcacctgtcgccaaagctgcggcggtttattctgggcacgataacctttttctcgctaatcctcgcgctgctctgtattacccagccgtttaacccgctctcgcagtttattttcctgctgctgctgtggggcgtggcgctgctggtgcgccgcattccgggacgcttttcggccctgatgctgatcgtgctgtcgctgaccgtctcctgccgctacatctggtggcgctacacctcgacgctcaactgggatgatcccgtgagcctcgtgtgcgggataattctgctgttcgccgaaacctacgcctgggtggtgctggtgctggggtatttccaggtcgtctggccgctgaaccgtcagccggtcccgctgccggaggatatggcgcagtggccgacggtcgatattttcgtgccgacctacaacgaagacctcaacgtggtgaaaaacaccatttacgcttcccaggggatcgactggccgaaggacaagctcaatatctggatcctcgacgacggcgggcgcgaggagtttcgccagttcgccaaagacgtcggggtgcactacatcgcccgcaccacccacgaacacgccaaagccgggaatatcaacaacgccctgaagtacgccaagggcgagttcgtgtcgatttttgactgcgaccacgtgccgacccgctcgttcctgcagatgaccatgggctggttcctgaaagagaaagagttggcgatgatgcagacgccgcaccacttcttctccccggacccgtttgagcgcaacctgggacgattccgcaaaaccccgaacgaaggcacgctgttttatggcctggtgcaggacgggaacgacatgtgggacgcgaccttcttctgcggctcctgcgcggtgatccgccgcggcccgctggatgaaatcggcggcattgccgtggaaacggtgactgaagacgcccacacttctctgcgcctgcaccgtcgcgggcacacttcagcctacatgcgtatcccgcaggcggccggtctggcgacggagagcctgtcggcgcatattggccagcgcatccgctgggcccgcgggatggtacaaattttccgccttgataaccccttgtttggcaaagggctgaagctggcgcagcgcatctgctacgtcaacgcgatgctgcactttctgtccggtattccgcggctgatcttcctgaccgcgccgctggcgtttctgctgctgcacgcctatatcatctatgcgccagcgctgatgatcgccctgttcgtgctaccgcatatgattcacgccagcctgaccaactcgaagattcagggcaaataccgccactctttctggagcgagatctatgaaacggtgctggcgtggtatatcgcgccgccgacctttgtcgcgttgattaacccgcataagggcaaattcaacgtgacggcaaaaggcggactggtggaggacgagtacgtcgactgggtgatctctcgtccctatatctacctcgtgctgctgaacctggtcggcgtcggggtggggatctggcgctttatgtacggcccggaaaacgaaattctgaccgtctgggtgagcattatctgggtgttctataacctgattattctcggcggcgcggtggcggtctcggttgaaagcaagcaggtgcggcgatcgcaccgcgtggagatgtcgatgccggcggcgattgcccgcgatgacgggcacctgttctcctgtaccgtccatgattactcagacgggggccttggggtcaagattcacggcgaggcgcaggtgctggaaagccagcacgtcaagctgttgctgaaacgcgggcagcaggagtacgccttcccggtgcgggtcgcgcgggtcaacggcagcgaggtcgggctacagctgctgccgttaagcaatcaacagcatattgattttgtacagtgtacgtttgcccgcgcagatacgtgggcgctttggcaggatagcttcccggaagataagccgatggaaagcctgctggatatcctgaagctggggttccgtggatatcgtcacctggcggagttttctccgccgtcggtgaaggttattttccgctcgctcaccatgctggtggcctggtttgtctcgtttattccgcgccgtccggaacgcgcagcggcgacactctcggcagaaccggcgatggctcaacaatga

SEQ ID NO: 178185 - DNA, 738 bp, Klebsiella oxytoca
atggcgattctgggattacagggcgtgcgcggcggtaccggcaccacgtcgattaccgctgcgctggcctgggcgctgcaattactcggtgaaaccgtactggtggtggacgccagcccggacaacatgttgcgcttttttttcaacgtcgatttcagccacaaagcgggctgggcgcgcgccacgatcgacggcagcgactggcgcgacgccggtctgcgctacacctcgcatatcgatcttttgccctttggtcagctgacgccgggcgagcgcgcgaacattgaccagcttcagccgacgctggcgccgatggccgggatggtgcagaagctccatcagcagggcgatcaccgctggctgctgattgacctgccggacggttactcgccgctgacccgctccctcattgacgtctgcgaccgcacgctggtcatcgtgcatccggacggcaacagccatattcgcctgcatcagcaggcgctgccggtcaatagcgatattttgattaacgatctgcgcgtcggcagccagctgcaggaggatttgtatcagctgtggctggagagccagcgccgcattctgccggtgactatccatcgtgatgaggcgatggcggagtgtctggcggcgaagcagccgctcggcgagtaccggcaggactctctggcggcggaggagatactgaccctggccaactggtgtctgctgcactacgccgggaagggggcggaatga

SEQ ID NO: 178186 - DNA, 1557 bp, Klebsiella oxytoca
gtggatatcgtatattctttgggtatttcatcattatgggacgaagtacgccatatgcccgtgggtggagtatggtggctgaatgtcgaccgctatgccgacgcggtaagcctgctcaaccatacgctggcggcccaggataaacagagccaggttgcggcgatagtcatgggtgataacccaaataaaatcattgaactagagaaaaattgcgggccagaaaaggtggcgttatttagcatgccgaaccgtgctgaggggctgcaagaaatgcaccgcgatttagtttgttccctcgaacctggcaattatttgtttattctgctatgcgctgaaaatgcctggcagaatataaaaagcgatgatttatgcaattgggttgagaaatcgtatcgatggactaattatcatcgttgttcattactagtacttaattccgggcacgatatcgataagcaactctcccctttattacgcgagtaccgttcgctttccggcctggcaagtattcgttaccagggggataaccacctgttcgatatcgcctggtgggggagcgaaaaaggcatcagcgcccggcagcagctcattgttcttcaggatgaaaacggctggcggctggcacaggatgaagaaacggtggtgcaaccgcgcagcgacgaaaaagtcattcttagcaatctgcgcgtactggaaggtgcccccgcgctatccgaatactggacgctgttcgataccaatgacgccgttttcaacgccgggaggatggcgcaggcggcaacgctgatcttctccattacccagaacgaacagattgaacagctgggacgctatatccataccctgcgccgccagcgcggcagcgcgttaaaaatcgtcgtccgcgagcaaacgccgagcctgcgcgccaccgatgaacgcctgctgctgagcagcggcgccaatatggttattcccagcggagcgccgttatcccgctgccttacgcttatagaaagcgttcaaaaacagcagtttactcgccatattccggaagattttaatactctgctgacctggagccagccgctaaaactgcgcggctaccagaaatggggggacttctgcgaagcggtgcacaatattatggccaacaccatgctgcccgccgatggcaaaggcgtaatggtggcgctgcgcccggcgcccggcctgcgcgtagagcaggcgctgacgctgtgtaagcccaaccgtatgggcgacattatgaccatcggcaacaatcgcctggtgctgtttctgtcattttgccgggtgaacgacctggataccgcgttaaaccatattttccctttaccaaccggcgatattttttctaaccgtatgatttggtttgaagataagcaaataacggctgaaatcatgcagatgcgcgggattctgccggagaactggaacacgccgctgcccatttcgcttggcaaaaatgaaaccatcaacgccacccatgacgggcgaagctggcggcgcaatcccgaggcgcaccgtctgtccattgatggagagccaaccttatga

SEQ ID NO: 178187 - DNA, 999 bp, Klebsiella oxytoca
atgtccttgcgtgctttagcgacagtcgtggtgacgacggtgatgatgcttccccacgcgtgggccgatacggcgtgggaaagctataaatcgcgttttatgatgccggacggacgcattattgataccggcaacggcaacgtctcccataccgaagggcaaggttttgccatgctgttagcggtggctaataacgatcgccccgcctttgacaagctatggcagtggaccgataaaaccctacgtaacaaagataacgggttgttttactggcgctataatccggtggcgcccaatccggtggcggacaaaaacgatgccaccgatggtgataccctgattgcctgggcgctgctgcgcgcgcagcagcagtggcatgaaaaatcctacggcagcgcgtcggatgcgataaccgcttcgctcctgaagtctacggtggtcacgtttgccggtcgtcaggtgatgcttccgggcgcaaagggattctatctcaacgaccacctgaatcttaacccctcctactttatctttccggcgtggcaggccttcgccgcgcgtacgcatctaaccgcctggagaaagctgcagagcgatggccaggcgctgctgggaaacatggcgtgggggaaatcgcagcttcccagcgactgggtggccttaagagcggacggtaagatggagccggcaaaagagtggccgacgcgaatgagcttcgatgcgatccgtattccgctgtatgtctactggagtgactcgaaaagcagcctgctgacgccgtggaaaaactggttccagcgctatccgcgtccgcagacgccggcgtggataaacgtgaataccgatgaagtggcgccgtggtttatgaccggcgggctgctggcggtacgcgatttaacccttggcgaagcgcaggccgatccgcagattacgccccaggacgactattactccgccagcctgaagctgctggtatggctggcaaataaagaccaggcgtaa

SEQ ID NO: 178188 - DNA, 2112 bp, Klebsiella oxytoca
atgaaaaagacgcttttctggttgctggtactggtactttcgcccattgccgtgctggtggtgatcacgccgatggacagccaaaagcagtatatttttggcctcctgagcatcggtattctctttgtgatggggttcagtaaaaaccgcagcgtttccgtcatcatggtggtgacatcgctgctgatgtcgacccgttatatgtatttccgtttaacgcagaccctgcattttaactccaccatcgaagcgattctggggatggggctgtttctggcggaagtctatatctgggtaatgctgctgcttaactacctgcaaacggtctggccgctaaagcgtgaaattgtcccgctgccggatgatatgagcaaatggccgacggtggatatctatattcccagctataacgaaccgcttgaggtggtgcgtgatacggtgctggctgcgcagtgtattgattatccaaaagataaattaaaaatctatttgctggatgacggtaagcgcaatgaattcgcggtattcgccgccgacgttggggttgggtatatcacccgtaacgataacaaacacgccaaggcgggcaacctcaaccacgcgatgacgttgacccacggcgagcttatctgcgtttttgattgcgaccacgtggcaacccgcgtctttttgcaggcgacggtgggcggattcctcaacgatccgatgctggcgctggtgcagacgccgcactacttctattcgccggacccttttgagcgcaacctctccgtgggccgcaatattcctaacgaagggatgctgttttatggcccgattcagcaggggaacgacaactggaacgcgacctttttctgcggctcctgcgccgtcattcgccgcgccgcgctggaacagatcggcggctttgcggtagagaccgtgaccgaagatgcccataccgcgctgaagttccagcgcctgggctggaagtcggcgttcctggatattcctctggcggccggcttagccaccgaacgtctggtagtgcacgtgattcagcgtacccgctgggcgcgcgggatgacgcaaatattccgtctggataacccgctactgggccgtgggctgacgttccagcagcgcctgtgctatctcagcgccatgctctattatcagttcgccctgccgcgggtggtctttgtcaccgcaccgctggcctacctgctgttcaacctgaatatcatctactcctcggccagcctgattgtctcctatgcgctgccgcatctgttcctcgcgatctatgtcggctcgcgcatgaacggtcgctatcgttacagcttctggggcgaaatctacgatatcgtgctggcgttccacctggtactgccgacgctggtgaccatgattttccccaaacgcgggaaattcaacgtgaccgataaaggcggcctgctggacgtgggctacttcgactttaccgtcgtcagaccgcacctggtcgtcgcctgtctgctgggcctgggggtggtggtcggtatcgtccgcgctatcggtcacgactactttggctcagacccgaacgttatcgcgctgaacgtcggctgggggatttacagcctgatcttcctgctggccgccattgccgtggcgcgcgaaacccgtcaggtgcgaaaaacgattcgtattgatgtcgatattccggtgctgatccactacaccagcggcattgtctcccgcagccacaccgcggacctgtccatgggcggctgccgcgtaagcgcgccggataagcgtcacctgcaggatgaaatcgaagagattgagctgactctccagtccggcgcgatttcgatcccggtgcgccaggtcaccgctgacgaccagtttattcgtctgcaatttgatgaaaatattcagctctcccgccgccgcgagctggtgcgcgtggtgctggcccgcgccgatgcgtggattaacccgccgcgcccgcaggacaacccgttccgctcttttgccaccattttgcgctgcgtattcgaactgttctggctgacgtggaagacgcgccgtagccagcgtcgtcagccgcctgcggtgaatccagcgcaggaggatggcagcctatga

SEQ ID NO: 178189 - DNA, 579 bp, Klebsiella oxytoca
atgaaccattatgatgatttgcagcgcttcaaggaaaagacgcggacacacagtctaaaatttaaggacctctcatcagaagccgccgccggcgaaaaaggggattgggttattctcaatcaacttattccggcggaggaagcgtcttctttggccatgggtgggtcagtttccttacctctgccgcagcgggttcctgccgatatgtttcacaaggtggagcctgcggccgttcaggctcccccggggccctctttggctgcaccgtccctgattatcccgccctccgcgccgcagcccgcccccctgacggacattgctgctgcggcggccgtagagcctgcgctgccgcaaagcctggcagcggctgcgcccgccccccagccggcagtttctcaggctgctgcgcagccggtaccggtcagcgtccctgctccggcagtcaggcctcgtccggcggccgcgccgacgacggagggttttgcccatctttttgcggccaaaaccgcggagccggtagcaaaagataaagatcagtcactgaaatcactcctggagaggattgcgacatgccgttga

SEQ ID NO: 178190 - DNA, 1608 bp, Klebsiella oxytoca
atgagtatttccttgaagaaatcagggatgctgaagcttggtctgagcctggttgccatgaccgtcgcagcaagcgtacaagcgaagaccctggtttattgttcagaaggttcgccggaaggctttaacccgcagctcttcacctctggtaccacctatgacgccagctcagtgccgatttataaccgcctggtggaattcaaaaccggcaccacggaagtcattccgggcctggctgaaaaatgggaagttagcgaagacgggaaaacctataccttccatctgcgtaaagacgtgaagtggcaggataataaagattttaaaccgacccgcacgctgaacgccgatgacgttgtcttctccttcgacagacaaaaaaataccaataacccgtaccataaagtgtctggcggcagctatgaatactttgaagggatgggattacctgacctgattagcgaagtgaagaaagtggacgataacaccgtccagttcgtgctgacccgtccggaatcgccgttccttgccgatctcgccatggacttcgcctctattctgtcaaaagagtatgccgacaacatgctgaaagccggtacgccggagaaagtggacctcaacccaatcggtaccggcccgttccagctgctgcagtaccagaaagactcccgtattctctataaagccttcccgggctactggggcaccaagccgaaaatcgatcgcctggtcttctccattacccctgatgcttccgtgcgctacgctaagctgcagaaaaacgaatgccagattatgccgtacccgaacccggcagatatcgcgcgcatgaaggaagacaaaaacatcacgctgctggaacagccgggcctgaacgtcggctacctctctttcaacaccgagaagaagccgctggatgatgtcaaagttcgccaggcgctgacctacgcggtcaacaaagaagcgattatcaaagccgtttaccagggcgcaggccaggccgcgaagaacctgatcccgccgaccatgtggggctataacgacgacgttaaagactacacctacgatccagagaaagcgaaagcgctgctgaaagaagcaggcctggaaaaaggcttcaccatcgacctgtgggcgatgccggtacagcgtccgtataacccgaacgcgcgccgtatggctgagatgattcaggccgactgggcgaaagtcggcgtccaggccaagatcgtgacctacgagtggggtgaatacctcaagcgcgcgaaagcgggcgagcatcagaccgtcatgatgggctggaccggcgacaacggggatccggataacttcttcgccaccctgttcagctgcgcggcggcaaaagacggttctaactactcccgctggtgctacaagccgtttgaagacctgattcagccggctcgcgccacggatgaccacaacaaacgcattgagctgtataagcaggctcaggtcgtgatgcacgatcaggctccggcgctgatcgtcgcccactccaccgtctatgagccggtgcgtaaagaggtcaaaggctacgtggtcgatccattaggtaaacaccacttcgataacgtctctatcgaataa

SEQ ID NO: 178191 - DNA, 1620 bp, Klebsiella oxytoca
atggctcattgtgcccggtccccctcttttcttttgcatcaggtcacctgtcagttagcgacgggagatacgctttttggtccgctgaatttatcgctggaaggcaccctctgcgggcttgtcgggcgcaatggcgtcggtaaaacccgattattgcgtttgctggcgggcctggactcgccgtcgagcggccatatcgaacgtgtggcttcggtgagctacgttgctcagcagcatgtcatgtttcctgatacgacgctggcggaatggcttggcgtcgaattcgttttttctgctctggctcgtcttgaacggggcgaagggcgagccgacgatcttgaacgtcttgatggcttttgggatctcccggagcgcctgaatgcaggattccaggccgctggcttaggagaattttcccccggacggctcgcctcttcgctgagcggcggggaaagagtgaaggcgcagctgtgtgtagcattcctgtctggcgcggatttcctcctgcttgacgaacccaccaaccatctcgaccgacaaggccgcgcgtggctatatcagcagcttgagcaatggcgcggaggggcgttgatcgccagccacgatcgggagctactgacccaaatgccgcgcatcctcgagctggcatccgcggctttgcgcagctacggcggcaattatgtggattatcagcagcagcgtgagctggagcagcaggcggctcgtgccgcgctggagcatgcggttactgaaaggcgacgaacccgggcgcggatgcaaaaagagcacgatgcctgccggcgccgctcggcgcagacattgcgcactatcgacacgctcaatatcgcttcatttgagcgtgttgcctggaaaggggcggcaaaagagcgtcccggcacccttaagcgccagcatcgtgaacaaagcagcatcctcaacgatgcgatagagcaggcgcgtgagcgggtagaggaagacaacccggtgatgtttactctgcccggtagccaggtcgctgcgggaaagcaggtgctggagctggacgcgttgcggctgacccattcaccgatggcagcgctggactggcgtatagatgggccgatgcgcgtggcgctgcgcggccctaacggctgcggtaaaacaacgttgcttaaaacgctgttgggcctgcagccgccgctctcaggaagctgccgcttatcggtcaacgcggcgtatctggatcagcatctgagccagctggacctgtcattgtccatcatggcgcacctgaatctcggtgatacgcccttagaagaaggtgtgctgcgcagccaactggcgcagctacagctgggggcggacaaagtccatctaccgctatcggttctgagcggaggcgaaagattaaaagcggcgctggcctgcgtgctctggcgacgggaggctacgcagctgctgctgttggatgagcccactaaccatctggacctggcgtccactctggcgattgaaaaagcgctggcacagtttcccggcgcgatgctggtggtgtcgcatgatgaagcttttttacgggcgctgaagctgacccattgcctggcatggcgggaagagggctggagcgttgagaggctataa

SEQ ID NO: 178192 - DNA, 441 bp, Klebsiella oxytoca
atggaaacgaaagcgacgacatattcacccgcgtttcatctgatctcatggattgcgctggttggcggcatcctgacgtatctgattggcctgtggaacgcgcagatggagctcaatgaaaagggctactattttgccgtactggttctggggcttttttccgccgcctcttatcaaaagacggtgcgtgataaatacgaaaagatcccaaccactacgatgtattacttgtcctgcctgatcgcctttgcgattgctgtgggtctgctggcggtgggattgtggaacgcaacgctgatgctcagtgagaaaggcttttatggcctggcgttctttttaagccttttcggcgccgtggcggtgcagaagaatatacgtgatgtctgggatcgttcttctctaagcgaggtcggcgcagtcacggaagagcccgctgagtaa

SEQ ID NO: 178193 - DNA, 375 bp, Klebsiella oxytoca
atgaaaaacaatcttattccaaggctgttgatgtctattggcgcactggtttatctggtgggaatctggcgaacctgcccattatttagcggtaaaggctattttttgggcgttctggtcatggggatgtttgctgtgctcacgcatcagcgaacggcgcaggaagcacagcgagacggcgattttatctccctgtgccggctggtggtgctgctgtcggcgggattgctgctggtcggcgcctggtttgttccggctccgtggcgtgaaaaaagtatttacgtgatggcgtggtttgtctgtatgtacggtgcgtcggcaacgccttatcccgctaaagtcacggataaagctcgcaataactcagtggaataa

SEQ ID NO: 178194 - DNA, 1455 bp, Klebsiella oxytoca
atgtatatcgggattgatctgggcacctcgggcgtcaaggctattctgctcaacgagcagggcgaggtcgtggcttcgcataccgaaaagctcaacgtgtcgcgtccgcaccctttatggtctgaacaagatcctgagcactggtggctggcgacggaccgcgcgatgaaagcgctgggcgcgcagcactcgctgcgcgaagtcaaagcgttaggtattgcgggccagatgcacggcgcgacgctgctggataagcaacagcgcgtcctgcgcccggcaattttatggaatgatggccgctgcggtgaagagtgcgcgctgctggaagagaacgtcagccgttcgcggcagataaccggcaacctgatgatgccgggatttaccgcgccgaagctgctgtgggtacaacgtcacgagcctgagatcttcaaacaggtcgataaagtcctgctgccaaaagattatttacgtttgcgcatgaccggtgagtttgccagcgatatgtccgatgccgccggaacgatgtggatggacgtggcgcgccgcgactggagcgatgagatgctcgccgcctgcggtctgagccgcgataacatgccggcgctgttcgaaggatgtgaagtgacgggttcgctgcgcccggccgtcgcgcagtcgtggaatatgccggaagcgctggtggtggccggcggcggcgacaacgcggcgggggcggtgggtgttggcatggcggatgtgggccaggcgatgctgtcgctggggacctccggcgtctactttgccgtcagcgacggctttcttagcaagccggaaagcgccgtacacagtttctgccacgcgctgcccgggcgctggcatctgatgtcggtcatgctgagcgcggcttcctgcctcgattgggcggcgacattaaccggcctcggcacggttccggcgctgattgcggcggcggaagcggcgaatgacgatgccgatccggtctggttcctgccctacctctccggtgaacgtacgccgcacaataatccgcaggccaaaggcgtctttttcggcctgactcatcaacatggtccggcggaactggcgcgggcggtgctggagggcgtcggttatgcgctggcggacggtatggatgtggttcacgcctgcggcgtgaagccggagagcgtcacgcttatcggcggcggcgcgcgcagcgcctactggcggcaaatgctggcggatattagcggccagcagctggatttccgcaccggcggtgacgttggcccggcgcttggcgcggcgcggctggcccagctggcgttgcatcaaaatatcgccttttccgatctacttcctcagctcccgctggaacaggctcatcgtcctgatgccgagcgctttgctcgttacgcccctcgccgggaaaccttccgccagatttatcagcagcttttaccgctgatgtcctga

SEQ ID NO: 178195 - DNA, 1257 bp, Klebsiella oxytoca
atgacattttcactttttggcgacaaatttacccgtcattcgggcatcacccgcttgatggaagacctcaatgacggcctgcgtaccccgggcgccatcatgctgggcggcggcaatcccgcgcagattccggaaatgaatgattacttccatagcctgctggccgacatgctgaacagcggcaaagcccttgatgcgctttgtaattatgacggtccgcagggtaaaagcgagctgctggccctgctggcgcagatgctgcgtgatgaactgggttgggagatcgaaccacagaatattgcactgacaaacggcagtcagagcgcgtttttctacttgtttaacctcttcgcaggccgtcgcgcggatggaaccacccgtaaagtgctgtttccgttgacgcccgagtacatcggctacgccgatgccggcctcgaagaagatctgtttgtcgccacccgcccgaacattgaactactgccggaaggccagtttaaataccacgtggatttcgaacatttgcaggtcacggacgagacgggaatgatctgcgtttcccgccccaccaacccaacgggcaacgtgatcaccgacgatgagctgatcaagctggatgcgctggccaaccagcacggcatcccgttggtgattgataacgcctacggcgttccgttcccggggattattttcagcgacgccaggccgctgtggaatccgaatatcgtgctgtgcatgagcctctccaagctgggcctgccgggtagccgctgcgggattatcatcgctaacgaaaaaatcatcaccgccatcagtaatatgaacggcattatcagcctcgcccccggcggaatggggccggccatgatgtgcgagatgattaaacgcaacgatcttctgcgcctgtcggaaacggtgattaagccgttctactaccagcgcgttcaggagactatcgccattattcgccgctatttgccggaagatcgctgcctgatacataaaccggaaggcgcgatttttctctggctatggtttaaggatctgccgatttctaccgagctgctgtaccagcgcctgaaaaagcgcggcgtcctgatggtgccgggcgactatttcttccctggcctggataagccgtggccgcacacgcatcagtgcatgcgcatgaactatgtaccggacccggagaagattgaagcaggcgtgaagattctcgccgaagaagttgaacgcgcatggggtgaacagggcgcgtaa

SEQ ID NO: 178196 - DNA, 819 bp, Klebsiella oxytoca
atgggcacaaaagagagcgatgtaacgcaagacaaagagaggcctgccggaagccagagcctttttcgtgggttgatgctgattgagatcctgagtaattacccaaacggatgcccgctggcgcatctgtcggaactggcgggcctgaacaaaagcaccgttcatcgcttattgcaggggctgcaatcctgcggctacgtgacgccagccccggcggcggggagctatcgtctgacgacaaagtttatcgccgttggccaaaaggctttgtcgtcgctcaatatcatccacgtcgcggcgccgcatcttgaggcgctcaacctggccaccggcgagacggtgaacttctccagccgtgaagatgaccacgctatcctgatttataagctggagccgaccaccggcatgctgcgtacgcgcgcctatattggccagcatatgccgctgtactgctcggcaatgggcaagatttatatggcgtttggccatcctgactacgttgagagctactggaattcacaccaggatattattcagccgctgacccggaataccattaccggcttacctgcgatgcatgatgagctagcgcagatccgcgagcgtaatatggcgatggacagggaagagaacgagttgggcgtgtcctgcctggcggtcccggttttcgatattcatggacgcgtgccttatgccatttctatctccttatcaacatcgcgcctcaagcaggtaggggagaagaatttactcaagccgctgcgcgatacggcagaggcgatttcccgcgaactgggcttttccgtgcgggaagggtaa

SEQ ID NO: 178197 - DNA, 999 bp, Klebsiella oxytoca
atgaaagtaacgtttgagcagttaaaagaggcattcaatcgagtactgctggcgcggggtatcgccgcagaaaccgccgatgcctgcgcagaaatgtttgcccgcaccaccgaatccggcgtctattctcacggcgtgaaccgctttcctcgcttcatccagcagctggacaacggcgacatcatccccgaggctaaaccgcagcgggtgaccagcctaggcgctatcgaacagtgggatgcccagcgctccatcggcaacctgacggcgaaaaagatgatggaccgggccatcgaactggcttccgatcacggtatcggcctggtggcgttacgtaacgccaaccactggatgcgcggcggcagctatggctggcaggcggcggaaaaaggctacatcggcatctgctggaccaactctatcgccgttatgccgccgtggggcgctaaggagtgccgtatcggcaccaatccgctgatcgtcgccattccgtcgacgccgatcaccatggtggatatgtcgatgtcgatgttctcctacggcatgctggaagttaaccgccttgccggccgcgagctgcccgtggacggcggattcgacgatgaaggtcatttgaccaaagaaccgggggttatcgagaaaaaccgccgtattttgccgatgggctactggaaaggttccggcctgtcgatcgtgctggatatgattgccaccctgctttccaacggctcttccgttgccgaagtgactcaggaaaacagcgatgaatatggcgtttcgcagatcttcatcgccatagaagtggataagctgatcgatggcgcaacccgcgacgccaaactgcagcgaattatggatttcatcaccaccgccgaacgcgccgatgaaaatgtggcggtccgcctgcccggccatgaatttacccgactgctggatgaaaaccgccgcaacggtattaccgtcgatgacagcgtatgggccaaaattcaggcgctgtaa

SEQ ID NO: 178198 - DNA, 465 bp, Klebsiella oxytoca
atgatttttggccatattgctcaaccgaatccgtgtcgtctgcccgcggccattgaacaggcgcttgatttcctgcgcacgacggattttcacgcgctggaacccggcgtcgtggaaatcgacggcaagaacatcttcgcgcaggttattgacttaaccacccgcgatgccgctgacaatcgtccggaggttcaccgtcgctatctggatatccagtttctggcgtggggtgaagaaaaaatcggtatcgccattgataccggcaataatcaaatcagcgaatcgttgttagaacagcgcgatattattttctatcacgacagccaacatgaatcgttctttgaaatgacgccaggcaactatgcgatatttttcccgcaagatgtacatcgtcctggatgtaataaaactgtagccaccccgatccgcaaaatagtcgttaaggtcgctatctcagttttataa

SEQ ID NO: 178199 - DNA, 930 bp, Klebsiella oxytoca
atgaattcgaataataccggttacattatcggtgcgtacccctgtgcaccctcatttcaccaaaagagtgaagaggaagagacggaattctggcggcagctctccgacaccccggatattcgcgggctggagcaaccctgccttgaacatcttcatccgctcggcgacgaatggttattgcgccataccccgggacactggcagattgtcgttaccgccatcatggaaaccatgcgccgccgcggtgaaaacggcggctttgggctggcatccagcgacgaagagcagcgcaaagcctgcgtggagtactatcgtcacctgcagcagaagatcgctaaaatcaatggtaagaccgccggaaaggtcattgcccttgagcttcacgccgccccgctggcgggcaatgccaacgtggatcaggctaccgatgcctttgcccgttcattaaaagagattacccgctgggactggtcctgcgagctggtgctggagcactgcgacgcgatgaccggcaccgcgccgcgcaaaggatttttgccgttagaaaacgtgctggaagccattgccgactacgacatcagcatctgtatcaactgggcgcgctctgccattgaagggcggaataccgttctaccgctcacccatacgcagcaggcaaaacgggcagggaagctcggcgcgctgatgttttccggcacgacgcaaaccggcgagtacggcgaatggcaggatttacacgcgccgttcgcgcctttctgcccgcagagcctgatgaccaccgaccacgctcgtgaattatttgcctgcgcaggagccgatcccctgcaattctcaggtatcaaattactggaaatcactgccagcgcaaacgttgaccatcgcatcgcgatattacgcgacggcatctcagcgctaaaacaagcacaataa

SEQ ID NO: 178200 - DNA, 1320 bp, Klebsiella oxytoca
atgaatataacctctaactctacacccaaagatataccgcgccagcgctggttaagaattattcccccaatactgatcacctgtattatttcttatatggaccgggtcaatattgcctttgccatgcccggcggcatggacgccgacttaggtatttccgccaccatggcggggctggcgggcggtattttctttatcggttatctatttttacaggttcccggcgggaaaattgccgttcacggcagcggtaagaaatttatcggctggtcgctggtcgcctgggcggttatctccgtgctgacggggttaattaccaatcagtaccagctgctggccctgcgcttcttactaggcgtggcggaaggcggcatgctgccggtcgttctcaccatgatcagtaactggttccctgatgcggaacgcggtcgcgccaacgcgattgtcattatgttcgtgccgattgccgggattatcaccgccccgctctcaggctggattatcacggttctcgactggcgctggctgtttattatcgaaggtttgctctcgctggttgttttggttctgtggacctacaccatctatgaccggccgcaggaagcgcgctggatctctaaagcagagcagaactatctggtcgagacgctggccgcagagcaacgggccattgccggcaccgaggtgaaaaacgcctctctgagcgccgttctctccgacaaaaccatgtggcagcttatcgccctgaacttcttctaccagaccggcatttacggctacaccctgtggctgcccaccattctgaaagaattaacccacagcagcatggggcaggtcgggatgctcgccattctgccgtacgtcggcgccattgccgggatgttcctgttctcttctctttcagaccgaaccggtaaacgcaagctgttcgtctgcctgccgctgattggcttcgctctgtgcatgttcctgtcggtggcgctgaaaaatcaaatatggctctcctatgccgcgctggtcggctgcggattcttcctgcaatcggcggctggcgtgttctggaccatcccggcacgtctgttcagcgctgaaatggcgggcggcgcgcgcggggttatcaacgcgcttggcaacctcggcggattttgtggcccttatgcggtcggggttctgatcacgctgtacagcaaagacgccggcgtttattgcctggcgatctccctggcgctggccgcgctgatggcgctactgctgccggcgaaatgcgatgccggtgctgcgccggtaaagacgataaacccacataaacgcactgcgtaa

SEQ ID NO: 178201 - DNA, 1506 bp, Klebsiella oxytoca
atgagcaagaaacaggccttctggctgggtattgattgtggcggcacgtatctgaaagccggtttatatgatgccgaaggtcatgaacatggcattgtgcggcaagcgctacagacgatgtcgcccctgccgggttacgccgaacgcgacatgcatcagctctggcaacactgcgcggcaaccattgccggactattacaacgggcaggggtatccggtgaacagattaaaggcgtgggcatctccgctcagggtaagggtctctttctcctcgataagcaggatcggccgctgggtaacgccatcctctcgtccgatcgtcgggcgctgaatatcgttcagcgctggcagcgagaccgaattcccgaacggctctatcccgttacccgccagacgctatggaccgggcatccggcttctctgctgcgctgggtcaaagagaatgacccccagcgctacgcgcaaattggctgcgtgatgatggggcatgactatctgcgctggtgcttaaccggcgtgaaaggctgcgaggagagcaacatctccgagtccaacctctacaacatgtccacgggccagtacgacccgtgtctgacccaatggctggggatcggcgaagtggatagcgcgctgccccccgttgtagggtcagccgaaatatgcggggagatcaccgctcaggcagccgctttaaccggtctggcggcgggtactcccgtcgttggcggcctgtttgacgtggtctccaccgccctttgcgccgggattgaggatgagtcgaccctcaatgcggtgatggggacctgggccgtcaccagcggtatcgctcacggtctgcgcgaacatgaggctcacccttacgtctatggccgctacgtcaatgacggccagtatatcgttcacgaagccagcccgacctcatccggcaacctcgaatggtttaccgcccagtggggcgatctctcgtttgatgagatcaatcaggccgtagccagtttgccgaaagccgggagcgagctgttttttctgccgtttctctacggtagcaacgccgggctggagatgacctgcggcttttacggcatgcaggcgctgcatacccgcgcgcacctgctgcaggcggtttatgaaggcgtggtattcagccatatgacccatctcaaccgtatgcgcgaacgctttacaagcgttcaggccctgcgcgtcaccggcggcccggcgcactccgacgtctggatgcaaatgctggcggacgtcagcggcttacgcgttgaactgccgcaggtggaagagaccggctgctttggcgctgccctcgcggcgcgcgtcggcaccggcgtataccgcagctttagcgaagcccggcgcgcccggcagcacccggtacgcacgctgctgcccgatatgaccgcccacgcgcgctatcagcgcaaataccgccactaccaggatttgattgaagcactacagggctaccacgcccgtattaaggagcacgcattatga

SEQ ID NO: 178202 - DNA, 663 bp, Klebsiella oxytoca
atgagccgaccattactgcagctggcgctcgaccacaccagccttcaggctgcgcagcgcgatgtcgccctgctacaggatcacgttgatatcgtggaggcggggaccatcctctgtttgaccgaggggcttaacgcagttacagccctgcgcgcccagtgtccgcagaagatcatcgtcgccgactggaaagtcgccgacgccggtgaaaccctggcgcagcaggcctttggcgctggcgccaactggatgaccatcatctgcgccgcgccgctcgccacggtcgagaaaggccacgccgtggcccaggcctgcggcggtgaaattcagatggagctgttcggcaactggacgctggatgacgcccgcgcctggtaccgtaccggcgtccatcaggcaatttaccatcgcgggcgcgatgcccaggccagcgggcagcagtggggggaggcggatctggcgcgcatgaaagcgctctccgacattggccttgagctatcgatcaccggcgggattaccccggccgatctgccgctgttcaaggatatcaacgtcaaagcgtttattgccgggcgcgcgctggcaggcgctgcccatccggcacgggttgccgccgaattccacgcgcaaatcgacgctatctggggagaacagcatgcgtaa

SEQ ID NO: 178203 - DNA, 861 bp, Klebsiella oxytoca
atgcgtaaccacccgttaggtatttatgaaaaagcgctggcgaaggatctcagctggcctgaacggctggtgctggccaaaagctgcggttttgattttgtcgaaatgtcggtggacgagaccgacgaacgcctttcgcgcctggagtggacatcggcccagcgggcatcgctggtgagcgcgatgctggaaaccggcgtcgctattccctcaatgtgcctgtccgcccatcgccgtttcccctttggcagccgcgacgaggcggtacgcgagcgggcgcgggagattatgaccaaagccatccgcctggcgcgcgatctggggattcgtactattcagctggcgggttacgacgtctattacgaagagcacgatgaaggcacccggcagcgttttgccgaagggctggcctgggcggtagaacaggccgccgccgcgcaggtgatgctggcggtggagatcatggacaccgcctttatgaactccatcagcaaatggaaaaagtgggacgagaggctttcgtcaccgtggtttaccgtctatccggacgtcggcaacctcagcgcctgggggaacgacgtcaccgccgagctgaaactgggtatcgatcgtatcgccgccatccacctgaaggacacgctgcccgtgaccgacgatagcccgggccagttccgcgacgtgccgttcggtgaaggatgcgttgattttgtcggcatctttaagacgctgcatgagctgaactaccgcggttcgtttctgattgagatgtggacggagaaggccagcgaaccggtgctggagattatccaggcccggcgctggattgaatcacggatgcaggaaggaggtttcacatgttag

SEQ ID NO: 178204 - DNA, 699 bp, Klebsiella oxytoca
atgttagagcaactgaaagccgaggtgctggcggcaaacctggcgctcccggcgcaccggctggtcacctttacctggggcaacgtcagcgcggtggatgaaatgcgccgtctgatggtcattaagccctccggcgtcgaatatgaggtgatgaccgccgacgatatggtggtcgtagagatcgccagcggtaagatcgttgaaggcgctaaaaaaccctcttcggatacgccaacgcatctggccctttatcgtcgctatccgcagatcggcgggatcgtgcatacccactcccgccatgcgacgatctggtcgcaggccggtctcgatctccccgcctggggcaccacccacgccgactatttttatggcgccatcccctgcacccggccgatgaccgttgaggagattaacggggagtatgagtatcagaccggcgaagtgattatcaaaacctttgaacagcgcggtctggatccggcgcaaatcccggcggtattagtccattcgcacggcccgtttgcctggggtaaagatgcggccgacgccgtacataacgccgtggtacttgaagagtgcgcctatatgggcctgttctcgcgccagctggcgccacagctgccggatatgcagtctgaactgctcgataaacactacctgcgtaaacacggcgcgaatgcctattacgggcaaaactaa

SEQ ID NO: 178205 - DNA, 822 bp, Klebsiella oxytoca
atgtctatgcttgaattgtccatgtcacttccgattaaggtgcaaaatggtggattgtttatttcacgaggcatcggcagccatccggctcgtcagcttcactcctgggaaataatctttgtggaaaaaggaacattaacgatccgcgaaaacaacgagatttttagcgtcaacgccggggaaagtttattgctctggccgcggcgtttacacgtcggaatcgggcaatttccggcagatttaaaattctactggctgcattttgaagtgacctcaggtgaaaacgtttcgctgcctgaggcgctgctgtcgattccgcagcacacgcgcgtcagcgagccgcagtatattatttcgttgttccgccaattcttacgcgagcaggaaaatattcatcgtagcgtggcgctggagctgatcctgctgctgattctgcagcaagtttcggcggcagcgggcgaacagcccgccgacagccccggcaatgcgctggcgtggagagcgcagcaaatcattcgtacccggtttcatttgcccctttccgcatccacgctggcgcaggagctgcactgcaacgccgattatctggggcggatttatcgccatgttttccggctgaccttaaccgaagcgctgcaccgtcagcgggtgagggcggcggaaaagctgcttatcagcgattccctgtcgctcaccgaggtggcgatgaaatgcggatttaacgatgtcggctattttcgcaagattttccgtaagcataccagcctgacgcccgcggcgtggaagcgtcgttactgcaaggaacatattaattcggcgtag

SEQ ID NO: 178206 - DNA, 1401 bp, Klebsiella oxytoca
atgacttcggctccgattaccacaactgatttggcacagcgtgcccaggacgacaaattatcccttcgggaaaaaataggctacggattgggcgacgcgggcgggacggtgattacctgcctgatcatgaactttttaacttttttctataccgatgtcttcggcctgacgcccgcgctggtcgggaccctgtttctggccctgcgcgttttcgacgccgtttccgacccgattatgggcgtgctggccgaccgtacccagagccgctggggacgctttcgtccctggcagctgtggattgccgtgccgatcggcgttatcggcgtcctgacgtttaccgtgcccgacgccagcatgggggtaaaaatcgcctgggcgttcggcacctatctgctgctgtcggtgagctacaccgcgataaacgtcccctactgcgcgctgatcaacacgatgaccacgcgtcatagcgaggttatctcgtgccaggcatggcgctttgtcctgtgcggcgtggcgggattcttagtctccgttgggctgccgtggatggtaaaagcgctcggccagggcgataccgcacaggggtatcagtacggcgtcggcgtactctgcgccatcgcggtggcgatgttcctgtgctgcttcttctgggttcgcgaacgcgtctcgctggatgtcatggggaaatttaccctgcgcgagcacatcgccgggctgcgtaaaaacgaccagctgctgctgatgctggtgatgtcatttctgctcatcaacgtcttcaatatccgcggcggcggctacatgtacttcatcacctacgtgctgggcggctccaccggctacacctcgctattcttcaccatggtaaccttcgcctcgattgctggctccgtcatcatcaacctgctctcgcgccgctttgataccgtcaaactctactactacaccaacctggtgctggccgcgctggccgtggcgatgtggtttttgccaaccgggcaggcgtaccagaccctgtggctggtcgtcatcctcggcaacggcattattctcggctttaccctgccgctgcacttttcgctgatggccttctccgacgactacggcgaatggaaaaccggcgtgcgttcttccgggatgaacttcgcctttaacctgttctttatcaagctggcgtgggcctccagcgccggcattatcagcctcgtgtttatctacgtggcctatcagccgggcgtagaaaaccaaacgacatcatcactggcgggtatcgcctctatggagaccctgctgcccgccctgttccatctgctgctggccttttccattcgcgcctgcaagctcaacaatccgatgatggcgcgcatcgccagcgatctgcgtacgcgtcatgttcagccttaa

SEQ ID NO: 178207 - DNA, 1962 bp, Klebsiella oxytoca
atgtctgttatggaagtcgatctgcacaaactgaaaatcaacgacccgttcctcggccagtaccagcagctggtgcgcgatgtggtgatcccttatcagtgggatgcgcttaacgaccgtatcgaggaggcggacccgagccatgcgatagagaacttccgcatcgccgccggacaacaggagggtgaattctacggcatggtctttcaggacagcgacgtggcgaaatggctggaggcggtggcctggtcgctgtgtcagaagccggaccccgggctggaaaaaaccgccgatgaggtgattgaactggtcgcggccgcccagtgtgaagatggctatctgaatacatatttcacggtcaaagcgccagaggagcgctggaccaacctcgccgaatgccacgaactgtactgcgccgggcacatgattgaagcgggtgtcgccttcttccaggccaccggaaaacgtcgtctgctggatgtcgtctgccgcctcgccgaccacatcgatagcgtgtttggccccggagataaccagctgcacggctaccctggccatccggaaatcgagctggcgttaatgcgcctgtatgacgtcactcaggagccgcgctatatcgcgctggtgaagtacttcgttgaggcgcgcggaacgcagccgcatttttacgatatcgaatatgagaagcgcggtaaaacctcctactggaacacctacggtccggcgtggatggtgatggataaaccctacagccaggcgcatcagccgatttccgaacagccggtcgccatcggccacgcggtgcgtttcgtctatctgatgaccggcgttgcccacctcgcccgtttaagtcaggacgagggcaagcgccgggactgcctgcgcctgtggaaaaatatggcccggcgtcagctgtatatcaccggcggcatcggttcgcagagcagcggggaggccttcagcagcgactatgacctgccaaacgacacggtctatgccgaaagctgtgcttccattggcctgatgatgtttgcccgccggatgctggagatggaagccgacagccaatatgccgacatgatggagcgcgcgctgtataacaccgtgctgggtggaatggcgctcgacggcaagcacttcttctacgtcaatccgctggaagtgcatccaaactccttaaaattcaaccatatttacgatcacgttaagcccgtccgtcagcgctggttcggctgcgcctgctgcccgccgaatatcgcacgggtgctcacctcgctggggcactatatctacacgccgcacggcgacgtcctgtacatcaacctgtatgtcggcaacagcgtggagatcccggtgggcaatgaggcgctacgcctgcgtatcagcggcaactatccgtggcaggaacaggtgaagatagtcatcgattcatcttcaccggttaatcataccctggcgctgcgtctgccggactggtgcgataagccgcaggtcacgctcaacggcgcgccggttacgcaggacgtgcgcaaagggtatctgcacatcagccatctctggcaggagggcgacacgctacagttaaccctgccgatgccggtgcgccgcatttacggtaacccgctggtgcgccaccaggcaggccaggtcgccgtccagcgcggtccgctggtttactgcctggagcaggcggataacggcgagcaattgcataacctgcagctgccgcgcgacgcccggtttagcactgtcgaaggcaaagggatttttgcccgcaagatacttctccaggcgccgggctataagcaaacggcggaagatgccgaaaaccaggccctatggcactatgaccgcgcgccgtcctcccgtcagccgcaagtattaacctttattccgtggtttagctgggccaaccgcggcgaaggcgagatgcgcatctgggtgaacgaagcggaagcgtaa

SEQ ID NO: 178208 - DNA, 1137 bp, Klebsiella oxytoca
atggatctgctgattattttgacctatgtggcgattgcctggtcgatatttaaaatatttaagatcccggtaaataaatggacggttcccaccgcggcgctgggcggcgtatttattgttagcgcgcttatcttattaatgaactacaaccatccgtatacctttaccgcgcaaaaagcggttatttctattcctattacgccgcaggttaccggggtggtcagcagcgtcacggataaagcaaatcaacgggttaaaaagggcgaggtgctgtttaccatcgatccggtgcgttatcaggcgcgggtggaccggctacaggccgaccttgttaccgcgctgcacagtatcaatacccttaaagcccagctttctgaggctcaggccaacaccacgcgcgtttcggcggagcgcgaccgtctgtataaggattatcagcgctacctgaaaggaagccaggcgcgggtcaatccgttttcggaaagcgatatcgataatgcccggcaaaactacctcgcccaggatgcgatggtgaaaggatcggtggcggagcaggcgcaaattcagagccagttggacagcatgataaacggcgaacagtcgcaggtggtaagcctgcgcgcgcagctggcggaggcgaaatataacctcgatcagacgaccgtgcgcgcgcccagcgatggctatatcacccaggtgttaattcgtcctgggacctatgccgcctcgctgccgctgcgtccggtgatggtctttatcccccagcaaaaacggctgattgtggcgcagttccgccaaaattcgctgctcaggctggagaagggcgacgatgctgaagcggtgttcaacgcgctgccgggacaggtctttcgcggcaagctggtgagcatcctgccagtcgtaccggggggaacataccaggcgcagggcacgctgcaggcgctgacggtgacgccgggcaccgacggcgtgctggcgaccattgagctggagcccgatgccgccgtagacgccctgcctgacggcatttacgcccaggtggcggtctactccgatcatttcacccacgtttcggtgatgcgcaaggtgcttctgcggatgaccagctggatgcactatctctatctggaccattag

SEQ ID NO: 178209 - DNA, 372 bp, Klebsiella oxytoca
atgtttctcaattattttgcgctcggcgttctgatctttgtatttctggtgattttttatggaatcatcattctccatgatattccttacctgatcgcgaagaaacgtaatcacccgcatgccgatgcgattcacgtcgcgggctgggtgagcctttttacgctgcacgtcatttggccgtttttatggatttgggccacgctttaccggccagaacgcggctggggtatgcagcatcggcgggacgagacgccgtctgaggcggcggaagagggggacgacatcagcgaactgcgccagcgggttatcgcgctcgagcagcaaataaccggtctcagaccgtcagctcaacctccttcggtggagaaataa

SEQ ID NO: 178210 - DNA, 366 bp, Klebsiella oxytoca
atggccgacggcagttcatgggtggtcgagaattcgtgggtattgccggaggggttcccgaaagacaacgacgggcgcatcaatatcctctgcgggacgacgtatatccgcaacacctcgcagcaccgggggctggaaatcaccaccccggataagacgcttacgcccaacagttactttatcaactaccgcaacggtgtcgccagcggcttcggtatcgatccgatcaacgactttgttcgcgcggtcaggaaccgttcgccgtacccggtgacggcagaggatgggctggcggtcagccggatttgtgaggcggtgcatcgcagcttggtgagtgggaagcctgaacgcacgataatgccataa

SEQ ID NO: 178211 - DNA, 435 bp, Klebsiella oxytoca
atggacacattagttaagttagctactatagcttctccgttggtaagcgctggagtggctatttgggcgattttagttgccaaagcaaccatcagtgagagcaaagaaattgccaaaaaaactattgcagacacggcttatcaagcatatttacaattagctatggaaaacccgcatttctctaagggttacaccgcagatagtagacatgagcgagatcctatgtatgaccaatatgtttggtacgtggccagaatgatattctgcttcgagaaaatagttgaggttgaagataattttaaagatgaatcttgggagaaaacgttgaaaaaacatttggattttcattctgatcattttaaaaaaactaaagttgttgaagagagactttatattccatcaattttgaatctcataaaatgtgcagctaaataa

SEQ ID NO: 178212 - DNA, 3702 bp, Klebsiella oxytoca
atgaaactacttgataaaaagtattataacctagaacctagttctgagtaccttaaggactcatttattttaggattggcatggaaaaaaacagacagttttgtcagaactcacaattggtatgcagatctattagcgcttgacaaatgtgcatttgatattagtgatgaagtcactaaatggtcaaatgaagtcaaaaatgccactttttctaaaagtgatattgaattaatactcgctcccaaaggtgctaactggttttttaaaaaagggaagtggattacaaataaagaggatagaaaattaagaccattagctaatatatctatcaaggagcagtcttttgctacagccgtaatgatgtgtattgctgattcgctagaaacgaggcagaaagattgttcactaagtaaccttggctatgctgagcatgtgaaaaataaagttgttagttacggaaataggcttatttgtgattggaataatgataaggccagatttcgttggggtggaagcgaatattacaggaagttctctacagattatcgaaatttcctacaaagacctatctatgtaggaagggaaactgtaaataaagtcagtgggattgatgatgtttatattgttagtttggatttgaaaaacttttttagttctataaaaatagatcttctgataaaaaaacttaaagaaatatcttctaaacattacgattgcagcattccagataataatgatttctggagtttggcaactcaaattttgaattggacatggcctaaagacactttgtctttacttggcagtttggatttaaaaaaaatcgttgggcttcctcaaggcttagcatcggctggagctctggcgaacgcatatctcattgattttgatgagtctataatttctaaatttcgtgatggtagccatattatactgcatgattactgtcgatatgtagatgatattaggttggtgatttctggggaggcgctaaataataaagaaatcaaggaatttgttcatgggttagttcaaggtgttctcgatgaaacattgaaacaagataagttagatggagagccttatttagaggtcaatgataaaaaaacgtcaattttaatactttcagatattgataacggaagcggccttacaaatagaattaatgaaattcagcatgaaataggaacttcgagtattcctgagcgtaacgggctagataataatataccagcacttcaacagttattactgactgagcaagataatttcttcgatgatgctaatgattcattcccaggttttaacaatgataaatcgattaaagtagaatctttgcgtagattttcggcccatagactggaaacaagcttaactaaaaaaagcaaactgatctcacctgaagagagaaagcaatttgataatgaatctgagttgattgcaaagaaattatttaaggcatggcttaaagatccatcgattatggttatctttcgtaaggcaatagccataaaccctaatctggatgcttataaaaccattcttgatgatatttttaaaagaataaaatcgaatcgtgacaagtgtgataaatatatcatgatatatcttctttctgatatatttcgtagcgtcgttgatctctaccgaaatatacagccagagtgcatatctaattatcaaaagttgatgggtgaagttacatcatttgctcaaaaactactttcttgtaaatctgacattccaagttatgcatatcagcaagcactactctatcttgctgtaatcaacaagccgtttatagctagtaataaagcatctcctgatcttactagactccaaaacgttttgattaaaaaacacttagaaccattgaatattagtgatggttacctatttgaattatctgctcagatcagcaaagattaccaagcaaatgctgtttttctactttcacatacaaaaaataaagaagcagtagattcaattataaacaattttgctttccgtggtggtgagttttggaacgcaatttggaaagaaatagttaggatgaaagatagtgatatagataaaaataggattaacgaatttagatgggctatacctaaaaatgagtcaaaaccaaatggttcggagcataatctttcatcagtaatcagcttcaaggaaaacccgtttaaatatgaacatgctcttcttaaactgggtatagcattagttgatcttctagatgataaggagaaaaaagcatggaaatctaatggtaagcagtattctccacatgaaataaaagtaaatttatcagatgtatcaacatcatggacagaactatggcgtcctggcgttaatatttcatgttcgatagataaaataggaaaaatacctacagacccgcgctatgcaagccctgagtggttagtagcttctcatcccccccaacaacatgatgcacaaaaattatattgggtgtgtagtgtgctaagaagtgctgctttgggtaatgtggattacacccagcgaaatgatttaaagtttaatagcgaaaagtatgatggtatacgttctcagttttacaagcgacgtatgggaatgttacatacaccagaatcaattgttgggtcatatggaactataactgattggtttgcaagctttcttcagcatggattgcaatggccaggtttttcttcttcgtacataaatcaagacgatatattgtcaattacctgccttgatgagtttagaaaatgtatggtagaaaggctaatttatttagaaaagcaaatatgcgcttcatccaatgttccaacattacctactgttgtcagtagacctgagttagcatctaaccaatttagaattgttactgtgcagcagttatttcctaaggataaacattttcacccttctgacgtaacactggataattccgatgtgcgttggaagcatagagaacatctcgcggaaatttgtaagctaacggagcagactttaaatactaaacttaagacggaatctagagatcataccagtactgctgatcttattgttttttctgaattagctgttcatccagaagacgaagacatagtaaaagctctggcatttaaaactaaagccatcatattttgcggatttgtcttctgtgaacaagatggcaaaattgttaataaagctcgctggatcattccagactcttccgagtcaggaactcagtggcgtattcgtgaccagggtaaatatcatatgacagtagatgaagttactcttggtgttcagggatatagaccatcccaacatattatttctattgaggggcatccagaaggaccatttaaaataactggcgcgatttgctacgatgcaacagatataaagcttgcggcagacctgagagatttaactgatatgtttgtcattgtggcttacaataaagatattgacacattcgataatatggcttcagcgcttcagtggcatatgtatcaacatgttgttattacaaatacgggagagtatggtggttcaagtatgcaagccccatacaaagaaaagcatcataaactgatctctcatgctcatgggactggccaaatagcaattagcactgctgatatagatttagcagcttttaggcgtaagctaagtttatacagaaagacaaagtcccagcctgctggattcaatcgaaaacattaa

SEQ ID NO: 178213 - DNA, 801 bp, Klebsiella oxytoca
atgctgagtacgttacccgatttacacagaagttttgcagagcaactcaaacttaaatttcagtcagattcgcgaattcattcccttcttgctggcggctcaatgattcatggcggatttgataaatactccgatctggattttgtcgttgtcgtagatcctctctactatgacgaaattatgacgcagcgtagggagttcgccggaacattaggccatctgctgcatgctttcaccggggaacatgtgggagagcctcgcctgcttatatgcctgtatggccctgaactcctccatgtcgatctgaaatttgtcaccctggacatgctcattcaacgcgttgaggagccagcggtgttatttacccgtgataacactgctctgaagcgacaactggcaaaatttagtgctcactggcccaacatgacgccggagtggtttgagtcccgagcctggatctggcttcattacgcagtggttaaactgggaaggggcgaactctttgaggcgattggtatgctggcattcttccgggagcaggtgctgggaccaatgctgtaccgtcgcgcaaatctaccgcaacgtggggttcgccgcattgaattctacggcattgatcctgatggtctgctgacttccacgttggcaacgcacgatcgtgactccgttggtgttgccatcagaatggctgttgacgcttatatcaatctgcgggctgatgctctgcctgagaatatcgcagatggtgcagttcgttgggctgttcttgcgatgcttaaagcgtattctgacagggtttaa

SEQ ID NO: 178214 - DNA, 636 bp, Klebsiella oxytoca
atgaaattacagcttgccctggacgagttaaccctgcctgaagcgctggtatttattgataaggtggttgacgacgttgatattattgaagtaggaaccccctttcttattcgggaaggcgtgaacgcgattaaagccattaaagagaaatacccgcataaggaagtgctggcggatgcgaaaattatggatgggggccattttgagtcgcagctgcttttcgacgccggggcagactatgtcacggtgttaggcgtgactgatgtgctgacgatccagtcgtgcatccgcgcggcgaaagaggtcggaaagcaggtggtggtggatatgatctgcgtcgacgatctccccgcacgggtccgactgctggaggaggcgggggcagatatgctggcggtacacaccggcactgaccagcaggcggcagggcgcaagccgattgatgatttgataacgatgctgaaggcgcgccggaaagcacggattgccgtggcaggcggcatcagcagtcagacggtgaaggactatgcgctcttaggtccggatgtggtgattgtgggggcggcgattacgcattcggtggatccggcgggggaggcgaggaagatttcacaggtgttgttgcagcatcactga

SEQ ID NO: 178215 - DNA, 189 bp, Klebsiella oxytoca
gtggtcaggatcccggcctataccgacaaactgccggatggaccggataacgtgaaaggcattctgcccggaggcagcctgtttgaagaggcggtcatggtgctgggggatgccatgatagtgaatctggcgcagtcgactggatatcgcttaaccaaaggttttgcgctgcacgccaacctcgaatag

SEQ ID NO: 178216 - DNA, 378 bp, Klebsiella oxytoca
atgatggaaacgcaatttgttgcaggcgttgcctgtactgacctgcatcaggcgatggcgcggattgatggtgccgcactggcgagtctggagcaggccatcgctgaggcgaacgcggtatttgtttttggcgcagggcgttcgctgttaatgctgaaagcttttgcgatgcgcctgatgcatatcggcctgaaggtgcatgttgtcggcgatgtggtcacgcctgcgctgcaaaaaggcgacctgctgctgctggccagcgcatcgggcgaaacggcttcgctggtgaatgtggctacgaaagcaaagcaactggggggcacagtggccctgctgaccattttccccgagtccacgctgggaaactggctgacgtag

SEQ ID NO: 178217 - DNA, 843 bp, Klebsiella oxytoca
atgaaacagctacaccacagcggcctgccgctgtatctcgatgatgatggcgtaatggcgctgaaaccgccgctgaactatctcggttttggccgcaaaagcgccgggcagatggcggtggttttaccggagttcactgaagcgctgcgtgatgaaccggcttacgatgtttatcgcgggctcagctttgcggaggatcaggaacggcttgctgccgatgagtatcagtacgacatcaccatcatcatgccgggaacgatcggcaaggagcgcaagaaaaccagcggccattatcacggctataacgacacgcggcgcaacacccatccggaagtgtatgaagtgattaagggcacggcggcgtatatcctgcaaaagtcgccggattttgccgtcgcgccgcaggagctggtggtggacgatcttatcgtggcggtcgtgaaggaggggcagagcattatcgtgccgccgaattacggccactgctctatcaatatcggcgacgggccgctggtattcagcaacctggcctataaaccctgcgcggttcactacgacacggtgcagttttaccacggtatggcctgctacatcgtggaggagaacgggcagctctgcgtgcgcaagaatcattactacccgcatattccgcacatcaaattcgccaccgtcaaagagaacccgcatcttggcatcaccttcgatacgccactttaccagcgctatcgcgccgcgccggaacgtttccattttctggggcatgtcgataactatgtccgggaaatcatggggatgctcgagtatcaggatgatttattcccgctcagtcaggaggacgcatga

SEQ ID NO: 178218 - DNA, 1527 bp, Klebsiella oxytoca
atgaaaagattcaaccttctgcaaatgttacaaagcatcgggcgatcgttaatgatccccattgccatgctacctgccgccggtattttgctggccttcggcgtcagctttcaggatcccaatattgtcgccagcctgccgtttctcggcgctgactggctggttcacgtgcttaagctgatggcggaagcgggcagtgcgattttcgctaacctgccgctgctgtttgcggtcggcgtggcggtgggacttagtgatgatcagggcattgccgggctgtcggcgatcgccgggtttttgattatgaacgtcactatcggccagtttctggggatcacgcccgagtcggtggcgcaggtgcgtgactacacgatggtgctgggcatcccttcgctccagaccggcgtgtttggcggcatcattatcgggattatcgccgcctggctgtataaacgctattaccgcatccagcttccttcatggctggagttcttctccggcaagcgatttgtgccgatagtgacctccttcgccgcgctgtttgtcgggctggtgatggcggtggtctggccgccggttcagcatctgattaatggcctgtcgaataccatgacggtgcaggggccgggcgtgtccgccttcctgttcggttttgtcgagcggctgctgatcccgtttggtcttaaccatgtctggtggccgacgttctggctgcagtttggcgagtacgtgaacaaagccggccaggtggtgcatggcgaccagcttatcttctttgcccagttgaaagaccaggtgccgattaccgccggaacctttatggccgggctgacgcctatcaaaatgttctgtattccggcgattgcgctggcgatctaccgctgcgccagcccggaaaacaaagcgcgcgtgaagggtattatgctctctggcgctatcacctccatcgtctgcggcatcaccgagccgattgagttctccttcctgtttgttgcgcccgtgctgtatggcattcacgccgtcctggcggggctggtgttcctgctgatggagtggttcagcgtgcacatcgggctctctttctccggcgggcttatcgactatctcttctttggcgtcctgccgcgcgcgcctcactggtacatggtgttcccagtcgggctggtgatgggggcgctgtactacgccctgtttacctttgctattcgtcgctggaatttgctgacgccggggcgtgaagtcgaagaaagcactgtggcgcaggaaaacgaacagaatgacctagtgagcggcatcattctggcctatggcgggctggggaatatgaccagcatcgaagcgtgcatgtcacgtctgcgcattgacgtgacggataagacgctggtggacaaagcgctgctgaaacagcttggcgcggcgggcgtcgtcgaggtcgggaacaacattcaaagcgtctttggcatgaaatccgatcggctgaaagaggcgatccgcgcagctaacgcgtatacacaggaggcaaaatga

SEQ ID NO: 178219 - DNA, 1680 bp, Klebsiella oxytoca
atgagtatcttcgaggcgcattttcgcaggctgcacgcccgctacggcgcaggtcagacgcacgaattacagatgcaggagatcgccgccatcttcggctgctcggtgcgtaactgccgtattgcgctgaagaagatgcatcaggaaaaatggctcgactggcagccgcagcgcgggcgcggcaagcgctcacgtctccacctgttaacctcgccggaaaagctgttcagccagaacgtcactaagctgctggagaaacaggattacggcaacgtgctgcggtttatcggcaacgacaagtatctgctggatcgcctgagcctgtggcgctttggggtacaggataaaagcagcgaaacgcgggtgcgcatcccctactatcgcaatctggatccgcttaacccgctcgtccccctgcggcggaccgaacgccacctcctgcgccagtgtctgagcgggctgacgcgctatgacgccgttcagggcaggatcgtccccgatattgcccactactggacccacaacgaggactttacccgctgggagttctggctgaaatctaccgctcgctttgccgatggcagcgaactggatgcctgcgccgttctgcgctgcctgcttgccgccagccagagcccgcaattcgccccgcttttcagcccaatcaaaaccatcaccgctgacgccccctggcatctggcgattgaaacgcatcacccggtcagacggctcgactgcctgctcgccactcagccgacgatgctgttcgattaccagcggggactcatccgctgtaccggtgctttccacctacaggagcacagcgacaactttatggttttgcggcgcaatcaacactggcatcaggcgcgccccggactggatgagatcaccattttcacctgggcgccagaacatatcagcatgagctttattcccctgctgcggggcgaggaggcgcaggatgaccgcccgcttaacgagcgtagtctggaacagggatgctgttttgttctgctcgactgtgaaggagcctttgcggatgaggccggaaggcggtttatcaattacctgctgcaacctgtcgaactcctcagccagacgcagcttcccgacgaatatgcgcgcatcctctccgttgctcagggcatgctgccgcagtggaaccaccgcccggtggatttcggcggggtcaccgcgccgtttaacctgcgtcagccggtgatcatcagcacctttcagcagccggaactggtggagcttgccggggcgattcgcatcctgcttgagcgctggcatattcgcgccgagatacggatcgacgcatttgacaactttaacagccagccacgccctcctgcggatatctggctcagcaactttatgctcgataccctttcggttccggcgtttctggaatggctggcgtccaccgcgctgtttacgcgcttgcctgaagcccagcgacgaaacctgaacgcgctgctgccgacgattcttaacagcaacgatgaacaggcattcgcaaccattgccgcctttttccatgagattacccaccagcgatatgtcattcctttgctgcatcactggatggaatttgcgaccgagaagtcatttacctggcgggatttaaatacgctgggatggccggattttagccaactttggctcgaataa

SEQ ID NO: 178220 - DNA, 2157 bp, Klebsiella oxytoca
atgctcgaagttgaatttcaggaatggttgaagagcagaggcgccaaaacgcaagcaggcctcaattcccgtatttatgctgtcaaaactatagaaaaaaatctcgcagcacttggttctcctcatgcagatctggatgcagcctaccaggcggatggatttgcgcaattgcggcagcggatcaaagagattcgccgtgatgccaaagacaacggcaatgactatcggttactaatgcctgaatcagagcaaccgcttaaccgattgtccaactggaatagctggctcggacaatatggacgttttctgagcggtgatgactctcaggccgacgaaattcgggattatgtccttgaaaactacatcaccccagccagagagcgaggtgacgcaagtgtcaccctggtagttggtcctctgaatactgaaatgggtctcgacaagggatggccgaacatctgtcaggctcttgatggtcaaaaatttcaggaactagcggatgttccccctccggtgacggaagggcctaaaaagagcacaacccggaaatatacgttcatccttacggaaggaagcgaactggtggcccagactaaaccaactccgactaaccttattttttacggtcctccaggtaccggaaagacctatcacacggcgagggaagccgtagcgctctgcgatggcaaagatgcctatccgaactcaaaagatgggcgtgcggccctgatggcgcgctataacgaactgatggcagaaaagaggatctctttcgtcacattccaccagagctatgactacgaaaccttcgttgagggccttcgtccagaaattggtgaagatgagtcttcgtctgctggattcagactcatgcctacgccggggctcttcagagaaatttgtgcccttgccgatcaggccagaacacaaccccgtgcacagacagatgcctcggcactgcaactatcccaaaaacgcttctggaaaatggggcaagggacaattggcaccgaagacgatgtgtatgaagatgcccgcgacaatgggtatatcgctctgggttggggtgggaccatagactggagcgcggatagattctcatcgttcaacgcgattcatgatgaatggatcaagcaaaatccagggaatctgacgcctagtaactggacgcaaacctatcccttccgttgcgaaatgaagcctggtgatatcgtgattgtcccttacgggaacactgcgtttcgcgctatcgctgaaataactggtgattactatttcgttcctgaagccgaaggttactatgcccaccgccgcccagttcgctggctactgacccttgatgaaccactgccactcgatacaattatcgatggtaacttcaccatgcggacgctctattccattgccaccagtcgtgtgaatatcccggcgctaggcagactgctctcaagtacagagaacatagataatagttccgatgttaaaggacaaccagaacaattcgtcctcattattgatgagatcaaccgggcaaatatctcgaaagtgttcggtgaactgattacgttaattgagccggataaacgtcttggaatgcctgatgcactcaccgtaactctgccttattcgaaaaagaaagattttggcatccccgccaaccttcatatcataggcaccatgaataccgccgatcgatccatcgcattgctcgacacagcattaaggcggcgattcaacttccgggaaatggctcccgacgcgaccttgctaagtgaagtagaggggatcgatctcaaagccgttcttaccaccatcaaccagcgtattgaatatcttataggccgggaatatcgcattggacacgccttctttatcaattgtgaatccagggcacaagttgaagatgcagtgcgcaataaggtcataccgctgttacaagagtatttcttcgaggactggagccgaatcgcgacagtgctgggcgatggttttatgcaggaagagcagattttaccgccacccggaatagagggggaaccattatcaagctggtcggtacgtgcaccgttcagaaatgacgcctttgatcgactgataggcaaaaccagaacgttaaatgtcaccgatcttgaggtggctggtgaatcgaaagaatga

SEQ ID NO: 178221 - DNA, 1308 bp, Klebsiella oxytoca
atgacgcacctcacggttcgcgaatggggtggtgtttgtgtgaacactgaaagcagcataaacgctcctcatgcttttacccgccctcaggctaacgcgctgcttacggcggcgcgcgagcatccgctggcaaatcagcacggtactaatatcttaatcgatcgccataacaaaattattgccgggcaaatagttggggtcattgccgctccgggatgtagccttgagatcctgcccaaattcgacgacgagacgatagaaccggacgccacaatacgcaatcgcctgatacgtatgcttgatgtcgccctcggccttaaactcggcaatggacaggctgcaacaatggcgagacaagctgaaagcttgctagagatactcatccgcttgttcgccgagcgactcttatctgaagtacatcggggattaccgcgcacctatttggcacaggaagacgatttgccctcattgcgcggaaggctcaatatcaaacgacaattcactacgcttgccgtccgccccgaccgtctcgcctgtcgttacgacgaactgtcggctgataccgccctacttcgaattatgaaggcgtgtgtagttctgcttcaccattatgcccgcgctgctgatacgctccgtcgtctgaatgaattgcgcatcctgttagcgggtgttagcgacgtccctttcagtcatctgccgtggtcacaggtacggatcgaccgaaccaatcatcgctgggaagccctctacaatctggcacgtcttctcctgcgacgcgactggcaagctacacaccacgataaacgagcgcagaacgggattacactgcttttcccaatgaacgacctgttcgaggcatatatagcggcgctggcgaagcgtgctgtacgcggtacggaatggacggttcgtgcacaggcaggcaggttatactgtctgatcgaggacgtaaaagaaggcaaaccacgcttccagacccgaccggatctgcttatcgagcgggaccatcagattgttatgatcatagacactaaatggaagcgtattggtcgtcatcccgaagatgccaggcatggcatatcgcaggctgatgtctaccagatgatggcctatgcacggatttatcactgcccacaagttatgcttctctatccacatcatgcaggtctgggaacgcaacctctgaatgcaggctataggattctagcaggcaaggaacaattacaggtggctagtgtggatctggttctcgatgaggacaagattgtcgagcagttaattaaccttctcggcatcaacacgcagtga

SEQ ID NO: 178222 - DNA, 1173 bp, Klebsiella oxytoca
atgggtaagaatagtcaaagtagacgcgtgaataagaaaaagcagaaaaacgaaaaaacaagagagttagctgcaaagaaaaacaaaatgatgtacatgaaacctgatatattctttgatgagtcgggtaataccggcggaaatttacttgattcaacacaaccttttttcaccttaagttcaagtagcattaataaaccagatgcacttaaagcattagagctaactggaagcaagtcaccaacagaagctcactttaaaactcttagacgtagaaaatcaggccaagatggaattattagactgcttgaaagcaagtacgtcaatgaagaaaatgtcaaaatctttttggtcgataaaaagtatatgttaacaacaaaaattgttgatattttaatcgaaacatggtgtttcaatcgagggttagatctttatagaaatgggcaaaatcttgctctatctaatgtttattatttctgtttcccagctttctgtggagaggagaaaacagataaaatgtatcaaaaatttatgagcatggttagaaatcaaacccctgaatctattgatgaattttacacgtcagttgatgagctaaaggcatgttcaagcgaccaaaggtttgtagacacaatcaatagaattagcattaccaaaaatgaaattgatgacattctagaagatgttgaaaaaaatacactagatccttccataccctctctcttcaaacactgtatagaatggggtaaattatatcccaacggtttttatattaagcatgacgattccaaagcgattacagaacaacaagatatctttaataaatttatggatatgtcaaaaattacggaggtatatggatatgatagaaggacttttgagttaccaattaaagctcgctctttgacatttcattcatcgcaagaatatcctcaactacaaatcgcagatatagtagcaagtgcggcagcttattatgttaattgtttaaaacgtaatgaattagatgattatctctttaaagagctcaaaagaattaaaatagataactattttaaagatatggttatatggcctacaacatatgttacgcctcaagaactaggaacagtctataccggtggactaaatccggcgaatggagttgcagagtatctttctcaatatcaatag

SEQ ID NO: 178223 - DNA, 744 bp, Klebsiella oxytoca
gtgaaagatttttcaaaatactcgaaagcgttagggatggctaagttctatgtttatgcattttatgacactgaagatgtatcaaaaaaaccgttttatataggcaaaggcaagtcagaacgctgtcttgatcatataaagtgtaatgatggctctccgaaatcagaacgaattaatcatctgttaaaaacaggaaatctgggaatcgacatactacgccatggcatggatgaggcaaccgcgaagcttgttgaagcaacatgtattgatctcttaggtgttggagaactgaccaacaaagtacgaggaagcagctcacttatggggcgaatcacgctggatgagctcaaccatctccttcttaagcaagagacggaaattgcacctgaacatgcagggctcgcttttttgctaaacagcacctacaagtctggcatgagtgcacttgcattatatgaagctacgcgtggcgtctgggcaaaggtaccaaaagatgaaaacctgcaatttgcatacgcaacctacggcggtttggtgatggaagtctacgagatacagtgctggctaaaggcaggctctcaacagtactttactcgggaactgattatcccccccgaaaccaaccgttcagagtttgttgggcgaattgcatcaccagaagtcagagaattatacgtaggcaagctaatcaaaaaatcgcgcagtcacggtagccctttcgtaaaagttgggctggcacaataa

SEQ ID NO: 178224 - DNA, 1344 bp, Klebsiella oxytoca
atggaattaattgctgaactagacttagttatatctctatggtcacaggatggaatcaccaaatccatagaaaattcaacgccagatactttattcaagtttattgaaactctgtatttaagcacaagaaaccattctccctaccaagataaaaacaacgaaaacttttcatttattgctaacacatctttaagtggaggagcgactaactgtgcaagtttagattgtcgcctcaataagctagatgagttagtctcattcgcagctttatatgctgatgtaatatacattaacaatccttttgagcctctttatttttcatgggaggacttgcatattaaccatataaagacagagcttttaacagcgatctatcaatacttttatttgaagccgtacctttcactagggattatacaatactcaagtgggtatatgaccctatgttctcatcatcacgaaacattagctaaaccattagcagagaaaattcttaaaaaagaacaagaattaacctccatctttaatgaacatttactatcaaactgcaccgtatctctcgataagtttgataacggagagatctttattgaaatacttgataaaggaaacattatcgatcacgggagcacacatctgcatttttatcaaaaaccaaaatccaaacacctcagaaaattggcagaaaaaaatatcaaacacacattttcccgcgaagaaatagaacaggaaaacattcttcaatcagttgtttatcctttggttaacgatataattgagcaagagtggatttcgcatttctacaactcatctctattaattgataacaaagaaaaaattaaaataactggtaaactgaacgctgagacgatgtctataaatgctaacaccttcaatcaatcagtaagtcattacttacctaccattcattgtcgagacccattggaaatattaaagctgagagaaagagaagatgaatcatttaaagtttacagagataaattaaataagttattaatagaagcacccaaacaaaaacaagaatatttccctgagatctttagagatacagttttaccagagatcaatctaattaataaaaagctaaaagactaccaaataaaaaagagaaacaatcttcgtgataaattaatttttggttctggagctgtagcctttgggctttactctggagtgttgccttcaaatataggtagcatattagcagcgattggcggaggaagtgccatcgttagttcaatgattgattataaatcagcatttctcagtaaggacgagatacggtcaagtgattattattttttgtggcaactaacaaagtag

SEQ ID NO: 178225 - DNA, 336 bp, Klebsiella oxytoca
atgaaactaaattttagtatctcagacaaaattagtgaactgaatgcagcatatgacatttatgatgagctttcagacctggattttaacaaaacaatttcagaagaagtcaacaagcttgatgaagatcttcttcaaattactttcataaatggaaacactctcgatataggttggtatcctgcattcgaggaggaaggagagttcattatccagattatctcaaatgagaactgggaagagccaatatttaaatcctcggcacactggaatataaatgaactaaatgaaaaattcgaggaggctttaaacatatgtttagccactgtaaattaa

SEQ ID NO: 178226 - DNA, 126 bp, Klebsiella oxytoca
atgaatctgattgcttgtaattgtatggaggtttttcttaatacactccagcagaattttataagtgctggccttgaatattgttatgaaggatgtgtgattatttttgatgatctattatattaa

SEQ ID NO: 178227 - DNA, 159 bp, Klebsiella oxytoca
atgccgttgattgtcttgcctgaaacgattagtctaatattcctgaatctggatctttttctaatcatttttaattttttactttctctctatatgggtatttatatgtttcatggagtgatttttttgggcaggccctttgagggtatttcagtatag

SEQ ID NO: 178228 - DNA, 480 bp, Klebsiella oxytoca
gtgtcggccagagaacgtttttttaagaaagtgcagcagaactccgatagcacaccgcccggcaataaatccgctgaggcggaaattcaggcattccgccgccggatggatgcgctggtgcagcaaatcagccagtggtttgcgggttccggcattgaggtcattttatcaacaaagcatattcatgatctgagcacgatcggctatagcctgaacagcggtatatgccgttatgacatcaccacaattcggctacagaacggagatcgtcacgtcagcatagtacctgaacagctctgtcgaggcgtggaaacgggctgcatgacaatgcgggttaatgcacctggaatcactcagctgttttacctgagcatggcgccggaaacgggctggtttatccgccgcgaacatcagagcgaaaaagagaatgtcatcatgacggaagagctctttttccatgccgttgattgtcttgcctga

SEQ ID NO: 178229 - DNA, 1575 bp, Klebsiella oxytoca
atggccaatgtttatactctgatttcagtctgtcaggccgctgctgatgcgctggcggtacaaacgcaacaacgtctgctgttgtggaataactggctgcagccgctgtcagccgataaacccgcgggggacgatcccggctacgatgatgatttccagcagatgcgcgaagaggtgaacaagatcaccggtgcggatagcgatctgatttgtaggttggccgaaaaactgctcaccaccgtgaccaaagatattcgcgttgcctcatattacgcgtgggcgcggctgcaccgggatggcgaaagcggtctggcggacggactggaactgctggccgggctgatgcagggttttggcgagcagctgcacccgctgcgggagcgcagccgaagggccgcatttgactggctcgccggacagcggatgcttgacagcctgtcgctgtaccccgaggccggcagtactgatgccttgcgtatcagcggcgcattattgctgatggagcaggcgcaggaggggactgtccccgatgcgctgtgcagtgtcctcgagacccgtctgttgaaatcgggcgggccggatgccgtcgtgccgcagaacgtcagcgatgtttcgccctctcaggcaaacaactatacgccggcgctgagccctatcacctccggtcaggaactgctgacccaggcgcgtatcctggcgaaatatctgggagaccagccggagggctggctggccgctcatcatctgatgaaaagcatccgccacgacacgttatatcagctgccgccgctatcagcagaaggcagaacccgtattgaaccgccgaagccggaccagcgggcattgctgaagcggttgtatctccagcagagctggacggaactgctggaacaagctgacgggatgttttctcgtggggcgaatcatctgtggctggacctgcagtggtatatccaccaggctttgctgaaggcggggcgggaagcggaagccgctattattcagaacgacctgaaagggctgctgacccggctgacggggctggaaggactggcatttaacgacggcacgccgtttgccgatgaggtcacgctgaactggatacaacagcaggtgctggagaacgccgcaggctggcgggatgatactgccgccagcgccgctaccgcatccggcgatgacgatattctgctgctggagccggaggccctcgcggttgccgacagcgacggcccggaggcggcgctggcctggctgcagaaccgcccgggtatcaccagcgtgcgcagccgctggctgctgcgcctgctgatggcgcgtattgccgagcagaccggcaaaaatgagctggcgcaacacctgctggcggaactgggcgtggatgctgccggaattccgctggcacaatgggagacaggcctgctgttcgaagtcaaagcccgccacctcaggctgctacgcatgaaggccgggcgcagtgaaaccgacaaaaaccgcctgcagtctgctatggaccgcctgcttgccgagctgattgccatcgatcccgcccgtgccgcagtgctgtgcgcttaa

SEQ ID NO: 178230 - DNA, 1710 bp, Klebsiella oxytoca
atgatggacgataaggggaaactgaatatatgcaatctacgaggtcctgcgattgtatttgctctttttacccttattgttgtgtttcctgctcgtgctgagccgggagacttccttgataatatatcgaaactcgaaataaacaatccgccggcctcaggcgccgccagcggggagtcggtctcgtctaagcaaaataacgatagccctgataaaaaaacgcctcagaagcaggacgtcgtcagaaaaaaaagccatcagaataaaacagagagtacgattaacgctctgcggaaacagaatgcggagctgagcgctgccgccaaagcggcggagaaaaagcgcgctgaaacgacgcgcgaactgtcggcgcagatcgccacgctgaaggctcagagtgaacagcgtgtacagaaagagagcggcgaaactgccgccgtgagcgcgctgagcaaaaagaacgccgagctggccgccgctgccgaagcggcgcagaaaaaactggatgagaccacccgctcgctgacggcgcagatcgccgcattgacagcacagcgtgcacagaacgaaagcgggcagaccaccgcgcttgatgcgctgagcaaaaagaacgccgagctggccgccgctgtcgaagcggcgcagaaaaaactggatgagaccacccgcacgctgtcggtgcagattgccgcgctgaaaacgcagaaggagcagagtgagaacctgcagaaatcgacgatcgatacgctgacgggaaagaatctggaactgcgcgccgctgccgaatctgcacagaaaaagcaggatgagacaacccgcgcgctgtcggcgcagattgccgcgctgaccaaaaagaacgccgagctggccgccgccgccgaagcggcgcagaaaaagcaggatgagaccacacgcgcgctgtcggcgcagattgccgcgctgaacaagcagcgcgcggaaagagaaggccagcagaaaaccgcgcttgatgcgctgaccaaaaagaacgccgagctgaacgccgccgccgcaaccgcgcagaaagaatatgatgtttcagtcgctgctttaaacgataaaaataaaaaattacagtctacgctcgatagcctggccatcaagcaaagtgatttaagccttgcggataaaagtcataaaaatgcctatgcgctcggcgttttctaccttacccaggcgctatccgatgtgaataaaatggccgacaataatgtcaagctggcgccttcagcgttggtttccgggtttaacgacgcttataataaaaaaattaaaattaaagaaaatgaaatagaaagtatcgttaacatgcttaacgaacaactatcgtctaagtacgtcgatattgaaaaaagaatcatggcaaaaatcaaaaataaaaaatatgagattttgcctaatggcgtatattttgtggttgataaaaaaggaaaggagccgtacaagtcgaatgagactttgtctatgaatatccttgagaagaagcttgatggtacgccgatactcaatacgatgaattcaaagatggtttacgataagcaaatcgatccgctaatggccaaagtattatcatccggattaaaagggggaacggtcacgctatatggacaggccggctcgctgtatagcagcacgccagcggacctgaacccggataccttaatctccattaccttcgaactcattccctga

SEQ ID NO: 178231 - DNA, 405 bp, Klebsiella oxytoca
atgataagaaatagcttattggcattggtgtgcatttctgtaggtttattacaggggtgtactaatggtaaaaaaccgcagagcgcactcataaaaaaagatgtcattcaaaatgaacagcccgcgcaggttcctgctttacagcagtgtatccaggatgccgacgctttagttaagctcgataaaaagtttcagcaggactcaaacgagctgtatggtttaatcaatgatgctaagttttatgcttctgtttcagaccaaacctccgccagcgtaaaatcaacgattacaccgctttttgaatacaagataaacgataagtgtaatagcatttcgcagaaattaattaaagagtttgaaagccgggcaagaaaatctgaactcaaggatgggctggccagatga

SEQ ID NO: 178232 - DNA, 849 bp, Klebsiella oxytoca
atgcagcttaacgtctttcgcacgctgtggggcgtcaccaccccgtggcagcaaacggtcagcgaactccggagcgtcggctgctgcggtattgaagcgcgggttccgctgacgccagaagagcagcggacgctggcccaacgcatcgaagcgtccgcgcttgagtatatcgccattgtgttcagcggcggcggagttattccggcccaggccgagacgcccgcgcagcatctggagcgcttaaaagaacgttttgcggcggcaaaagcgcttaatccgcgcttcgtcaatctgctggccggtaacgaccgctggccgctggcgcagcaggtggattttctcggcagagcgcatgagctcgccgccgaatatgaactgttctgcagctttgaaacccatcgcgccacgtcgctgtatagcccgtggctgacgctggagataattcaacagctgccgcagctgcgctttaccgccgatatcagccactggatcgtggtaagcgaacgcctgctggatgacccctgcgatgacttcagcgcctttatcgaacgggtccaccatattcaggcccgcgccgggtacgaccaggggccgcaggtgccgcaccccgccgcgccggaatatcgggcggccctgcggtttcagcagcgcttctgggaacagatctggcaatcgcagcgccggcgcggctaccagcacaccacgcttacgccggaatttggccccgatggctacctgcatcacctgccgtttaccaacgttccggtcgccgacctgtggtcgctgaacgcctggatggcccagcgtgaacagcagcattttgttgaattcacctcgcaaactgaataa

SEQ ID NO: 178233 - DNA, 933 bp, Klebsiella oxytoca
atgactcagttcaccatcgtcgtggattgtaacgatcctcagtacacccgggagatttgcgccgcgttcgcgctattcccggaagtgaaagcggttctgcccgaggagcccgccgcccgcgaggcgcaatacgcctgctgctggtttcccgacccgcagctgctggcgcgctcgcctcagctgaagctgatccaggccgcgtctgccggcgtagaccatttgcctgccagcgttttcgccagcgacgttccgctctgccgggtggtggatgaagattttcgtcacggtatgtttgaatacgcgctgtggggcgtgctgtggtttcagcgtcgctttgaccgggcgctggcccaccagcgcgagcgcgtctggaagatgtatccgcagcgagcggcggccgattatcacgttggcgtcatgggcctcggcgaaattggcggctatatcgcctcgcagctggccgcgctggggtatcgggtttccggctgggcgcgtagcgaaaaatcccttgccggcgtgcgctgctaccacggagaggcgcaggctggcgaattccttggccagttggatgcgctgatcaacgtcctgccgttaaccgggcagacgcgaggtatcctcgcccatcctttactgcagcagctgcccgacggcgcgtcgctgattaactgcggccgcggcgagcatatggtgaatcaggacgtgctcgaggcgctggatagcggcaagctgtccggcgcggtgctggacgtcttccccgtcgagcccctgccccaggaagacccgctgtggcaacacccgcaggtggcgatcacgccgcatatggcctccatcgcgcagacggaggtgattgcccgccagctgctggacaacatccggcggcagcagcaggcgctgccgctgaaaaacctggtgaacaaacggagcggttattaa

SEQ ID NO: 178234 - DNA, 1059 bp, Klebsiella oxytoca
atgagattattactgagcgcgctgatgctgctgctttgcgcaaacgcgctggccgctattgatgtcatgccgtttaaggacgaggagcaggaacagcggtttcgcctgctcacggagcagcttcggtgcccgaaatgccagaacaatagcattgcggattccagttccgcgatcgcggccgacctgcggcagaaagtttttacgctcatgcaggaaggaaaaagcgacagcgatattgtggactacatggtggcgcgctacggcaacttcgttacctacgatccgccattaaccccgctgacgatgctgctgtgggtcgtgccggccgcagcgatcgccatgggcggttgggctatagtggcccgctcccgccgccgcgtcaggccagggcaggagacgttttctgacggccgggcgccggaggataaatccgccgggccgtggatttttatacctggcgcggtgcttgcgctggcggtaggtgcggtcagctatagccagaccggccactatcagcaggtgcaacgctggcagcaggcggtggctcagacgccggctctgttggcgcgggtgcaggatccaaaggcgcagccgcttgatgaagacgaactgcggcgtctggccctcgggctacgcacgacgctgtggcaaaatccggacgcttctattgaggactggcttatgctcgggcgtctcggcagggtcctggacaacgccgctatggcgactcaggcctatgctcgcgcttacgcgctggctccggataacgatagtgcggcatttggctatgcggaggcgctgctgcgggtatctgacccgcggggcgatgcgctggtgcgccaactgatggagagccagcgcgttaacgaccgcctgcttaatctgtacgcgctcagtgcatcagagcaggcgcatttcagcgaggcgctgacggcgtggcggttgctgctaaaacgattaccgccggacgatacgcgccgggcggtcattgagcatcatatcaaccagacggagcaacggttaacccacgaacatcccgccgttgacgcgcaaggttaa

SEQ ID NO: 178235 - DNA, 558 bp, Klebsiella oxytoca
atgaagcgctgtacgttgttgatgccgctggtcatttttatggctatcgcgatgctgctgctgtggcagctggcgcgtaatgtggaaggggacgatcccaatagcctggagtcggcgctgatcggaaaaccggtaccgattttccgtcttgaggcgctggaagatcccgggcagtattttcagtcggatgcgctggcgcagggcaaaccgctgctgcttaacgtctgggcgacctggtgcccgacctgtcgcgcagagcatcagtatttgaatcagctttccgcgcgggggatccgcgtggtgggtctgaactacaaagacgatcggcagaaagcaattggctggctgaacacgctgggcaatccctacgcgctgagcctgtttgacggcgacgggatgctcgggctggatctcggagtctacggcgcgccggagacgtttttgatcgatggacaggggattattcgctaccgccacgcgggggatcttaacgatcgggtgtgggagcgcgaattcaggccgctgtgggagaagtttagccgggaggctgcgccatga

SEQ ID NO: 178236 - DNA, 1938 bp, Klebsiella oxytoca
atgatgcctgaagtcggcaacgggctgctgtgcctggcgcttggcgtcgcgctactgctttccgtctatccgctgtggggcgcggcgcggggggacaggcgaatgatggcctcttcccgggtatttgccgttctgctgttcatcctcattatgggcgcctttatggtgctgattaacgccttcattaccaacgattttacgttgagctacgtggccagtaacgccaatactcagctgccggtccggtaccgcgtggccgcagcctggggcgcacatgaaggttcgctgctgctatgggtgctgctgatgagcggctggacagtggcggtagcgctgcgcagcaggcgaatgtcgcttgatattgtcgcccgggtgctggcggtgatgggaacgatcagcgttggctttctgctgtttattctgttcacctccaacccgtttgcccgtacgctgccggaatttgccattgaagggcgcgacctgaacccgctgttgcaggaccccgggctcattttccatccgccgctgctgtatatgggctatgtgggcttctcggtgagttttgccctggcgatagccgcgctgttgagcgggcggctggatagcacctttgcgcgcttctctcgcccgtggacgctggcggcgtgggccttcctgacgctcggtattgtgctgggctccgcgtgggcttactacgagctcggatggggaggctggtggttctgggatccggtggaaaacgcgtcgctgatgccatggctggccggcaccgcgctgctgcattcgctggcggtcactgaacagcgcgccagcttcaaggcgtggacgcttctgctcgctatctgcgcattttcgctctgtctgctggggacctttctggtgcgttccggcgtgctggtctcggttcacgcttttacctccgacccggcgcgcggcacgtttattcttgcctttatggtgctggtcattggcggctctttactgctgttcgccatgcgtggctataaagtccgctctcgggtaaataatgcgctctggtcgcgcgagtcgctgctgctcggcaacaacgttctgctgatggccgctatgctcacggtgctgctgggtacgctgctgccgctggtgcataaacagctgggcctcggcagtatttcgattggcgagccgttctttaatacgatgtttagctggctgatggcgccgtttgcgctcctgatgggcatcggcccgctggtgcgctgggggcgcgatcgcccgcgtaagctcagggggctgctggttatcgcctgcgtaagcacgctggcgctgtcgcttctgttgccgtggtggttgggcgataagattgtcgccatgacggtggtcgggctggcgatggcctgttgggtctttgtgctggcgggagtagagatcgctttgcgggtttcacgcggcgccaggatgaccctcagctactggggaatggtcgcaggccacctcgggctggcggtcaccatcgtgggtatcgcctttagtcaaaattacagcgtggagcgcgacgtgcgcatgcgggtgggcgacagcgtcgatgtccatgaatatcgtttttctttccgtgaggtcaaagaggcgatcggcccaaactatcgctccgccgtcgcggtgattggcgtcatgcgacgcggcgaaccgcaggcgatactgaatgcggaaaagcgcttttaccacagcagcagcgccatgatgaccgaagcggcggttgacggcggatttacccgcgatctctataccgcgctgggcgaagagctgggcaacggcgcctgggccgtacgcctttattataaaccgttcgtacgctggatttgggccgggggagtgctgatggcgctgggcgggctgttgtgcctgtgcgatccgcgctatcgcccgcgccgcggatatcctggcgcggaggccagatga

SEQ ID NO: 178237 - DNA, 480 bp, Klebsiella oxytoca
atgaatattcgccgcaaaaaccgcctgtgggtcgccctcgcggtgatcgccgggctaacgctgaccaccgcgctggtgctctatgcgctgcgttccagtatcgacctgttctatacgcctggcgaaatcctctacggcaagcgcgaaacgcagcagcggcccgagcggggtcagcgtctgcgcgtcggcgggatggtcgcgcccggcagcgtgaagcgggatgcgaattcgctgcaggtgagttttagcatctatgacgccgaaggttcggtggacgtcagctacgaaggcattctgccggacctgttccgcgaagggcagggcgtggtggttcagggcgagcttgatgcgcacaaccggatacaggcgaaagaagtgctcgccaaacacgatgagaactacactccgccagacgtggaaaaagcgatggagagcaaccatcgtcgcccggatagcgcctacagggacacatccttatga

SEQ ID NO: 178238 - DNA, 204 bp, Klebsiella oxytoca
atgagcagcgcatttacaagctggagtgatttcctggccatgggcggctatgccttttacgtctggctggcggtggcgttgaccattctcccgctggcggcgctggtcgcgcacagcgcgatcctgcatcgtgtcattctgcgcgatatcgcccggcagcgcgcccgtgaagcccgcaggcgcgcggcgcgggaggcgatatga

SEQ ID NO: 178239 - DNA, 738 bp, Klebsiella oxytoca
atgagaaaaacagggattcaactgacgaatccgccgcggctttatcagctctgcggcagggtcgctccgtggctgggcggcgccagcgcgctggtactgatcgcgggctgggcctggggatttggctttgcacccgcggactatcagcagggcgagagctatcgcattatctatctgcatgttccggcggcaatgtggtctatgggcatttatgccctgatggcggccgcggcgttcatcggcgtggtctggcagatgaaaatggccaatctggcgctggcggcgatggcgcccgtgggggcggtgtttacttttgtggcgctggtgaccggttccgcgtggggtaagccaatgtggggaacctggtgggtttgggatgcgagattaacctctgagctggtgctgctgtttctctacgtcggcgcgatagcgctgtggcacgcttttgacgatcgccgtctggccgggcgtgcggcggctattctggtgctgattggcgtggtgaatttaccgatcgttcactactcggttgagtggtggaacaccctgcatcagggctcaacgaatatgcagcaaagcatcgccccggcgatgcgcgcgccgctgcggctggcgattatcggctacctgctgctgtttatcacgctggcgctaatgcgcatgcggaatctgattttgctcatggaaaaacgtcgcccgtgggtcagtgaactgattttaaaaagaggtcgtcgatga

SEQ ID NO: 178240 - DNA, 657 bp, Klebsiella oxytoca
atgtggcggattttttgccttgaactgcgggtcgcgtttcgccatcgcgcggaaatcgccaatccgctgtggttttttctgattgtcattacgctgtttccgcttgccgttggtccggagccgcagctgctggcgcggctgacgcccggcattatttgggtcgctgcgctgctctcctcgctgctggcgctcgagcgcttgtttcgcgacgacttacaggacggcagcctcgaacagctgatgctgctgcctttgccgctgccggcggtggtcatggctaaagtgatggctcactgggtggtcaccggtgtgcccctgctgatcctgtcgccgctggtggctctgctgctgggcatggacgtctatggctggaaaattatggcgctgaccctgctattagggacgccgacgctggggttcctcggcgcgccgggcgtggggctcaccgtcggactaaagcgcggcggcgcgctgttaagcattctggttctgccgctgactattcccttacttatttttgctaccgccgcgatggatgcggcctccatgcatctgcccgtggcggggtatatggcgatactgggcgcgctgctggcgggcagcgcaacgttaagcccctttgcgacggcggcggcgctacgcgtcagtctgcactag

SEQ ID NO: 178241 - DNA, 573 bp, Klebsiella oxytoca
atgaaagatttttcattcagcgtttcggcgggcgattgggtgcagatagccggaggcaacggtgcggggaaaaccactctcctgcgcctgcttaccgggctggcccgcgctgatgccggagaaatctactggcagggccgccctctgcatcgcgtgcgcgatagctaccagcaaaacctgctgtggattggccataagccgggaatcaaagccaggctgaccgccatggaaaacctgcgctttctccatcaacacgatgatatcgcccagtgccgggaggcccttgagcaggccgggcttgccggcttcgacgatattcctgttaaccagctctccgccggtcagcagcagcgcgtggcgctgtcgcgcctctggctgacccgcgcccgcctgtggatcctcgacgaaccttttaccgccgtcgatacggagggcgtcgaacgcctgattcagcgcatggcgcagcacacggagcaaggcggcatcgtcattttcactgcccatcaatcaattagcgcggcatccgacaggattcgacgcattgcgctgcgcggcgagagggcggaaccgtga

SEQ ID NO: 178242 - DNA, 1395 bp, Klebsiella oxytoca
atgaagaaaattgcgaccattacagcctcggtcattaccgcaggcgtgttatgttatttagggttgtcaggctatatctggtattacgacagtcagcgtattaaaaaaaacgacgtccggctctcggcggttgccgagaataataaagtcctctctttttttaatgaaaaaggttgcgactattgccacacgccctcggcggagttgcccttttacgccgcttttcccgttgccaaacagctgatggattatgacgtacagctgggatacaaatcctttaaccttcaatccgtgcgtacgtcactgattgacgataaacccgtttcacaaagtggattaaacaagattgagtgggttatgcagcatcaaacgatgccgcctacgcgatacgtcgcgctgcactgggccggcggcgttagcgacagcgaacgtattgagatactcaactggattaagcaccagcgcgagcgctactatgccagcgctgataccgccgcgcagcatcgcaatgaacctctccagccgatccctaaaaagctgcccgttgatgagcggaaagctgcgctgggttttcgtctttatcacgacgcgcgaatgtccggggatagcaccatttcttgcgcacactgccatgcgttaaacgcgggcggggtcgatggcagaaaaacgtctatcggcgtggggggcgctgttgggccaattaacgcgccaacggtatttaactccgtctttaatattgagcaattctgggacggacgggcatcaacgctgcaagaacaggccggtggcccgccgttaaaccccattgagatggcatcaaaatcctggggagacattattaataaactggataaagatcccgtattgaaaaaggattttttagccgtttatccgcaaggttttagcggtgagcgcatcactgacgctatcgctgaatttgaaaaaacattaattacccccgacgcgccatttgataattggctgcgcggtgatgaagacgcgctgaccgcgcaacaaaaacatggctatcagctatttaaagataataaatgtgctacctgtcacggcggtattattctcggcggccgctcttttgaaccgctggggctgaagcgtgattttaattttggtgaaatcacggctgctgatattggccgaatgaatgtgacgaaagaggtacgggataaattacgccaaaaagtgccgggtctgcgcaacgtggcgctcaccgcgccctattttcatcgcggtgatgttccgacgcttgatggcgcagtaaaactgatgctgcgctatcaggtcggtacggatttagcgcaaaaagatatcgatgatattgtcgcttttctgcatagcctgaccggtgtttatacgccgtatcagccggggcaataa

SEQ ID NO: 178243 - DNA, 777 bp, Klebsiella oxytoca
atgaatacggcgtttatggggaaaaaactgttagtggttggcgggaccagcggtatggggctggcgacggccaaacgggtggtggagaatggcggcagcgtggtgctggtgggcaatcgtcggcagaaagccgaacaggcgcgtcaggcgctggcggcagcggggaaggtggatgttatcgtcgctgacctgacgagcgaaagcggtatgcagcaggttatggccgctattaacgcggaacatcaggatatcagcctgctggtcaacgccgccggcgttttcttcccgaagccgtttatcgaacatgaaatggctgactacgatcggtatatgcatctcaaccgcgcgacgttttttatcacccgcgaggtggtgcgcaatatgctggctaatggcatcaaaggttcgattgtgaatatcggctcgatgtgggcgcagcaggccatcggcgcaacgccgtcgtcagcctactccatggcgaaagcgggtctgcatgcgctgaccaaaaatctggcgattgagctgggcggcagcgggattcgggtcaatgcggtatcgccggcggtggtgcatacgccgatatatgaagggtttatccctaaagaggatgtgaaggatgtgatgaacagctttgacggcttccatcccattggccgcgtcggcacgcctgatgatatcgcgcaaaccgtggcgtttctgctcagcgatagcacccgctgggtgaccggcgcggtttgggatattgatggcggcgtgatggctggtcgtcatgcctga

SEQ ID NO: 178244 - DNA, 1788 bp, Klebsiella oxytoca
gtgccaggaaatccgtttgccctgacgccagagatcgaagcgaacccgctgctcagcgactcctggtgccgtagccagcgctatggcctcgaccccgccacggatgacttccctcgcctgcacgccagcgaactggccgacaggctcgccagacacagccgcctgcaaacgctggcccagccggtcgttaatgagctatcccgcaaagtcaacgctctgcaatccgtcgtggttctctctgacgccagcggtctggttttgcaaacctttggcgatacgcacgccatgcagaaagcgcagcgcttcgctttagcgccgggcaacctgtggagcgaaagcggacgcggaaccaacgccattggcaccgcgctggcgattgacgacagctgcgaaatcgatggccgccagcattttctgaccagtaaccagggtctttattgcgccgccgtgccgctgcaaagtcccgatggcaaaatagccggggtgctggatatctccggcccggcccggtacccgcacgcccgcacgctggcgtgggtaaaaggcgccgcgaagcagatagaatatctgtgggttaaacagagtctgcatccgcaacagtggctgatgagcctgcatcctcagctggaaaagctcgacggcgtcgacgaatgtctgctggtctttaccgacaatgtgctgatggcggctaaccggctggcgatgcgcgagttctcacttaacgcagatcggttcggccacctcaccttccagcagctttttccgcagttgcggcaaaccgccgtcagcgtaccgctgccgctcgtcgccggagatcgaaactactattaccgtctacgcgctcccgtgaccgctggcgtggcggtgaccgcgcgccccaccctcgagctgcctttctccagccagcgcgaaggcgaaaagctgctgcgcctgcttaacgccgggattgggttgtgtatcgaaggcgaaaccggctgcggcaaagagtacgtcagccgtaccctgcatcggcacagccgctggagcggcggcaaattcgtcgccatcaactgcgccgcgctgccggaatcactgattgaatccgagctgtttggctaccagcccggggcgtttaccggcgcaaacaaaaacggctacatcggcaagattcgcgaagccgacggcggcgtactgtttcttgatgagattggcgatatgccgttaacgcttcagacccggctgctgaggatcttacaggagaaagaggtcacgccgcttggcgccagccagagctcgccggttaatttcgcggtgatttgcgccacccaccgcaatctggcgcagcgcgtcgcggaagggaccttccgcgaagacctgctctaccgcctgcgtgagtttgctttaacgctgccgcccctgcgcgaatggcctgaactatccgggtttatccaacgattgtggcgcgagctgggcggagaaaagcgtcgcatcgcgctggccccggaagttgtgcaacacctgacgtctcatccctggccgggcaacgtccgccagctgcaaagtgtgttgagggtactgctggccctcgccgaagagggtgaaacgctggggatagatgatttgccccaggagtatcgaagcccgcccgccgcccgcccgctgcgcgggcttcagcagcacgatgcgcagctgattgccgacacgctggcaagctataacggcaacatcagtaaggccgcgcaggcgttaggcgtcgcgcgcagtacgctgtatcgccgtgcggcccgtcgcggaagccatagcgcatag

SEQ ID NO: 178245 - DNA, 630 bp, Klebsiella oxytoca
atgacggaaataagactgtcgcgagctaccgccatgaacgcactggaaacccttaatcaaagcgcctttttagcgctgaacgcatcgcccggcacgccggaggcgatcctggcactggcacgtttttcagcgagcgggatcatctttgtggttccggccattctgctctggctgtggttttccggcgggcggcagggtcatcggcaggcgctgttttgtaccttgagtattctgatcgcgctgggattgggatcgatctgcggaatgctgctgtttcatccgcggccgtttatgatcccgctcggccatacctggataaatcatccggcggataactctttcccgagcgaccacggcacggtgatgtttagcgccgcgtttgcactgctctcgctgcgctcacgcgccgcggggctctttctgctgctggcggcgctgcccgtggcctggtcgcggatctttcttggggttcactttccgctggacatggtgggggcggcgttggtttcagcctgcggcgtctgcgtcgcgaagcttatctggtcgggcattgggcaccgcttaacctccctgtgtgaagcgataagcagacgcctgttcgcctggctaccgccgcgcttcacgccctga

SEQ ID NO: 178246 - DNA, 180 bp, Klebsiella oxytoca
atgttttcagtcggtgacctggtacaaccgcgcgcgggtgggccaaaacttaaagtcgttgaagtccaggacgatcgcattattgccgttcaggcaagcaacgagcagggtgagaaatatacgctgaaggccgccgatgtgacggtttataaagaagacggcgattttggcgtgtgctga

SEQ ID NO: 178247 - DNA, 1359 bp, Klebsiella oxytoca
atggacggtaaaaaaattccgcactaccagcgcattgcccgacagcttaagcaggcgattgagcgcggcgagctggctccgggcagcaggctgcctgcaagtcgggtctatgctcaggagcttggcgtgtcgcgggcgacgattgagaacgcctggggagatctggtggcgcagggatggctggagcggcgcggacaggcggggacctttgtctgcgatcggctgctgccgcagcaaaacgcgcccgttcagcccgtcgagggcgatgaacccgcggcgccgctgccgtttcaactggggctgcccgcgctggatctgtttccacgcggcctgtgggcgcgcgtgatgggtcggcgtctgcgtacacaaacgcgttttgacctcgcgccaggcgatcccagcggtgaaccgacgcttcgccgggcgatcgtcgattatttgcgtctgtcgcgcagtattgagtgtcggtctgagcaggtcttgatcaccggttgctacgcggcctcgatgcgccttattttgcgcacgctggcgcggcctggccagcaaatgtggatggaagatccggggtttccgctgatccggccggtagtgaacgacgagggggtggcgatcaatcccgttccggtcgacgacgacgggatggatattccctgggcgcagcggcattacccgagtgcccatttcgcgctgctgaccccggctcatcaaagcccgctcggcgtggcgctatcgctggccaggcgcagacagctcctgctatgggcggcgcagaataacgcgtggattatcgaagatgattacgatagcgaattccgctatcacggtaagccgctgccgccgctgaaaagcctcgacgccccgcagcgggtcatctatgccggggcgttcagcaagtctttgttcccggcattacgcgcggcctggctggtggtgcctgagccgctggtggcgccgtttcgtgaacaggccgcgctgatgtgctgtagcgtgccgacgctgtggcagcagacgctggcggattttattcgcgaaggccacttctggcggcatctgaagaaaatgcgcgccagctatgcccagcgccgactgtggcttgagtcggcgctgcgggcgcagggattcaccgtcgtgcctcaggcgggcgggatccagatggtggtcagggtcgccggagacgatcggcctctggcgcagcgcgccagacgggctggtctggccgtacaggcgctgagcgactggcggatggcgactcggggagaaggggggctgataatgagcttcaccaacctgacgtctgcagaaatggcgaatcaggctgtgcgtaagctttatgtcgcgctttacccgcagagataa

SEQ ID NO: 178248 - DNA, 228 bp, Klebsiella oxytoca
atggccaaagcaacgcttacctcagagcagaacgtgaaaaaaattcgccaggtgcgcctgtgcctgtttgtatgcggcacagtttcgctgctaaccgcgctactgcatattttcacccgctcattcaacccgctgttcgaaggcgtacagatcctgctgggcgtgggctgtattgccagtggattcacattgaacaaaaaaatcaagcagatactcgcagaaccatag

SEQ ID NO: 178249 - DNA, 1041 bp, Klebsiella oxytoca
atgcaaaacacccaaccgcaacataccccgctgtggcagcgctatctgtccacgaaagcgcaatcttccgcgaaatacgcccgcgatatcgccgccgaaatggggattagcgaagccgagctgaccgaagcccgcctgggctacgatgccgtacgtctgcaggacgacgcccgcgccattctgacggcgctggaaaccgtgggggaaaccaaatgcatctgccgcaacgaatacgcggtgcatgagcaggtcggcgaatttacccatcagcatctgagcggccacgccgggctggtgctcaatccgcgcgccctcgatctgcgcctgtttctcagccagtgggccagcgcttttcgcctgaacgacaacggccgccagagcatccagttcttcgatccgcacggcgacgcgctgctcaaggtttacaccaccggcaataccgacatggcggcctgggatgcgctgattgccgggcatacgcagcaatcgcctgccccgctggcgattcgcccggccgaaccgctgaaatatgccgactccgccgacgcggcggcgctggaaaatgaatggcgggccatgaccgacgttcaccagttcttcggcctgctgagaaaatatagcctgtcgcgccagcaggctttccgcctggtcagcgacgacctcgcctgccgcattgacacccagacgctgccgggcctgctggaaaccatccgccaggatggcaacgagatcatgatttttgtcggcaaccgcggctgcgtgcaaatcttcaccggcgcgctggaaaaggtcgccccgatgcgcggctggctgaatatcttcaaccccgcgtttaccctgcatctgcgcgaggagagcgtggatgagatctgggtgacccgcaaaccgacctctgacggccacgtcaccagcgtcgagctgttcgccaaagacggcacgcagatcgcacagctgttcggtcaacgcagcgaaggccacccggagcaggcgcagtggcgtgcgcaggtcgatcgtttgaccaccgaagggctactcgcatga

SEQ ID NO: 178250 - DNA, 312 bp, Klebsiella oxytoca
atgaagatttcattttcaccctgtaccccgcattcacatcaaaattctgtggctgcagttgaaagtttacgagtattgatgagttcaatgggcatcaataaattctccggggtaattgtaccagagcaggagtatattctttatgtattgaaagaacatgaacctgaagggttacttactcgtgaattagcggacaggtgcgaaatgtcaatttataaagtcagacatttactactgccgttagagaagtatggtcaggtgattagaataaaagttaataagcatcataaatggtatttttataataaataa

SEQ ID NO: 178251 - DNA, 741 bp, Klebsiella oxytoca
atgcggttcgatatagagggatttattacatttgatactgaggaagcatcgctggtcaatcttttgaccggtgattgtattgaactctctgctacttccactcgcctcctgaccaatctgttacaataccgtggggatattatttctcgcgttgacatttttcagtcggtgtttgaaaaatatggcgccagaccttctaatagcaacctgaatcaatacatctcaacgctgcgtcgcagccttgcggatctgggcgttgagaaaaatgtgattattacggtaccgcgaattggctttaaaatttctgatgaagtcattatcaccagcgacaatgattactcctcctctttcactctcccgacgctggcccctgaacctcccaggcgtagtttgctgtggcaacaccgcaaagtcgccattttatttatcccgatggtgatagctttgatgctacttttacagttttttacccatcaaaaacagtcccctacagcgatttttactcaggataaatgtattttttatggcgcaggagcgctacgcgtgggggaaatactcagaaataaaaagctgttcccctcggggctcgattgttctacacccaagaaaatttatcttttcaaccgacaattaaatcaggaacaggacttaggtatttatatggatatattcatactcaaatgcgatataaagtaccagcagtgccacagttactactataaggaaataaaaaatgcgtaa

SEQ ID NO: 178252 - DNA, 489 bp, Klebsiella oxytoca
atgcgtaaatacgcttttatcgcgctggcctgtacgctaacgctggcattagcttccatcctgtacatttgtttcaacagccatgacgctttctcctgtaaatcacaatacgatcttacagaggaaataaatgagaatgttctccgctcccagggcttgctgtccgctgagttttccaaccatcgtcttataatcaaccttgagggattgctcaccagcgcgggagataaatacattgtctcgcgcaccctctccatcaccttaaaaaaaagcaccgctgcgggtcatcttttttatatttctgattcgcaaaccactcgccacaacggtgataatacgcctgataacatcgcgcaaaaaatcctctttggcaaccaaactaatgatagaatcatctatatcaatcgcgttaatgatgatactattttattcggtaaccaaacgttcccacaatatggttgccagcgtcaaaaaacaatcattgattga

SEQ ID NO: 178253 - DNA, 795 bp, Klebsiella oxytoca
gtgacgctgctgcactacacccttgccgacgcgcagcagtgggcggcgttttccggtgacgaaaacccgattcacttcgacctcgcggcagcgcgccagatgggcgcgggacagctgagcgtccacggaatgcgcgcgctgctcgacgtgaagcgcgatgcccactcccggctgtaccgcccagagcgttacgtaaaatgccaggttcgcctgcgcaggccaatatggtgcgataccgactggctgttaacgcccgtgctagccaaaaatcgccttttgtccgccacatcggtcagcaatccgcagaatggtgaactctgcctgtcctgccagatgagcacggcggccgagccggaatcgctggtgggtaaacagccctgcacgattgcgccaaagacgctacgcgagctgcagtcctgcttcaacgccgcctggcccgacctggcgcagtggcagtttcttgatgccttgctgttccgccagctgattggcgatcccgcgctgctgcgccaggagagtatcgcctccctgctcgggccgggggaaacctcgttgcagcaaatatttacccgctatccggtgctgcaaacccaccaggaggtggtgtttgatgcttgtcttgcgggcaaagcgacgccgattcggcccgaatctctgtcgctctggctgctgccctcgctggtggtgggccaggtcgaacagggggcgctggtgcgcatcgccgcggcggcgcagctggatgacctgataataacgaacgtggtcacgctaaaagttggccctgtgcataattga

SEQ ID NO: 178254 - DNA, 669 bp, Klebsiella oxytoca
atgaagataaaacctattaccgccgttggctatacgtttctggtggcgttaatttcgtcgctaattaccgtgctgtgctatcacatatttgtgtttaatacattttcactggatagcagtcagccttccgccctgcgggaaattgacagcgcaaccgttgccagtagcccaataaaacatgagaaaagcattattgaagtgatgtcctatggctgtcactactgcgcatcgaacgaggaagagatcgaaaaattcgccgccacgctacccgcggatagcacctttgaagttatccatattactggcgagaataacggcctggcggtctttgcgccggtttttgcgacccttgaagtcatgggtattgagcgccagacgcgcgaccaggcgtttaacgcggtaatgacccgcgggattaatttagccgatgaggaaacgcttaatggctggctgaaaaagaatagtattgatgtcgataaataccatcagctacgccaaagtcaggccgtcgccgagcgtctggaatatatggcgaaaatcaccgaactttatgacattaacgcgacgccgctgtttattgtgaataagaaatacgtagtggcgaaggatcgtcagtttcctgaatttgccgactatttgcgccagctgttaacccaggataaggagtaa

SEQ ID NO: 178255 - DNA, 207 bp, Klebsiella oxytoca
atgcaaaaattaagtatgattgaagcgtcaactattattggcggctgctgcaaggaaacttgcacaagctcttacgagacagtggtcgttggcggtgtttctacctgtaaacaagtgaccacctgtacggataagcacggttcaaccgttagcatgaaagatgcgccggacagcatgtgcgtcgtgccaaatagcgcccgttattaa

SEQ ID NO: 178256 - DNA, 1053 bp, Klebsiella oxytoca
atgacgacgatggttatcggacgaaaatcttgcgtcacgcttttactctgtggcggcttactatcccttgacgccagcgcggcgattgaaggggaaattacgccggtcggcggacctaaaatgtataatattgacgtggtcaatcaggatattaccaataacagcataggggcaacgattccttatgagttttcattgggcgggcaatattctggtatagccagctgtaccattcccatggaaaatcaggcgatttattactctgcgaccgcctcgctgatgcagcagggaagcgcgccgggctatttaaagctcaatgattatatggatgttaaaattgaaatttatattcgtggtcagcgcatggattattttgcggtacctttttataatgaatcgaataacgcttttcagaataaatgcgttccgccaaccacccaatttaataactttgagtccggcgccaaggggcgggtaacgtttatgattactaagcctattgtcaacggtgttaacctgttgggtacagaaatcgccaagctttacggccgcctggggaactatagctcaggaatgggcagcactccaatgtcgattgtctcgattaattccggggtcattaccgttccggataaatgcattgtcaactcaggtacaccgatcgtcgttgattttgataccatccccagttcgggttcgctgctaaatggcaataattacagccggcccgtgccgattcaggtgaaatgcgaagggggaagtttcgcgaacggtaatttaaatattcgcctgggtattcagcaggccaataccgccagttttaatagcgattatttagggaccaccggcgccgtcgatcgatccaatcttggcattattctgaaagattcaggcggcagtttagtggccgcgaatagattttatgacgtgccgggttttaataataatcagggaacctggaatctgaccgccgcgccgattgccaatgccgggaccaatgttctcgaaggggatttccaggcatcggccaccgtggtcgctgagtttcagtaa

SEQ ID NO: 178257 - DNA, 483 bp, Klebsiella oxytoca
atggctattccgggtaatatgtggctctatgacgatgggggagcactaatcaaaggcggttgtgatgttgcagacagggaattcagtatagagtttaaagggtttcaccataatctttctattcccactgataatgctactggcaaacctaccggcactcgtcagcactcaccaatgatcatcgttaaagaattcgactattccagcccatacctctacaaagcagttgctactggtcagaacctgaaatctgctgaaatcaaatggtataaaatcagcgatgctggtcaggaagtggaatacttcaatatgctacttgaaggagttcgaatcgtatcaatatcacctacaatggcttccccagaagacaagaacaacaaccatcttgaatccgtggagctaaggtatgagaaaatcacctggaaacattgtgatggaaacataattttcaccgatgcatggaatgaacggcaaacagcctaa

SEQ ID NO: 178258 - DNA, 240 bp, Klebsiella oxytoca
atgactgagtggacgatggtgttatttattttaaaaacaggaaatatagatgaaaacattacacacttaaagaagacaaagattctggagatttttatctttttgcaagagatatgcaccgaaaggcgcagaatattaatgcactctggtttcaaaaaatacatgcaaaaaatgtataaatcaggcaataaagggaaccgtttctcatgtgtcactgaacaacaattcaacttacgatga

SEQ ID NO: 178259 - DNA, 522 bp, Klebsiella oxytoca
gtgttatttgtagctgctcttgtaggaatatgcgcctacttctttcccaaaactccagatgcgcacaagagtgatgacatcattggcatatggacatcagattattcatatgatagtgcaggaattacaattagggtaaatggagagacatcatacttttctaatggaaaatacaatgttaatgctgatatgtcttttcaaccagatagcacaactatcataacctttgctattaatggtgctggagattggaatattcataataaagaactaataacaacacttaatactttgaagtctattcccgcaaaaatggtttataaagggaaggtgttgggatctcaagattttgatataatggaaagaatttccaatcaaaaacttaagaccatagaagatttcacagcgcctggagcaagtcagtcttacattataaaaaatgatgaccatgaaaaaaagttattagaagctataaatccctttggcaaaaacttcaacatagagatgtatagaaaaaagtag

SEQ ID NO: 178260 - DNA, 225 bp, Klebsiella oxytoca
atggacgaaaacaaacttaaggcgctgactgccgaactggctaaaggcctcaaaaccaaagctgacttaaaccagttttcccgtatgctgacggatttaaccctcgaaacagcacccaatgctgaaccctggcatgagaaaaacgcgcccaaaaaaggctttaatacacgcaatggctactcgtcaaaaaccctgctttgcgatagtgagcaaacacctcattaa

SEQ ID NO: 178261 - DNA, 888 bp, Klebsiella oxytoca
atgctgaacctgcagcggatgaacatgtttgtagcggtggtcgatagcggaagttttaccgcggcggcgacggcgctggggcagaccaaggcggtggtgagtttcaacattcgccagctggagagcgagctgggggttacgctgctgttgcgatcgacccgtcggctgacgctgacggaagccggttcgctcttctatcatcgcggggtcgcgctgctgaaagcggcggaaaacctgcaggacgacgtccggggcagccacgtggggttgagcggtgaactgcggatcacaacgacgccagaatatggcgcgcaggtgattatcccggcgctggcggagttcagccagcggcatccagcgctccgcgtgcgccatgtttcttcttctcaccacgcggatttaatctccgaacggtttgacgtggcgattcgcctcgggacgctggcggattcgcgctaccgcgcggcgctgatatcgcgttttgctatcgtcccggttgctgccccatcatggctggcgcagcatcctgtaaagacgcttgaggagctggcccacgcggcgtggattattcatgaacgtctgaccgcaccgctccgctggccgcttaccgggcccgatgaggagagcatcgccttcgagattaaacaggcgccgcggctgtcggcagatagcgccagcgcgctgatggcctttgcgctggcgggcagtggtatcgcgctgctgcccgaatggctggtggccgctgcgctggcagacagcgcgctggtgaaggtgatgccggcgtttagctttccgcgccagggggtgtacgcggtttacccggacgcgcagcacgttcccgtcagggtccgggcgtttattgattttctccgcgagcgcctgggttaa

SEQ ID NO: 178262 - DNA, 1215 bp, Klebsiella oxytoca
atgacgtatcgcagcaaggtcgcaaccgtttttctgctgggtttctttctcgacttaatcaatatgttcatcgccagcgtcgcctttccggcgatgagccggacgctgcacgcgtcggtgggcgaactggcgtgggtcagcaatggctatattgccgggctcacgctggtactgccatttagcgcctggctcagccagcagtttggtacccggcgggtattcctgctttcgctcagcatatttagctttggggctctggccgcaggaatggccgactcgttgaccagccttgtcatgtggcgcgccctgcaggggatgggcggcggactattgattccgctaggccagtcgctaacctggcaacagttcaggcctcatgagcgggcgaaactttccgccgcggtgatgctggtcgggctgctggcgccggcgtgctcgccggcgatcggcggggtgctggtgcagtcgctcagctggcgctgggttttctttgccagcctgccgatcgcgctgctgacgttcggactggcagcgctgtggattaaggatgagagacgcgtcgcgcggccggggggactcctgcgtctctcgctactgcgcgatccgctgctgcgcttttcaatgctggtctatctctgcgtgccggggacttttattggcatcaatgtcgtcgggatgttttatttacaaagcgtgacggggatgtcgccctccgccatcggcgccctgatgcttccgtggtcgctggcctcgtttgtggcgatcgcgacgaccggccgctatttcaatcgtctcggcccccgcccgcttatcgcggtcggctgccttctccaggctgtcgggatcgtcaccctggctggcgtcaatgcgcataccgccagcagtatgctaatcgcggcatttatattcatgggcgcaggcggcagcctgtgcagcagtacggcccagagcagcgcgtttctgaatgtggcgaacggcgatatgccggacgccagcgcgctgtggaatcttaaccgccagctcagtttcctgatgggatctgcgctactggcagccttactgagcgcctttttgctttactggccaacgccgcaggcgtggcgtggcgtatttatcgccgccgccgcgttgaccctggcgccgctgctgggctgccttaccttcgataaccgggcgataatcatgcgcctgcacggtaaaatggagaacaaatga

SEQ ID NO: 178263 - DNA, 378 bp, Klebsiella oxytoca
atgaatcgctatattgcggaagttattgcggcccacgtggctatagaaaactggctgaatcagggggacgggagcgccgacgcgctgatgcgtcgctttagcccggactttaccatgatcccgataaacggtatgcgcatggatcatcaggcggtcagcgccttttttcacggggctcgcgccagccgtccgggcttaaagattgtcgtcgatagtgccgccatacttgccgaatggcgcgatggcgcagcggtgagctaccgggaaacacacgcgctcccaggcaaagcggaaaccgcgcgctggtcgacggttcttttccgtctgcaggaagagaaaatcatctggcggcacctccacgagacggcgatggcgtaa

SEQ ID NO: 178264 - DNA, 1056 bp, Klebsiella oxytoca
atgttttccgcattgtgccgtcgcctgctccccctggcgttgggcgcaggttttgtcttctccgccgccccggcattcagcgccccgggcgaaactgccaatgcccaggctcgtcatatcgccaccttttatcccggaagaatgaccggcacgccggccgagatgctgtcggccgattatctccgccagcagttcgcccagatgggctaccagagcgatgtgcgcagcttcaatacccgttacgtctataccgatagcaatcagcgtaaaaactggcataacgccaccggcagtacggtgatcgccgctcatgaaggccaatctcgccagcagattattatcatggcgcacctggatacctacgcgccgcagagcgataaagatgttgaaaacaacctcggcggcctgaccctgcaggggatagacgacaacgcgatgggtctcggcgtcatgctggaacttgctgaacagttaaagaacgttcctacccgttacggtattcgcttcgtcgccaccagcggtgaagaagaaggccggctgggtgcgcagaatctgcttaagcgcatgagcgacgcggaaaagaaaaacaccctgctggtgattaatctcgataacctggtcgtgggcgataagctgtactttaatagcggccgcagcacgccagcatcggtgcgcaagctcacccgcgaccgggcgctggctatcgcccgtagccacggcatagcggccttcaccaatccagggatgaaccgggacttcccgaaaggcaccggctgctgcaacgacgccagcgtttttgatagcgccgggatcccggtactgtcggtggaagcgaccaactggtcattaggtaagaaagacggttatcagcagcggagcaaatcacgcagcttcccgcagggcacgagctggcatgacgtacagctggataacctacagtatattgataaagcgctgccggggcgtattgagcatcgcggacgcgatgtgatgaaagtgatgctaccgctggtgaaagagctggcgaaggcggagaagagacccgcctcaaaatag

SEQ ID NO: 178265 - DNA, 231 bp, Klebsiella oxytoca
atgatgcgttttcattttttaataccgctagcacttctccgggagtgcttttttaacaatcctcgctcaatcagcaggcggtatgtctctcaccgtctccactgccagaagtcattcagcttgctggccaacctgcggggaaaaggggttttcctgtaccgttggctgggcaccgtcctgttgcctggacggcgcaagcaccgtctgaacacaccgctacaatccgcgtaa

SEQ ID NO: 178266 - DNA, 918 bp, Klebsiella oxytoca
atgaagcccagagtgccaaaacgctgggttgccgagctattgctggccgttgtcgcggcgggttgggggattggttttccggttatgaaaatggtggtcaatacctatccggtaatgatggtgttagggctacgctttctgctttcggccttctttttgctgccgttcagcttgagagggttgggaacattatcgcgacaaacattgctgtctggtctactactgggtctgctattgggaacttcatttgtgttccttatttatggtcttcagttaacaacggcctcaaataccggttttcttgcggggctcagtgtcatttgggtgttattgctcacgggaccattgatggggaaacgcccctcttttgacgcgatattagcgacattgtttggtcttgcgggtttatatctgatggccgatatccagggatggcagctccatctgggagatgggttggtcgttattggatcgttgttcaccgccatacatattattgcgctcgatcgtttctgcgcgcgtcataataatatgacactaacgtttttacagatctctacgatggccgtaatctttctgggactacagcacatcagcggaggtgagattctccctcgtaactggagtagcaagcttgtcatcgcgttagggataacggcagtcttttctactgtcattgctttttgggttcaggcgcatttccagcggtattcaacgccaacgcgagccgttctgatttacaatctggagccggtgttttccgcactattcgcactctggttattgcatgaaacgttttccgccaatgttattttcgggggaggattgattctgatagggatgtgccttccgggtattctgaagatattttcgaagcgctctaacgtaaatccaacggatcggttacgcggattgtag

SEQ ID NO: 178267 - DNA, 1149 bp, Klebsiella oxytoca
atgatttatctggataataacgcaacaaccaacatggctcctgaagtccgcgctactgttatacactgctttgacgaatacttcgccaatgcatcttctgtcagtcattatgaagggatcagagcgcaaaattatttagaagagtgcagggccattgtggcacaaatgattggggctaatgcggaatttatcactttcaattctggtgcttctgaagcaaataacacggttattcgagcggtgtctgattacttcttacacaccggcaaggttcatatcattaccagttcgatcgagcacgaatgcctgctaaaagtttgtgagtatgtcaggcgacacggtgtcgacattacttttctgcctgtcgatcgtctgggacgcgtctccattgaggctctaaaagaggctatccgtccagaaactcgactaatttctgtcatggcagcgaataatgaaactggtgttctacagcctctggatcaaattggaattatagcgcgccagcacggtatattattccatagcgatgccgcccagctcgtggggaaactccccttctcggtgacacagtccagccctgattttgtcagtttttcagctcataaattctatggccccaaaggcgtcggcgcactctacagctcacggcctgacatcctccggcactcgccactcattcatggaggaggtcaggagtcaggcatccgtagcggcacagtgaatcttccggctattgctggaatggcaaaggctgctgagctgtttatctcctcatatccgcagcgcattgcgtttcaaaaagagatgaagagttattttatcgatctcctcgaatcaataatgccggacgttgtgataaatggctgtaggacgcaaagcctgcctaataccgtgaacttctctttgcctggcattaagtccagtatgcttctgaaaaaactcaaaatgaaagttgcgctcagtagtgcctcagcctgtcattcaacggaacaaaaacccagccatgttttaagcgctatggggctgaatgatgccttgcttcaaggggcaattcgcatgagctttagccatatgacggagcgtgaagaacttaaaacagcagtggagttgcttgccggtacagcacagcgcctgggggggattaaatga

SEQ ID NO: 178268 - DNA, 843 bp, Klebsiella oxytoca
atgtcattagaaaaggaaatagtacctaaaggtgattatcattcttccctggaagttatagtcgaaaatagttacgccacaagtgccggtaagctcgttgtctacctcgaaggcggtcatttcaatcggcaatttggcgcagacgagtttgcgcttaacacgctatctgatgccgttgctttcggaaaaaaacttatcagtaaatatcaaaaaaatatcaaactcgtttacggtattctggtagacgatctcgggattgcctgttctgaagatagctgtactctccctcaactcgaaaagatatcagaaccgcaaacggctggagaacttcctgaggaaattgaattttttatccaaaaaaatactctcatcaaacgcgataaattaatggttttttccgagcgaaccagtaaaaatcggtccatcgaaagtataaaaaagaaactcaaggacaatacggaaggattattgattactgaaaatggatctcatactgaaataaagttatcagtccctgatgtcattccttttgtcttagcaagaaaaaatggtgacgtttttactgctaaatgtccagctatcattttccaacactataaagatatacttttcaaactgaaacagcgatttacagaagcccgtgactttgtgatcatcgactggtctgatttttcagatcacaataaggtggtacaaggccgcaccgcattaactgttatgcaaaaaccgcaaaatcataatctcaccatcgctaatatattttttggcgatgatgaaggccacatcgctaaaatggaatacagtgccgtatcgtctataaaagcagaccctatggttgtctaa

SEQ ID NO: 178269 - DNA, 1407 bp, Klebsiella oxytoca
atgtcatcacaacgtgaaattcgtctgaacgcttttgatatgaactgcgtcggccatcagtcgccggggctgtgggcccatccgcgcgaccgctcctggcagtataaagacctcgagtattgggtcgacctggcgcgtctgctggagcggggcaagtttgacgggctatttatcgctgatgtgctgggcgtctatgacgtgctgaacggcaacggcgatgcggcgatccgccaggcggcgcaggtgccggtcaacgatccgctggcgctgattacgccgatggcgctggtgacggagcatctgggattcggcctgaccgcttcgctctcttttgagcatccctatccgttcgcccgccgtctttcaaccctcgaccatctgaccaaggggcgagtgggctggaatatcgtgacctcctaccttgagagcggggcgcgtaatattggccagaaagcgcagaccgaccacgacgcccgctacgactacgccgatgaatatctggaggtggtctataagctgctggaggggagctgggaggatggcgcggtgctgcgcgacagggaacgtaagatcttcagcgatccgcgaaaaattcacccgattaaccatcaggggaacttcttctcggtgccggggatccacctctgcgagccgtcgccgcagcgtacgccggtactctatcaggcgggcgcctccagccgcggcaagcagttcgccgccggccacgcggagtgcgtatttgtcggcgcgccgtcgaaagtgctgctgaaaaagacggtggcggatattcgccgtcgcgccgaggaggccgggcgcgatccgcgcagcatcctgatcttcaatatgcagacggtcatcgtcggcgaaaccgaccgtgaagctcaggctaaatggcaggagtataaaccgtacgtcagctacgaaggggcgctggctctgctctccggctggaccggcatcgaccttggtcagtatcagccggatcaggtgctggagtatctgcataccaacgcgattcagtcgatggtagaggcgttttccaccgccgatccgaacagccagtggaccgtgcagaagctggcggactgggcggggatcggcggcttcgggccgctggtggtcggcagcccgcagacggtcgccgatgagctgcagtcctgggtcgaagagaccgacgtcgatgggtttaacctcgcctatgcggtgacccacgaaaccttccgcgacgtggtggatttgctggttccggagctgcaaaagcgcggcgtgtttaagcaggagtatcgcgagggaaccctgcgcgagaagctgtttggcgccggcccgcggctggctgcgccgcatccgggcgcaggctatcgctacggcgcgcaggtcgcggtcggaagtgaagaaaaggtgagttaa

SEQ ID NO: 178270 - DNA, 1236 bp, Klebsiella oxytoca
atgctgcacccgcgcgccagaacgatgctgttgttatcgatacccgcaatcgtgattggtattgctgccagcctggtcttgattgtggcgatgaaaacggcagccatgctgcagaatattctctggagtagtctgcctggattgctgggtatgaacgccagcggccctttctggacgatagctatcctcaccggcaccggcatcgccgtgggtctggtcgtgcgttttagtcctggtcacgccggacccgatccggccaccgagtcactcattggcgcaccggtgagtcccggcgctctgcccggcctgctcgctgcgctgatcgtcggcctggcgggcggcgttagcctcgggccggagcatcctatcatggtgattaatatcgccctcacggtggcgcttggctcccgccttttcccacgagtcagcgcgctggactggacgatcctggcgtcctccggcactatcggggcgctatttggcacgcctgttgccgcggcgctgatcttttcgcaaacgctgaacagcagtaacgatgtcccgctttgggaccgactcttcgctcccttacttgccgcggcggcgggctctctgaccaccgggctgtttttccatcctaacttttcgttacctattgcgcactacgagcggtggcagcttgtcgatatctttagcggggctatcgtgacgctgattgctattgccgtcggcatggttggcgtttggtgcctaccgcgcctacacgcgctgatgcagcggctgaaaaatccgatcttaaccctcggtattggcggatttttattggggatcctgggcgtcgtcggcgggcatatcacgctgtttaaaggcctggatgaaatgcagcaattagccttcagccagaccttaaccgccagcgattacatgcttattgctttggtgaagctggcggcgctggtactggcggccgcctgtggttttcgcggcggtcgaatttttccggcggtgttcgtcggcgtcgcgctaggcctgatgcttcacgcgcacgtggatgccgtgccggcagccatcaccgtttcctgcgccatcctcggactgacgctggtagtgacgcgtgatggctggttgagcctgtttatggcagcggtcgtggtgcccgattccacgctgcttccgctgctgtgtatcgtcatgcttccggcctggctgctgctggccggtaaacccttgatgattgccaggaagcgtggagattaa

SEQ ID NO: 178271 - DNA, 1188 bp, Klebsiella oxytoca
atgaacctgacgcaacgtaatggcacgatgctgctggtactggtgcttatcggtatcaatatgcgtccgctgctgacctctgttggccccctccttccgcagatccagcaggcaagcggcatgagcttcacgcttgcctctctgctcaccgcgctaccggtgatcgccatgggtctgctggcgctagccggcggctggattaaccgtcatttcagcgagcgtcaaagtatctccctcagcctgttaacgatcgtcgccggggctttacttcgcgaactggcgccaaggagcgcgctattactcagcagcgcgctccttggcggaatcggcattggtattattcaggcgcttattcccgcggtgataaagcgtctttttcatcgtcggacgccgcaggtgatggggctctggtccgcggcgctgatgggcggcggcggcctgggcgccgcattcacgccgtggctggcgcagcatagcgctatctggtatcacgcgcttgcgtggtgggcattacccgccgccgccgcgctcctctgctggtggccgctaagccgaacgttacccgcccggacgccatcaacaacccgggtcacgctttttcgccatcgtcgcgcgtggacgcttagcctctattttggtttgatcaacggcggctatgccagcctgattgcctggctgccgccttactatatgcagtcgggctacagcgcgcagttcagcggtaccctgctggcgttaatgaccatcggccagaccggcggagcgctcctgctgcccatcctggccagacatgaggatcgacgaacgcttctgatgctggcattggccttacagcttgtcggcttctgcggttttatctggctaccgcagcaggtaccgcttgtctgggccatctgctgcggtattgggcttggcggcgcatttccgctgtgtctggtcctggcgctcgatcacgccaggcaccccgccattgcgggccgactggtcgcgtttatgcagggagtaggctttattgtcgccgggctttccccctggctgtcgggactgctgcggagtttaagcggcaattaccagctcgactggatgcttcacgccgcctgcgtcctggccttaatggccataacgctgcgtttcgctcccgcacgctacccgcaagagtggcaacatcaggattcagccgctcgctaa

SEQ ID NO: 178272 - DNA, 933 bp, Klebsiella oxytoca
atgctgccgcgacatctcaactactttattgccgttgctgaacacggcggctttacgcgagcggcagccatcctgcatgtttcacagccggctttgtcgcagcagattcgacagctggaagagactctgggggtacggctttttgatcgcagcgggcgcaacacttgcctgacggacgccggcaaggtctggttgatttatgcgcgccgcgctttacgggaactggccgaggggcagcgcgcgctccatgacgttgaagatttgcagcgcggtaccctacgtgtagcgatgatgccaacctttacccattattttatggggccgctggtggcttcgttttatcaacgttacccgaatataacgctggatatacaagagctggcgcagaatcgaatggagactctgctgctcaatgatgagctggatatcgggatcgctttcgacggtagcgattcacgggatattgtgtctcagccgctgctctctgaaaccctggcgctggtggttggccgctctcatcctctggcggcgacccgccgtgtggcgctgacggcgctcaatcaggcgtcactgattctgctaagcagcgcttttgctactcgcgagcaaatcgatcgcgactgccgacagcgcggtattcaaccgaaagtgcagatggaggccaactcgattagcgcagtgctgaccgtggttgaacgcacgtcgttggcaaccttgcttcctgctgccattgttcaggggcgtgacgatttaaccgcgatcgaactcgcgccatcattactggaaagaaccgcgtgtttgatacagcgaaagggggcctggcaaagcgccgcgacccgagagtttatactaatggcacatcaggctgcgtcaatattgagcgcaggacagggatttaacgaatcgactgagagagatttaacgttacgttga

SEQ ID NO: 178273 - DNA, 456 bp, Klebsiella oxytoca
atggagatcttagaaacacctgaagacattattactgagcagaggataagcatcatatcaccggccaccaatgtcctcttctgccacttcatacccgacgaggatgagaggccaaccatcacgctgagtaagctttacatcacgagtcaggcgattgagaaaatttatgaacataccatcagcagccgccctctcgaactttctgaaaaaaccttacatttatctgaggagcaagatatagcgacgccctcaacgattatgcaaaataagttgctcattgaatttatcaatcacatcattcaatccaatccccattttggcgataacatgcttaacgcgactgaaaacaaaaaaagtaaaatatttaatagagctatggataaactcaggtctgaaggcgtggtttccagctacggcagcattaatcttccggcgtcagaatatacgttcgaataa

SEQ ID NO: 178274 - DNA, 255 bp, Klebsiella oxytoca
atgatgaaaaaactcgcaatggcactgggtatctgtgcgcttatggcttttggcgctgccagcgcggcaaatggtcaggtcgtttcaaaggcgaaatcagcctgccagaacaacgcaacgcagtgcgcccaggcaaaatccacggcgaaagcggatgcgcaaaaagaagcaaaagcagccaaagacgcctgtgctaaaaaccaggcagcatgcgacaacgcaaaaactgcggccaaaaacgcagtgaaaaagtaa

SEQ ID NO: 178275 - DNA, 336 bp, Klebsiella oxytoca
atgaagataagagaagtactgatgactattgctgtgctgtatccggtagcggggtactccgcgagttttgattgtcagaaagcgacgcaggcggatgaaaaggctatctgcgctaaccggagcctgaacgatatggacgtggtgatggcgacgaagtatcagtttctgcgggggctttttccaatggggacgcgtggcgagatgatggatgcacaaaaaacatggctccatagccggcagaaatgcggcagcgacagccgttgtttgacgaaatcatatgaagaccgcttacggcaacttgatgaaatctatgcagggatcgataaacctctgtga

SEQ ID NO: 178276 - DNA, 897 bp, Klebsiella oxytoca
atgaaaccgcaaactcaccatgataatgaggatgttgaagtagagagtgaagaaaagcagaatggtgaagaaattgaggttgatgaagaacgcctgccttcacaggcgatggccactcatgaagtgattcgccaggagggcgagaaagagctcgaacgcgatgccatggcgctattatggtcagcgattgctgccgggctttcaatgggggcctcgctggtcgccaaaggtatcttccatgtccatctgaacgaacttcccggcggcttcttgctggaaaatcttggttatacctttggttttgtgatcgtcattctcgctcgccaacagctgtttaccgagaacaccgtcaccgccgtcctgcctattatgcataaacccacgccaggcaacatcggcctgctgttacgtttatgggggattgtgctggcaggtaacttaatcgggaccgctatcgcggcttgggcgttcgatgttatgcctgtgttcgatgagcccactcgcgaagcctttcttaaaattagcctgaaggtgatgcaaaacccgccgctggagatgtttgccaatgcgattatctccggctggctggtcgccaccatggtgtggatgtttcctgccgcaggttctgcaaagattgtcgtcatcattctgatgacctggcttatcgccctcgcggacaccacgcatattgtggttggcagcgtcgagattttctacctggtatttaacgggacgctaccgtggcaggaatttatctggccttttgctctgccaacgcttgccggcaacatatgcggcgggacctttattttcgctttattaagccatgcccagattcgcaatgacatgagtcacgagaagaaagctcgtgcagccgaggaggcaaaaaagcgctaa

SEQ ID NO: 178277 - DNA, 1365 bp, Klebsiella oxytoca
atgagccagaaaacccgccttacccaatctgcccttgcagtggctgtagcactcgtttcaacccaggcctggtcagcaggctttcagctaaacgaattctcttcatcgggccttggtcgcgcctattcaggtgaaggcgctattgctgatgatgcgggaaacgccagtcgtaacccggcgttaatcatgatgttcgaccgtccaaccttctccggcggcgctattttcgtcgatcctgatgtcaacgtcaccggtagttcagttatcggtaatgacgccagccaggacaatattgcgcctaccgcatgggtgccgaatctgcacttcgtggcgccgattaacgaccagttcggttggggagcttccctgacctctaactatggtttagccaccgagttcaacaacgattttgccgcgggctcgatgggcggtaccaccgatctcgaaacgcttaacctgaacctgagcggcgcttatcgtctcaacgaccactggagttttggtctgggctttgacgccgtgtacgctcgagcaaaattagagcgctatgcgggtgatttaccggaaattatcggcgcacagctaccgggaatggtgaaagccggcaaactctccccggctcaggctgcggccatcggtcaacaggccggcggtatcagccgcgacacccaaattgctcgtctgaagggtgatgaatggggctttggctggaatgccggtattttatatgaagtcgataaaaacaaccgctatggcttaacctaccgctctgaagtcaaagttgattttgacggggattacaagagcagcctgccgtcgtcccttaaccccatcaactccgctctgggactgggcctgccgtacggcaccggcggctccacgattggcggttctctgacgttgaatctgccagaaatgtgggaagtatcaggttataaccgcgtggcgccaaaatgggccgttcactacagcctggcatacaccagctggagccagttccaggagctgaaagcgaccaaaaccagcggtggtgaaacgctgttctacaaggacgaaggttttaaagattcctaccgtatcgcgctgggtacgacctattaccacgacgataactggaccttccgtaccggtatcgcctttgatgatagcccggtcccggcttccaatcgctctatctctattccggaccaggatcgcctgtggctcagcgccggtacgacttacgcctttaataaagatgcctcagtcgacgtcggtgtgtcttatatgcacggtcagcacgttgaatttacagaagggccgtatacatttaaatcagaaggtaaagcctggctgtacggcgcgaacttcaactaccgtttctga

SEQ ID NO: 178278 - DNA, 1989 bp, Klebsiella oxytoca
gtgaaacaaaacgccatacaacccgccaacctggaattcaacgctgagggtacacctgtttcccgagattttgacgatgtctacttttccaatgacaacggtctggaagagacgcgctacgttttcctcgacggaaaccagctcagggaacgcttccctgagcatgcacgtccgttctttgtggttgccgaaagcgggttcggtaccggcctgaatttcctcacgctgtggcaggcgtttgacgtttttcaccgcgataatccagaagctaccctgcaaagattacatttcatcagtttcgaaaaatttccgctgaaagcggaggacctgcgccttgcccaccagcgctggccggagcttgcaacctgggccgagcagctgcaggcgcagtggcctctgcccatcgcgggctgccatcgtctgctgctggatgaagggcgggtcacgctggatttgtggtttggcgatattaatgaactgaccaacgagctcgatgattcgcttaatcagcaggtggacgcctggtttcttgatggctttgccccggcaaaaaacccggacatgtggacggcggatctgtttgcggcgatggctcgtctggcaagacccggcggtaccctggccacattcacctccgccggctttgtccgccgcggcctgcaggaggccggtttcagcatgcagaagcgcaagggttttggccgcaagcgcgaaatgctgaccggcgaaatgcgtgaaacgccggagatccccgcgcgcgcgccgtggtttgcccgcagcggtacggaacagcgcgatgccgcgattatcggcggggggatcgccagcgccctgctcgcgctggcgctgctgcgccgcggatggcaggtaacgttatactgcgccgacagcgcgccggctgaaggcgcatccggaaaccgccagggcgcgctctatccgctgctcagccagcacgatcccgccctggcccgcttcttcccggcggcatttactttcgcccgccgcgtgtatgacgctctgccggtgatgttcgatcatgactggtgcggcgtgacgcagctgggctgggatacgaaaagcgcgcagaaaatcgcccagatgattgcgcttaacctgccgccggaaatcgccgtcgccgtggacgcccgaaccactgcgcaacaaaccggtgtggaaaccggctgcgggggcatcgcctatcctgccggcggctggctttgtccgcagcagttaaccgctgaactgctggccctcgccgccactcgcggattgcacgtgcgctacgattatccggtcacggagctcagcgcagacaacaacggctggcaattaaaccagcggcagtaccacgaggtcgtggtgctggccaacggccatcagctgacccgctttagccagacggagcatcttcccatgtatccggttgccggtcaggttagccatattccgacgacgccagggctatcgaaattgcgccaggtcctgtgctacaacggctacctgacgccgcaaaacccgcataatcagcaacactgcattggcgcaagctaccaccgcggacaggcagaggccgcgtttagcgccgaggatcagcagcagaatcgccagcgcctgattgactgtttcccgcaggcggaatggacgcgggaggtagacgtgagcgctaatcaggcccgcagcggcgtgcgctgcgcaacccgcgatcatttgccgatggtcggcagcgtacctgattatgaggccaccttacgcgaatatgcctctctggctgaacgtcaggagcaggccggagaagcgccggtttaccgcaacctgtatatgctgggcgcgctgggctcgcgcggcctgtgctccgcgccgctggcggctgaaattctggcgtcgcaaatgagcaatgagccattacccatggataaagaaacgctggcggcgctgaatcctaacaggctgtgggtaagaaaactgctgaaagggaaagcggtgaaataa

SEQ ID NO: 178279 - DNA, 444 bp, Klebsiella oxytoca
atgctcaagacttggctctctgatgccaccatcgcgctgcggcaaagcgtagagacctggccacaggcgctggacatctgcgcccggccgctgctgaaggccgacgttatcgaacctgcctacgtgacggccatcgtggagcagcatcagcggctcgggccgtactacgtgctggccccgggactggcgatgccgcatgcgcggcctgaggagggcgcgaagggcctggggctgtcgctgttgaaactgcaacaaggggtatcgtttggctctgaggagttcgacccggttgatattattattatgcttgcggcgccggataaacatagccatatcgaaatgatttctgccctggcggaattattttccagcgatgaagatatgaataaattacatcaggcaaccaatattgaggagataaaaacgatcatcgcgcgctactga

SEQ ID NO: 178280 - DNA, 537 bp, Klebsiella oxytoca
atgaaaaaaacattacttgctgctgttgtcgccggttgcgcggcgttctctggtgctgcgctggcggatgacggtcaggtgaagtttatcggcgatattatcgatgcgggctgcgacgtggtgaacgacctgtccaacccgctggaagttcagatggggcagattgccaagaccgcgtttagcggtacggggtctactgcggctgaacagaatttcgcgattaaactggaaaactgcccgactaccgtcaccaaagcatcggtactgttctccggcgctaacgtcaacggtgataatgataaactgcagctgaccggagcgggtaccgatcctgacgttgccgcaggcgtagccctgcagctggttgacgccagcagcaacgcgacgctgccgctctatacgcgttctgccagcctgaccatccccgctaccggcaatatcgatctgccgttccgcgtccgttatatccagactgaaagcactatcgttgcgggtaaagctgacggtacagccaactttaccatcagctataactaa

SEQ ID NO: 178281 - DNA, 2550 bp, Klebsiella oxytoca
atgaaaaataatcataataaatggcggcttaaccggatagccggcgctctggccgttgcgctgctaccgctgtgtgaagatgtcctggcgcgggaggtttttaacccggccctgttggaaatggacggcccgcatacgggcgtcagggatttatccgcttacgagcaggctggcggacagctgccggggacctatcgggtagatatttatcttaataatgtttttatggacacccgcgatgtggtttttcagcagagcaaagggccgggaataacggaattacagccttgcctgacggtagacgatttggccgaatggggcgtgcgcgtctcccaatttccagagctgggccgcagatcgcccggctgcgcggatatcagcgtgataccgcaggcaaaatctgattttcgcttcagccagcagcgcctgctattgagcttcccgcaggcggcggtgaccagcgccgcccgcggctgggtggatccgaaacagtgggatgagggggtgccggcgatcctgctgaattactcctttagcggggcaaataactggtcacgtcagaacgatacgccggacagcgataatcaatacgttaacctgcgccccggtatcaacgtcgggccgtggcgtttacgtaactacacgacctggtcgcgcagcagcagcgggggagagtccagtaatagttgggacacggtttatacttatgcgcagcgcaacatcaaatcgctacagggggtgatgacgctgggcgatagcagcacggacgccgacgtttttgagggtgttccctttcgcggggcgatgctggcttccgatgacgatatgctgccggaaagcctgcgcggctacgcgcccgtcgttcgcgggattgcgcgcactaatgctcaggtcattattcgccagaacggctatgagatttaccagacctacgttgcgcctggcgcttttgaaattaccgatatgtacccgaccggcggctcgggtgatttagccgtcaccatcaaagaggcggacggcagcgagcagaacctgatcgtaccttacgcttcgctccctgtcctgcagcgcgaagggcggctgaaatatagcatgacctccggcgtgtatcgcgcctacgacaacagcattgacgaaacgcccctcacgcaggcgacggcaatctacggcttgccctgggggttaaccctgtacggcggcggccagtttagcagtaagtaccagtcggtggcgctgggaatggggaaaaacctcggtgaactgggcgccgtatcgaccgatatcatccaggcctggtcgacccgacaggataaagataaagagagcgggcagtcggtacgtctgcgttacagcaaagacctcccgggcctggggactaacgtaagcctggcgggatatcgctatgcgaccagcggttactgggatatgcaggaagtactggatacctatcgggatgacaactacacgccttctattgaacggaggcgcaaccgcggggaggtgacgatcagccagagccttggcgaagaaatgggatcgctgtcgctgagctatattcgcgaggactactggaataccggccgcactatggagtcagtgggcgtcggatacaacaacagctggcgcggtatcagctatagcatgaactacagctataaccgcaatactaccgaccagaacaccggtaaacgtaatgacgaagatcacctctttgccctgagcatcagcgtgcctttgggggaatggctaccgaagccggtttatgccaactactccctgaacagcagcaaaaatggcgccaccagcaacaatctgggcctctccggcaccttgctggagcgtaataacctgagctggagcgtgcaggaaggctacaccagccagggaagaggggagagcggcagcgtcaatgcggactggcgtgcaacctatgctgaacttaccggcggctacagccatgataaatacagccatcggctgaactactccctgcgcggcggagcgctggtacatgaaaacggcctgacgctggggcagcctttcggcgaaaccgtcgctctcatcagggcgcccggcgccgccggcgtcggcgtgaatagccagacaggggtcagaaccgactggagagggtataccgtcgtgccttacgcctcgccgtatcgtaagaatatcctgacgctcgataccacgacgatgccggacgatgtcgacctcgagttggcgacgcagacggttgtgcctacccgtggggcggtggttcgcgcaaattatgccaccagcgtgggtaaccgggtactgatgacggtacgccaggagaacgggcaacccctgcctttcggggccatggtcagcgtccccggggcggcatcctctgagcaggcgttcatcgttggcgatggcggacaggtctacctgaccggactggaatctaacggcgtactcaacgtgaagtggggctccgggacgcaagaccgctgccagatccactatgcgctgccgtcagcaaaagaacttaccggcattattgtggcccaggcgcaatgccgataa

SEQ ID NO: 178282 - DNA, 1041 bp, Klebsiella oxytoca
atgaaacgattttcatggggaatattagcgggcctgacggcgctggcgatctcgccgcaggcgatggcggcaaccgggtggtgtcagaataccggtaatggcggggcgccttttcaggatagcttttcatttattgaaagctttactaatccctcacaaaatcaggccggaatggagttttcccgtttgtaccactggagtaccgggggaacctacaaggcaaagtgtgactgtgatagtgccagcggggtgacgtattttaaagccacggtgccaggccttaccgcgacgcaaagccgcaacggattaaattattaccagctaaataaatacctggaaattgccaccgagttatttattgcagggggcgtgaataagtatattcctacgccgattgaggataagagtaatcagaataatcaaggttttgcctgtaatcccggtggctccatttttgacacagggtcactgggatatatttcgctttattttacccggccttttgttggccaggtgacgatccctccgacggttatcctgagtgtttacgggacgcgaaaaacgggcagctacagcggtatccccctgacgcaaatttcaatgagcgggtcggtaacggttccgcagtcctgcgagattaataccggtaaagcgattaatattgattttgaggatattgccgccaaccattttaaaaccgcgggccagatgccgaagggcttctctccacatgttgttaatatgacggtggcctgtaccaatatttctgccggggtaaaaatcgcgctgtcgttccagggaatggcggatactaacgatagcactgcgctggcgaccaccaatcgcgacattgcggtgcgcattgaaaatattaccggcgtcaaaataccggtcatttcaggtctgctgccggtcaattttaattacccgagtcagaccggggacaccactatgaaaatttatccgattaataccaccgggaatttacccagcggcggaggctttaccgctacggcaaccattcaggcagaaattgaatag

SEQ ID NO: 178283 - DNA, 759 bp, Klebsiella oxytoca
atgacgctgcacgcggtggctgaaagcggcctgccgggctatccctggctggtctttttgcacggttttgccggggatagtcatgagtggcgcacggtggggcaggcgtttggcgcgtatccgcgtctctatattgacctgcctggccacggcggatcggcgcatatcgccgtaaaccattttgccgatgtcagcgagttgattaagaatacgcttaatagttacaacatacttaagtactggctggtgggatactccctcggcggacgggtggcgatgttctatgtcagccagccgcgcgaagggctctgcgggctggtcgtcgagggggggcatccgggcctgggggatgataaccagcgtaggctgcgccggcgcagcgatgccgcctgggctgaacgctttcgccgcgagccgctgacccaggtctttgccgactggtatcagcagccggtcttcgcttccctggacgcagcgcagcgggcggcactggttgcgctacgcagccgcaataacggcggagcgttggcggcgatgctgcaggccagctcgctggcggaacaacccgatctgcgcgcgtcgttacgggcgcgcgatttcccttttcattacctttgcggcgaacgcgacggcaagtttcgcgccatcgccgatgaactctccgccaccgcgcacgtgattaatcatgccggacacaacgcgcatcgggaaaaccccgatgctgtcgtggcttgtctggcgcagtttttagcgagttaa

SEQ ID NO: 178284 - DNA, 1392 bp, Klebsiella oxytoca
gtgacctttagcgactggccctggcgccactggcggcggctgcgagaagaggctcaggcgctgcgcctgaacgagcggcggctaagctggcgggaactgtgcgcgcaaattgatgcgctggcggtggaattccacgcccagggcgttcgcgacggcgatggcgtgctgcttcgcgcttacaaccagcccgatgctctgctggcgtggctggccctcctgcagtgcggcgcgcgcgtcctgccgctgaatccgcagctgcctgctcctctgttggcggaactgctgccgtctctgggactgcgccacgcgctggtgctaaacggcggcgaccttccggtggcgcttaattcattagcgttgtgcgccggcgacggcgtgcacgcggtcgcctggcgagaagatcgtatcgcgtccatgacgctaacctcggggtcgacggggctaccgaaagcggcggtgcacgcttttcgcgcccatcttgccagcgcagagggcgtgctggcgataataccctttgcgccgcaggacgactggctgctgtcgctgccgctgtttcacgtttccggccaggggattctctggcgctggctgttagctggcgcaggcctgacggtacgcgacaagcagccgctggaacaggcgttacgcggctgtacccatgcctctctggtgccgacccagctttggcgcctgctcagcggcgacgccgaggtgtcgttgaaagcggttctgctcggcggcgcggcgatcccggtggcgctaaccgagcaggccggtaagcgcggtatccgctgctggtgcggctacggcctcaccgagtttgcctccacggtatgcgccaaggaggcggacggcctggcggatgtcgggcagccgctgccggggcgcgaagtgcggattgtcgatggtgaagtgtggctgcggtcggacagcatcgccgcaggctactggcgcgatgggcaaatggtccccctcgctaatgccgacggctggttcgccactcgcgatcggggccggctggagcacggcaggctgactatcctcggacgagtggacaacctcttttttagcggcggagaaggtattcagccggaagaagtggagcgggtgattggcgctcatccgtggattacgcaagttttcatcgtgccgcaggatgatgcggagtttggccagcggccggtggcggtggtggagtgcggcgagcatgacgacccgtccgcgctggcgggctggtgcgccgataagctggcgcggtttcagcagccggtgcgttggctgcggctgcctgaatcgctgaaaaccggcggaattaaaatttcccgccgggcgctacgtgactgggtcaaccagcaggcgatgcccgactcagacgcgctggacgttcagtag

SEQ ID NO: 178285 - DNA, 1107 bp, Klebsiella oxytoca
atgagagttaatggacttacgaaaggatttttcatcctgatcgtgctgatcgtcacccttgcttttttcgacgttctctccccctattattcagccattttatgggcggccattctggcggtgatcttccacccggtgaagaacaaactgcgcgatcggatcggcgagcgtaacggcctggcggcgtttctgacgatagtgattatctgtctgatcgtgtttaccccactggcgatcatcctctcgtcgctggccttcgagctcaacgtggtttacaccaaactacagcataacgacacccagttcccgaccgtggtagccagcctgtttgctcacctgccggaatgggcaaggagcttcctctcagagcataatcttgatagcgcggaacagattcagcggcagctttcggacgttgcgcttaaaggaggccagtaccttgccgggagcgcattcctgattggtaaaggcacgttcggttttaccatcagcttcggcatcatgctttatctgctgtttttcctgctaaaagatggtccatacctggtcaggctgattctggaatccctgccgctatcaaatcacgtgaagcagcatcttttcgccaaatttgccgccgtcgccagggcgacggtcaaaggcaccgtggcggtcgcgctcgcccagggcgcacttgggggactggcgttctggatcgtgggcattgatggcagcatcctgtggggcgcgctgatggcgtttctgtcgctgatcccggcggtgggttcggcgattatctgggtgcctgcggcgatctatctcttcgcgaccggtcagctctggcagggcgcgtttatcgtcggtttctttgtgatcatcgtaggcctggttgataacattctgcgacctttactggtgggtaaagataccaaaatgccggactatctgatcctgatcaccacgatcggcggaatggaaatctacggcatcaacggctttgttatcggcccgctgatcgccgccctgtttatcgcctgctggaacctgctgtccggacgcgatcacgccggaaacatcgatgagcttgatgaggatttcttagaagagggtaaaaatcacgaggagtag

SEQ ID NO: 178286 - DNA, 1251 bp, Klebsiella oxytoca
atggacatcatgagaagtcttctggggatggtggtgttgctggccattgcctttgcgctgtcagtcaataaaaaacgcatcagcgtcagaacggtaggggcggcgctgctgctgcaaatcatcattggcggggtgatgctctactttccgccgggcaagtggctggtcgagcaggccgcgcttggggtacataaagtcatgtcctatagcgacgccggaagcgcgtttatttttggttcactggtcggcccgaagatggacgtgctgtttgacggcgccggctttatcttcgccttccgcgtgctgcccgccatcatttttgtcaccgcgctgataagcctgctttactacctcggcgtgatggggctgctgatccggattctcggcggcatcttccagaaggcgctgaatatcagcaaaattgagtcttttgtcgccgtgaccaccatttttcttgggcaaaatgagatcccggcgatcgtcaaaccgtttatcaacaagctcaaccgcaatgagctttttaccgcgatttgcagcgggatggcgtcgatcgccgggtcgatgatgatcggctatgccggtatgggcgtgccgattgattatctgctggccgcttcgcttatggctatccccggcgggattctgtttgcccgtatgctgagtccggcaaccgaagcatcccaggtcactttcgacaatctctccttcaccgagacgccgccgaaaagcgttatcgaggcggcggcgtcaggggcgatgaccggcctgaaaattgccgccggggtggcaacggtagtgatggcgtttgtggcgattattgctctgctgaacggtattatcggcggcattggcggctggtttggctacggtcacgccacgctggagggaattttcggcttcctgctcgcgccgctggcatggattatgggcgttgactggagcgatgcgacgctggcgggcagcctgattggccaaaagctggcgataaacgaattcgtcgcctacctcaacttttcaccctatctgcaagctggcggcaatctggacgtgaaaaccgttgcgatcatctcgttcgcgctgtgcggtttcgccaactttggctcgatcggcgtggttgtcggggcgttttcggccatttcaccgcagcgcgcgccggagattgcccagcttgggctgcgcgccctggcggcggccacgctctctaacctgatgagcgccaccattgccgggttctttattggcctggcataa

SEQ ID NO: 178287 - DNA, 159 bp, Klebsiella oxytoca
atgaaggtaccgcccaacgtcccgatctggtgtctgctcatcgtgtgtatcacgctattagcgttcaccctgatggtaagaaaatcgctttgcgaaattcgctaccgcgatacgaacagggaggtagctgcttttatggcttacgaatccggtaagtag

SEQ ID NO: 178288 - DNA, 303 bp, Klebsiella oxytoca
atgttgtctaggcatcgggacagcctcgtgggtgattacattaccttcggggctttcttctttctgcctcagcacaacggtaaaactcaatcctgctctgaggcgaaagcctcaagcgccgccaaaaatcatacccgccgacgacggaaaatacactatctctctgtatatattaatttttatgactattggatgctgaggcattttgcgtatcaatgcgccgggaaggtgattcacgacgcattgaaaggatcaggagaagaggtgccgggcatggaagcgcaggtggtcctcaataaatga

SEQ ID NO: 178289 - DNA, 1158 bp, Klebsiella oxytoca
gtgaccactcgttactgtaaccgggttgcgctgctgctggcattcctcctgctgctggcgatggcgctgccgtttatcaactatgcgcctaaccggctgttatccggcgaggggcgctggctatggcaggtctggccgtggctggcgggcgtactgggggcggcagggctgctgatagcgctgctgagctggcgtcccgggcgtctcccactgctggttatcttcctgctggcggatctgctgctgcctttattgctatggggagccggcagtgcggcggtacagctggctcagagcggttctccgctggcccgcacctcgccgggaagcggcctgtggctggcgctggccctgtgcctgcttatcgccagcgatgccgttcgtcgcctgacgacccgagccctgtggcgctggctgctgaacgcgcaggtctggctgctgcccgcgctgctgctggggctcggcgcgctcgatggcctctctttgctgaaagagtatttcaatcgccgcgaggtgtttgacgatgcgctgtcccagcatgtgacgctgctgttggggaccctgctgccggggctgctgattggcttgcccgttggcgtctggctctggcgctacccccgctggcaatcgccggtttttgccgttctcaacgtgattcagaccgttccctccgtcgcgctttttggcctgcttatcgcgccgctggccgggctggcgcgccagtttccgtcgctggcgcagctcggcgtttccggcaccggcatcacgccggcgctgattgcgctggtgctgtatgcgctattgccgctggtgcgcggggtgacgatcggccttcagcaggtgccgcgcgaagcgctggagagcgcgacggcgatggggatgagcggcgtgcagcgctttcgtcaggtacagctaccgctggcgttgccggtgctgttgcgcagcctgcgggtggtcagcgtacaaaccgtgggtatggcggtggtggcggccctgattggcgcgggcggcttcggcgcgctggttttccaggggctgctcagcagcgcgctggatctggtgctgctgggggttatcccgaccatcgcgctggcggtggtggtggatgcgttattcgcgctgtggggcgcattactgaaaggagaggcccgtgattga

SEQ ID NO: 178290 - DNA, 492 bp, Klebsiella oxytoca
atggtggcctaccgtcgttattacctgaagggtggaacctggttttttacagttaatttgcgaaaccgaataagcagacttctgaccgagcacatcggaactttacgtcacgccatccttaccatcaaacggcgaaaacccttttacattgatgcatgggttatccttcctgaacatcttcattgcatctggacattacccggagacgatagcgatttctccgccagatggcgggacataaaaggttgctttagcaaagcattaaaacaagaaaatgtctggcaaccgcgtttctgggaacatgcaatccgcgatgaagaagactaccgccggcatatcgattacacctacattaatcctgtaaaacacggttgggtacgacaggtttgtgattggcctttttcaacctttcaccgggatgtacgccgcgggttatatcccgataattggggtggcgaaattcacgattttttgtgcggcgaacgccagtaa

SEQ ID NO: 178291 - DNA, 546 bp, Klebsiella oxytoca
atggcgcaacagaaatcggtgaccctggtgatcagccatgtgctcgacccggagcatggccagcggtatgaagcgtggctgggcaaaattatgccgattgcggcagagtttccaggccatcttggcgcaaacgtcattcgtccggcccccgggcagaatttatggagcgtgattattcgcttcgacaccattgagcatctttacgcctggacccagtcggagacccgccgccagctggtggcggaaattgcgccgctgctgagcgaaggcgatcgtaccgaagtccggactgaaccggccttctggtttacgccccccgcggcgaacgtgcgccagccgcgacgctggaagcaatttttaatcaccctgctggtgattttccccagtactaacctggtgccgtcaataaccggaatactgttgccctcgctgaagggaagcctgttgctgcatctgatcaatgatgcctgtgtggtcgcgctggtggtctggttctggatgcccatcgtgacccgtctgtttgctggttggttaaagaaaaactga

SEQ ID NO: 178292 - DNA, 2658 bp, Klebsiella oxytoca
atggatgatctactgatctttggcgctgtgattttattctgtgggctggtggttgggccgctcgtggcgattgccgcgctcaggcgcagcgcggcggtccgtgtggaactggcggctttgcagcgtcgggttgaggagcttgagctgcgcggcgttgcgcaggcaccggtggcggaggcaagtggcgtcgtgccgactgctccggaagtcgttgcctctgttgacgcaacagcgctggtagaacacgagccatcaccggcgcccgtggcggaagccgttgacccatggctttcgcagccgaagccaacgccgaagccggagcagatggcgaaatcggctcctgaaaccgaacaaccttccgcgtttggcgggatggtatcgtcattggttcgttggtttatgcagggtaacccgctggcgaagctcgggatcctgctgctgtttcttggcctctcctttctgctgcgctataccgtggaacacgctcttttccccctcgagttgcgtctggtcgcggcgtcgttgttcgccattgtcctgctggctgtcggatggcggttgcggcataagcaaccgatgtacgccctgatcttacagggtggggcaacgggggcgctctatctcaccgtttttggcgcctttcgcctgtggcagatgctgccgatgactctggcgtttgcgctgctggtggtgatttgcgcggcgagcgtagggctggcgattgtgcaaaaagcgctcagcctggccatgctggcgagtcttggcggttatcttgcgccgctgctgctctctaccggcggcggcagtcatgtggcgttgttctcattctatcttctgctgtcggtgggcattcttgccatcagcatccgccagcactggcgggagcttaatctgcttggcctgctgtttacctttggcgtcggtggcctgtgggggctgaatgattatcggccagagtattacctgagctgccagctgttcttaatcgccaatacgcttatttttggcgtgttaagcgtggcgctgtcgctgcgggcgcaggaaaagggtaagcagattattgacggcgttctgctgtttgcaccgccgctggtcggctttggtatgcagtacgctatcacccggcatatggaatacggtccggcgctcagcgcgctgggctacggtggcttctatctggctttagcctggctggcactgcgtcgctacccctctttagggaagccgctggtactggccgcgctggcgctcggcggcgcatttaccacccttgctattccccttgcgctttcggctcgctggaccgcgatggcctggtcgctggaggggctcgggatcctctggctgggcgtgcaacagcagcagcggcgcatgagctatagtgggactgcgctactctttttggcggttggcagcgcgctctgggcgcaggcaaatgacgccacgccgctttctttgctgctgattttcgctgtactcagtcttagctggctggtcgccgcctggctgtggcgaagcattgaagtgcacgccagtggaggactgcttttgggcgggctactgttctgggtggtggcgcttgtcggcgcatcgcagctggcgttgagtaaagactcgcagattatatttggcgtgctggcgacgctggccgcgtcggtatggtgctggcgcgcggtcgctgcgcgtttagtctggcaagagctggatgccagcaaatggttgttgtggccaatgatgctgatagtgctgttttatcagctatcccaacggcagattttcgctgctggctggcaaaatctggcctggtgcgcggcgctgcccgcggcggtggcgctgctctggcgtgatgggccttcgctcccgccgcgcataaacaggctcgcccacctgtcgctgttctggatggtgttgctggcgctggcgatggagctgttttggtttacccgggatttgccgtgggggatgtcggcctgggcgagtggattaatgatggcggcaggcggggggctgatcttccttgtctctgaagccgttcatcggcaaatatggccattccgggtatggcctgggctgtatgcctctcaggccatgataccggtggcggttgcgctgggatgcctgctaacgctgacgaacgtgcaggatggtacggtctacggtcagacctatttgccgttgattaacccgctggaagagggcgccgctttcgcgctgcttgggctgacgatattttatcgcgtttcgcggcgttattttccgctgcagctatcggtatgccgcccctggcccgcggtcgcgctgctggcgctcggcttctggtggctgaatggcctgctgctgcgcgccctggcctggtacggcgaggtggcctggaatatagaggcgctgtggcattcgcgcttaattcagaccactttcgctctggtctggacgctggcggcgctggcggtcatgctgcgtgcgacgcggcgacactcccgccgcgaatggctgtgcggcgcggcgttgttaggcgttgtcattgtgaaactcatgctggtggacagcgcgcgcggcggcgggctggcgcgcgctgtcgcgtttatcggcgtggctattttggtgctgatcgtcgggtatttttccccgttaccgcccaaagcaggagaagaaaaatga

SEQ ID NO: 178293 - DNA, 1395 bp, Klebsiella oxytoca
atgaaatggatgaaagcggtgttatgcagcgtgctgatgggcgtgacgggcgcggctgtcagcggcgatgaagcgcgagaaaaaccactggactatatgcagggggtgatgctggaaaccaccggcgcgtcgccctggtatcgcgtcgagctttccccgctgctctatcaggggacggcgtggcctgacctgcgcgatgtgcgggtatttaaccatcagggagagaccgtaccgttcgcgctgcaggtgcagaaggcgcagcccgttacgcctgaagcgatgacgctgcggcttttccctctggagatgtcgccggttccgccgcgcgaagaggggcgacgcggcggagaatcgctggtcctgcgttcaacaacggggatcgaaattcatctggaaaccgatgataggaaggcgctcgggcagagctacttactgacgctgccgacggagaaaacggacgcgtttgcgctggctcagctgcggctgaactgggcggcgctggcgggcagctggcaggggaaagcgtcggtctattccagtcgggatttgaagtactggcgccctgtccaggaggatgcgccccttatggatctggcgcgcgataacgatcgtttgaaaatggataccataagcgctgacctgacgctctccgcggacgggaatcgttacctgctggtgctcctcgattcgcaaagcaaggcggtcgtgttaaatagcgtgacggccctggccgaacgcagagagcccgagtctacgcgcattgagcttgatgcgcaggcgaacaagatttcagatgaggaagccgtttggcgctgggcccggcctcagccgctgacttcgctcaggatatcgatggccagcgaaggggttctgccggtcgcgctctcctggcgcagcggcgaaaaaaaagcctggcagccgctgaccaaaaccgtgctgtatcgactggacggcaagcgttcggaggatattcaactttcaggccagccggttgaagcggtgcggatcacaacgattaacgcccgattaccgacgtcgctgcccgcgataagcggtgcgcgagacaaataccagctgatttttaatacccagggaaaagggccttatatgctggcctggggcaaccgggcggcgccaaaggcagatgtcgccatggacatgctgataccggcgtcgctgcgcaaaacgcaggctgtaagcgatctaccgctggccgtcgcgcaggagagcgtcaccctcggcggtgaagcgcggttgacggcgacgtcggctaccgagcagcagagcggctggaaaacgctgctggtgtggggagcgctaatagtgggcgtcctggtgctggcgctgatggcgtggcgaatctggcgcgaagtgaaaaaaagcggctccgtataa

SEQ ID NO: 178294 - DNA, 1677 bp, Klebsiella oxytoca
atgaaaagctgggatgtcatcgttatcggcagcggcgccgcaggttttgccgcggcggtgaccgccagctgtaagggactgtcggtgctgatgctggaaaaagccccgcagtttggcggcacctccgccatttccggcggcgcggtgtggatccacgatagcgatcaggcgcggaaaatggccgtgggcggcagcccgcaggccatcgaaacctatctgcggacgattatcggtgagcctcattatcgtcaggatctggtggatgcctttatcgcttcagggcgcgaggcgctggcgtttcttgaaaaagagggcgcggtgaaatatagcctgcgcccgctctctccggattattacccggatgagcccggcgccgtcgatgtcgggcgggcgctcgaggtggtggagtttgacggacgggaactgggtgcacattttcgcgacctccgctctcccccaccgggaatgctgctgtttggcgggatgatggttaaccgggttgatatccagcactttctcgatatgcgccgctccccgcgctcgttcgcgcactgcggcagactgttgctgcgcttcggtcgcgatcgcctgcggtaccctcgcggtacccgcctggcgatgggcaacgcgctgatcgcccgcatggcgacgctcgcctttcgcaaaggtatgcagctcaggctcaacgtcaacgtgctttcgctgagcgaacgcaatggcgaggtgaccggcgtagaaattgagcacgagggacaaaagcaggcccttgaagcccgctgcggggtggtactggcggcgggtggttttgccgcaggcaggctggctgaacgctatcgcccccagacccgcgagcactacaccatgtcccccgccgccaacgacggcgccgcgctgcgccttgccgccgcggtcaatgcccgggaaggggctgacctgccgtctaactttttctgggcgccggtctcggttttacagcatcccgacggcacgcaagagcgcttccctcatctggtcaccgatcgcgccaaacctggagtgattgccgtcaaccagcgcgcggtgcgcttcgtgaacgaatctaactcttatcaccacttcgccagcgccatgcaaagccgggcagaaaatgcgccctgctttctgatttgcgacgccctggccatgaagcgctacggcctcggcctggcgcgccctgccccggtcaataatgacgcgctggtgaaagcgggctatctgcataaggccgatacgctgcctgaactggcgcagcggctcggcctggatccgcagacgctcgctgacacggtggctcgctacaaccgcgacgccgctcagggcctcgacccggcgttcaccaaaggcggcaacagctataaccgcgcgatgggcgaccccggccaccggccaaacgcctgtaacgctccgctgacccgcgcgccgttttatgccgtcaccctctataccggcgatctcggtacctcgcgcggcctggtcactaccgccgatgctcaggtcattaaccagcacggtgaaccgattaaaggcctctatgccgtgggtaatgatatggattcgatgatggccggaacctaccccggcccaggtattacgctcggcccggcgctcaccttcggctatctctcagccaaccatatggcgcaacaacacgcactataa

SEQ ID NO: 178295 - DNA, 822 bp, Klebsiella oxytoca
atggtcagtggattcactcaggtcgtcgccgtcatcggccacccgattacccaggttaagtcgccggagaattttaaccgcttctttgctgaccagcagttggacagcgtgatgatcccggttgatatcgcccccgaagccgttgctgactttctgcaggccctgcgcggctggcacaacatgagcggcgtcctggtcaccgttccgcacaaacagcgggccgccgccctggtcgacgagttaaccccgcgagctcagcacctcaatgccattaacgtcatccgtaagctggccgatggccgtttacagggcgatatgctagacggcgtcggttttcagcttgccgcagaggcgcacggctttagcgccgccggtaaaaaggggctgctctccggctgcggcggtgtgggcagcgctatcgcgtgggggctttgcgaagcgggtatccgccagctggccctttatgatcagaatcccgccacccttcagctgctgcataaccggctggccacccattttccgcacgttcatctcgtcgacctgcccgctacgcttgccggcctggatttgctggtgaatggttccccggcgggaatggccggtttcgagccgttgccgctgccgcagacgctgctggaaacccttccgctatccacgcatgtcgccgacgtggtgaccgccccgatcatcaccccgctcctcgccttcgcccgggatcgcggctgcgcgatccagaccgggccggagatggcgctggcgcagatgaaactgatggggcaattcatcggcgccatcgcgcaggaacaaggagcggcggcatga

SEQ ID NO: 178296 - DNA, 759 bp, Klebsiella oxytoca
atgcaaaaccagattcatacccgcgatctgatcgtcggcctgcaaaaagggctggcgctgatccagctattttcaaaagagttcccccggctcaccgtgccgcaggcggcgaaaatgagcggcctgacgcaaagcgccgcgcggcgctttttccttaccctgctgcacgagcgctatctgcaaaccgacggacgtcattactggctaacgcctaaagcgttaaggttggggcaggcgtatgtcgattcggcgcagttcccacgcatggtacgaccgatcgtggagtacatcgccagtcggacggaagagcacgcttcggtcggcgtgatagatgatgacgagctggtgtatatcgcccgcagtaaacacacgccgtttaactcgacttcagtgcgtctgggggagagagtgccgatttactgtaccgccggagggcgactatggctggcttccttagcggaaaccgagtgtgaaaccgttttgcagcggatccgccgcgagcagcgtacgccctatacggtgacggacgtggcggcgttaatggaaaagatcgctcaggttcgtcgccagggatacgccgcgattgagcaggagtttgaaattggcatgctggtcctggccgtgccgctgtcagatcgggaagggctctactggggagcgctgagtttaaccagccatcagtcaagaacctcgattgaggcactatgccgcgatcatctggatttgctctatagcgctcaggcgatgctggtgggttaa

SEQ ID NO: 178297 - DNA, 303 bp, Klebsiella oxytoca
atgaaagaattaactattggcgaaatggaatctatttctggtggttttaatgtgttcggcagcattgctaacagcatttccagcattattaataatacagcaagccatctgagcgattttattacctccgcaggtgctaccatcgccaatgccatcgttaacgataccattgcgttcggtgattacctgagcggcacatctacgtggcaggatttcgttgcctcaagcaacgaaaactggagcaattctgtgcacgacctgtcgggcgagtggaacactttcactaacagcgtcaccgcctaa

SEQ ID NO: 178298 - DNA, 315 bp, Klebsiella oxytoca
atgcagctaaaccactcggcgccgtacggggtagcgcggcggcgggattcatatctcaaagataccattgccgaccgcagtgggaaaaccgtgcttagcgatgattcgttaaacaacggaatcattagccggtatatagtgctcattttattgacagtaccagcgttaaaaccaattttaattcatctaaataaacgatggctgcaggataatgaattgctgctgatgaatctgatgcggctatttgtcgaaacgaattggcagtactgcgtgactattatcgcatcagtatggctaaacgcgttccggcagtaa

SEQ ID NO: 178299 - DNA, 366 bp, Klebsiella oxytoca
atgaaacgaggaatgaaaacgcttattgccgccgtactggtttgcgcggcggggagtcagatagcgcaggcggcgccttctgccggcaaagcgtcggcgccggtaaaggaaagcgtgcagtcgccgcaggcaaaaacaccggatgcgttaaatgcggcggatagtgaaggcaccagggtgagtatcaataacgccagcgcggaagagctggctaaggcgctgaatggcgtcggcctgaagaaagcgcaggctatagtgagctatcgcgaagagtacgggccatttaaaaccgttgacgatcttaagcaggtgcccggaatgggcaactcgctggtagagagaaatctgtcacatctgaagctgtaa

SEQ ID NO: 178300 - DNA, 231 bp, Klebsiella oxytoca
atgcaccataaacaggcagcggcgccgccgcggcctgaggtggtgcaaaatcgtcacaagctgcgcactgaaatggtgcagtttcaggcaaaagaggcattttgccgcttcgtttccgccgaattattctccttcctcctcaaaaagggccgcctggcggtcctttttcatttctggcatagcccttgctttattagagacgtgttagctgcggccattaccgaattctga

SEQ ID NO: 178301 - DNA, 408 bp, Klebsiella oxytoca
atgagtgaatcaccgcgtttaatcactaccctggcgatgccggccatcgccgaagtgaccgtttccttccgcggtttaaactttctgcgtccggaggtcatcctcgattttgtgacgattagcaataatcagctgctcgccgtcaccccggtcgcgctgctctactctaccgtcggcgtccttcagcacattgaattacgtaaactccccatcgacgtcagcggtcgcgtggtgtatccgatatcaacgcttaagcttccggcaatgcgcgcaaagctggtgattaacgcccagtcaaaacgcctgaagtttcttgaaacactgctgagcaatacggcgaatgaaaatgttcatggcatgcaggtgctgggtctggcgctggaatttaccatcgttaaatcggcctga

SEQ ID NO: 178302 - DNA, 564 bp, Klebsiella oxytoca
atgtcgcatcttatgctttcccgtcacgggatttggtactaccgtagggtctacctgacacctcggaaacgccgtgaaattcgtatttctcttcgcacacgttccaagcgtgaagccttgctccgtgtggagaaatatctcacctcacaacctttccactgcgttccgcagcccatcccggcacacactgcaaccccgtctgcttccttccaacaaccacaacagaaaaagcctttcaagagcctgaagagtgagcttgataagtacaccagcgctaaaacaggagaggttggtgaacgggaaatattgacgatcaacaggtgcgtaaatgcatatctgaattctacaaaagagccttttagcaaaagaagcgcggcggcgtttgttgatggccttgaaggttcagcatccaccagaaccgttacatcaaaaagaactcggcgtttttcaaatggcttgcaactcgcacggatgatgagattcgaaacccatttgaggggatgggtgttaaggaaacaaccgcaccaatggatcgccgaccagcctataagctcaacgatctga

SEQ ID NO: 178303 - DNA, 606 bp, Klebsiella oxytoca
atggatcgccgaccagcctataagctcaacgatctgaaacgtttacacattgctttacatggcgtgaaggattggaagcggtggatcattctgattggtcgctattcggggatgaggcagaatgagatttgccagctttaccacaatgacgtgatgaaagttgacggagtttggtgcttccgtgttgataacttaaatccaaatcagacgcttaaaacggacagttctcggcggttcgttccgatccattcgcaacttctgacgcttggtctgcttgattttatcaaagatagaaaaggacatctgttccctgagctaacgttgcatcttgggagctatggtcactatttcagccgttggtttacgaggttcagaggcaagcatagctgcctgaatatcattcactgcgccactatgccgccacaacatttaaacagaatggcttccctgaacagttcgcttcgcaggtgctcggacactcgaatgcaacgatcacgtacaatcgatacgggaagggcgttgatgtctcgcgattggttgaattggtggagtatctatgatggttgtgctggtagctttgtggggataaagtcgttatcgatatag

SEQ ID NO: 178304 - DNA, 819 bp, Klebsiella oxytoca
atgaaatttgttcttaccgagatcatcttggttgcaatagctcgtcttgttggagatgcacaggcggatacccctaggtcaccttctcattcagatttgagttatgcttttgaaagacattgcttatcacatgttgatccaaaaaatcagcaagttgtaggtaagactaaacgtgttcgtgctgtcctctcttgggcattggataacgatcctgaagctggatataaactggcattgacgcttttgcaggatgttaaagtagctggaggttttagaccagagtcgaccaactatgcgggacgcgatgccatccaaggggcaattgaagcctttagagaacaaggtctaattttgacagaagaaggctctttagttcgtcaaagtattgaaggtcttcgagggcgtgaattaactgaagcattgagaaaatatgctgatagagcgaggcgcggtgctgaagatgctgcacttctctctggaaccagtaaggatcttttggaagcaacagcagcacatgttatcacccaaaaatttgggacctatcctcaacaagctaattttcctgccttgcttggacaggcattcatcgctcttggattagccacaccagaagataagatcgaaaatcttgaagctcctcatcgtacaatggagcgggggatgtttaacactgccattggtatcaataaattgagaaataagcagggaactggacatggtaggccttggttaccaacaataaaagaaagtgaggcaaaagctgccattgagatggcgggggttatatctagctatatgattgataaacttagtaattaa

SEQ ID NO: 178305 - DNA, 534 bp, Klebsiella oxytoca
atggatgttgaaaaggcaaaagcgattgaaaacagtattatgtgcttaacgatattttcacgatccatccacacttttttcgcgctggctaacgttctagaacacttggatcgtgggactggtgatttattcccgttcaggggagtttgcaatgccttgattggtgatgcggcgatacactggtgcaaagtttttggatctgatgctgaggctactcactggaaatgtgtaatcgatgatcacgatgggtttcgaaagtttttattcgaagaactgcgaacgacgccaaccgaatttcatgcttattggaagaaaatgactgaattcagaagcaatgtaatcgcgcattttaacgctgaacatttttcgaacggttcaacacctgagtttgatacggcgattgcagcagcggcaacggcgcataaatacatgtaccgaaccttccctccaaatgtgaattacgtcgggcctatggatttagtcagttatggtaaaactgcgtctgaagcagtaatgaatcgaattttagtttaa

SEQ ID NO: 178306 - DNA, 435 bp, Klebsiella oxytoca
atgtctggaatgttagctagcacagccgccgcagtaggaatcattgataaagctgtaggaattgcaaagaaacttgcagatgatgacggtgaacttgataaggcaaccctgaaacttgaacttgcaaacctaatgagtgagcttgcaagtgttaagatggaagtcatcactacgcaggcactattgtttgaagcggaacagaacaacaagcaacttgaagaccagttaaaggacaagcagaactttcacttccgtgatggcgtttactggaaagaaggtgacgagatagcattttgcccgaaatgttatgagggggcaggcaaaaaactacacatgaggtctcaatttactgaagcagaacctgattgggggattcgagcacgcagttactggtgctgctatcattgtcatttcgaacaaaataagagcggctag

SEQ ID NO: 178307 - DNA, 546 bp, Klebsiella oxytoca
atggcgaacattggttacatcagggtatcgacaacacagcagcacacagatcgccagttggcaggcgtagcactcgataaggtctttgaagataaggcttcaggaaagaacacgcaacgcccacagtttgaagcgatgatgaactacatccgtgaaggtgatgttttgcatgttcacagtattgaccgcctttgccgtaacactgctgacctgctggcaacggttgagcggttaacagaacggggtgtagttgttcaattccacaaagaggattttaagaccgggaagaactctccggcaggaaatatgatgctgaccgtcttggcagcagtcgcacagatggaacgtgaaacgatgctggagcgccagcgggaaggttacgaagcagcaaaagccgcaggcaggatcaccggacggggcaaaggtcgctctattgaccgtgaagccattaaagcagaactcgcagcagggaaaaccattcgtgctatcgcagaaagccacaacgtgagcaccagaacggtcatgaacattaaggccgaagcctga

SEQ ID NO: 178308 - DNA, 1455 bp, Klebsiella oxytoca
atgaatattccggatgatgctttttttgctttactggagcaggccctgcgcggcaggggaggtggaaccctgcagcgtacgctctatcagacactacgcgaggcgattttgcagggggcgctggcaggtgatagccgtttacccggctcgcgcgccatggcccagcgtctgggactgtcgcgcaacaccgtcaacggcgcgctggagcagctggcgatagaggggtatttattacgtagccgccaggggacgtccgtcgcgcctttaggaactcagggagagggggacgttgaggcgcgccatattgtgctccctgaatacttacagggattaccagcggcaatccatcgtgattcacccacgctgctctttacgccgggaatgcctgcggttaactactttccgctttccatctggcgccggctcctggatcgcgtactgcgtgaagagggaagcgcattattgggctacggcgatgcgcagggagagctcgtactgcgaaaagccattgcccgccaccttgcgctctcgcgggggatccgctgtgaagccagccagattgtgattacggaaggtgcgctggaaggcgtcgatttatgcacgcatttgctgagcgtcgctggcgatacggtatgggtagaagaacccggctatccgggagcaaaaagcatctttctcaaatccggacttcatatagagggcgtgccggttgatcatgaagggatgcgttttgatagtcataatgatagtgaagtgccgcgattgatctttacttcaccttcccatcaatacccctgcggggcagtgatgagcgccgggaggcgactggcgctactggagtatgcccgccggcatgattcatggattattgaagatgattacgacagcgagtttcgctacagcggtgagcccattccggccatgctggggatggccaggcaggcgccggtggtttatctggggacattcagcaaaacgctatttccgtcgctgcgcattggctttatggtgatgcctcccgcgctggcggaggccgcacgtggcgccattggttcgctattacgcggcggccatcgggccgaacagagggcgctggcgttgttcattgaagaggggcactacgcacgtcatttagccgccatgcgccgtttataccgtaaacgtcagcagcagctgcgggagattctggctcaagagctcaggcatccttatgaactgtttggcggcgaggggggcctgcacctgaccgttgctatcgacaacgtggatgacctggcgattgtgcagcaggcccggcggtttcagctggcacccggggcgttaagccgtttttacctggatgtaaacacggcgcgaagcggctttgttctgggctacggtaatacgtccgcctcgcattttatggctgcggtacggacgctgagccgtcttattgcgctggaccgacgcgggtaa

SEQ ID NO: 178309 - DNA, 408 bp, Klebsiella oxytoca
atgcgtaactggagtgagcctaaaaagaataaagcccatatcgagctgatcccgatgatcgatgtgatgatgtttctactggttttctttgtcctgattagcctgaatgtgatcccggctctgggcttgaaaacgcagctgccgtcggccggcagcgcccaacagcttaaaccgcaaaaaaaagccattatcaccctcggcatcggcgaccagctgcagcttgatggccagccgctgcccctgaatgcgctggtcaataccctgaagcaacagcagcaggaaaaccaaaccaccaccattatcgtgaacagcgataaagaggttgcggtggaacgcctgatcgccgtgatggataccctgcgtcagggtggtttcttctccatttccattgccacacggaagcagtga

SEQ ID NO: 178310 - DNA, 744 bp, Klebsiella oxytoca
atgtatctgctttatcgctcacgtcacgttgttagctggctacccgcccttgtcgtcgccggatgtttactgtttgtcagccagcaggcagtgctgcaggtcaaaccgcattacgacgatacggtcatggaactgtcgctggctgaacccgaaccgccgcagccggagcctgtcccggaaccgcagccggaaataccgccgcaaattcaacctgagccggaaccggaggcggtcgctgaacccgtcgtttctgcgccagaacccattatccaggccaaaccggttgttaaaccgaaagccaaacccaggcccaaaccggttgtgaaggaaaaagcgccgaaaccgcaggcgatcgcggctccgcagcccgccgccgttcgtagtccggtgagtaaaccggccccgccgccttctcccccggcgccgaaggcgaacgcgcaggcggtggaaaacggctatctgcaggcgctgcgccgggagctggagcagcgcaagcgctacccgagcggccgtcaggcttcgctggaacgtccgcagggcaacgtggaggtctggctggaggttgaccgcagcggcagagtgctggcttccggtattgccagcagggcgccgaacatgctgctcaatcgcgctgcgcttagttccctgcaaagcatcagccagctgaagccctttcctgaagaggcttttgccggacaaagcagcaaaaaatttaccgcgacgtttaattaccaggcgccataa

SEQ ID NO: 178311 - DNA, 2241 bp, Klebsiella oxytoca
atgaaaaactttaattattctgggattgcgttagccgtggtgtcggccctgttatcgggggcctcactggcggcggaaagcagcgacgtgggggagattaacgttaaggggcaatcgctcggcggcggtctgatggtgcaggaagacagcggcaaagcgcgttccaccctgaccaaagaggcgatggaaaaagcccccggcgccagcaatgctatcgacatgctgaaatatacgccgggaatgaacgtcaacagcaatgacgccagcggcctgagcggtatcgactacaccatgcgcgggatgaactcggatcagatcggcctgtcgatggacggcatcccgattaacgactcgggcaactatgcggtctaccccaacctgctgggcgacgcggaaaaccttgagcagatctttgtcacccagggctcttccgaggctgacggcccgcatattggttccagcggcggtaatattggccttgtgacaaagcgtccctcaaaggagtttggcggcttcgtcaaacaaacgctcggcagccataacctcagcaaaactttcgctcgtctggagaccggggagtacaacggttttagcaactggctctcgtactcgcatactgaagccaaaaaatggcgcggggaggggcgtaattattccgataagttcgaaatgaactcgctgtacgaggatggcaacggcaacagcagcaacctgatcatgaagtataaccgtcaggataacagcaactataacaccctgagtaaagcgcagttcgaagaagacccgcgtcaggactactcgaccaccccggtctacaacagcaaaggtcaactgagcaaatattacaagctgaaccgtaatccgtttgaaaccttcaccctctcttttgcccagcgcttacagctgcgcgataacctcgcgttgaccgttcagccctattactactggggtaacggcggcagctttaccggacaaacggcctcggtgctgtccaatacgtctgataccgccggacagtacgatctcagcaacctgacttctaatacctattaccggccttcgtggacccagacctggcggccgggcgttaccacgaaattgaagtgggatattaacgacgaacacagcctggatattggctactggtacgagcgcgcgcgtcagtcgcagacccagccgtttattagcattcaggacgatggcaacccggcgaacgtttccggcaaaccgggcggttccgatcaggttaaagatgcgaacggcaatacggtacaggggcgtaaccagtacacggtgactcctgcgcacaaagtatggcttcaggacagctggttcgtgacgccggactggacgctggtgggcgggctggcttatcagtatgttgaacgtaaaggcgataataaaggcagcctgtatagcgctgcggaaaaacgccaggcgacctaccatgaattcctgccgaactttagcatcagctataagccggatagcgaaaatcagctgttctataacctgacgcgcaacatgcgtacgccacccaactacgtactctacaacgtcggcgattcgatcagcaccaaacctgagctgagctggaaccacgagctgggctggcgttttcagcgcgaagatatgctgctgagcgcgacgctcttctatatgcgctataccgaccggcagatttcgaccaccaatgcggatggtgactacgaaatgatgaacatcggcagcgtggagagtaaaggtctggagctggagtggagcggtaagctgccgtacaacttcaactactacacctcttatacctacacccattccgaacaaaaagacgacattgtgagcaacggcggacatccgctgccaacggcgggcaaaacggtgccaaacgtaccgaaaaacatgcttaacgcgtcgctgggctatgacgatggtctctactacggcagcttcggcggcaaatacgtcagttcgttctacggcgatttgaccaacgacgaaaaaatcggcgggcgcacggtctttgatgtcgccgcgggcgtgcatctgccggtggataaaaagattgtcaaaagcgccaccctgcgctttggcatcgataacctgttcgataaacagtacctgacctccgtccgctcgacgacttttaacgcggcggcttacgacggcgtgaaggccagtaccccgtactacaacgttggcgaagagcgcacctttagcgtctcgctggaagcaaccttttaa

SEQ ID NO: 178312 - DNA, 648 bp, Klebsiella oxytoca
atggatgccaatctgattcacgatattattttctacgttatgtacgccgcgctggcgatcgccgtggtgatactggttgaacgcggcctctatttttcgtgggcccagcgtcaggctttgcgctttgaaaaggcgctgacgccggacgttcgccgcgcgtcggatctgccggaatcgctgaccggccgcagtagcctcccgctgaccctcattctgccggtgctggagaaaaagcagacggcggaagaccgtgaggcgatgagcgatctgatcgacgctcagtatctgctcagcaaaccgcagatgtcgcgtgggctgtggatgcttgaaaccgttgtcaccgccgcgccgctgctgggcctgctggggacgatcctcggtattatggatacctttaaggccctttccgcctcaggcgtctccgatgccagcatggtttctgcgggtatggggaccgccctgtatgccaccggcctgggcattgctattgcgctgctgtgcctggtgggcaataactatttgcaaagccgcatggagcgaatcaacgaactgctgaaggtgctgctgatccgcgccggcagcccggtcagccgtccggagcagggcggcaaacgctgggaaggccacgaggcgcagcgctatgcctga

SEQ ID NO: 178313 - DNA, 1251 bp, Klebsiella oxytoca
atgcctgaacatggtcaatgcgggtggccggcaggccgcctgatgagcgcactggcggggagctggatgctgttaagccagccggtatgggcggcgttctctatacccggctacgagctggtgtataacgcgccgcaggaaaccaccttacaggataacgatttacgtcatgccgccgaagtctggcagcagatgttcgatgcggcgcgcagccatatcgatctggcgcagttttacgtggcgaatgaaaaaggctctctgctggatggggttctggcacgtctgcgggccgccggggagcgtggagtaaaaattcgttttctgatggaggagaagggcgtgggcctttcaacgccggaaacgctgacggccctgaaagctatccccaacctggagctgcgggtgattccgttccatcggctgaccggcggtattgttcacgccaagtatctgctggtggatggcaaagaggcttttgtcggtagccagaattttgactggcgcgcgctggaacagatccaggagaccggtctgcgcatcagcgatccgcaaacggtgcagcagattcaggctattttcgatcaggactggcaggcgcaagctctgctggcggagagtaagccggtaccgaagccggcgaggcaggcggtagcgtcggccccgcagggcaattatctggttgccagcccgcgcgattataacccgggcggggtgattgattcgcaggtggcgctgccgcggctgctggcgagcgccaaatcgcggatccgggtgcaggtgatggactatgcgccgctggcgtggggagaaaaggggagccggcccttttatgcgcccattgataacgccctgcgcagcgcggcggcccgcggcgtacaggtggagctgatggtggcgaactggaacctgaaaaagccggaggtattctggctgaagagtctctctctggtgccaaacgttcagctaaaagtggtgaccatacctcccgccagccgagggtttatcccctttgccagggtggtacacagtaagctgatgaccatcgacggtacgacggcgtgggtcggaaccagcaactggagcggaggctatttcgataactcacgcaaccttgagctggtgctgaataatgcgtcgatggccgtgcgcgtggacgcgctttacagccagctgtggaatagccgctatgcggcgccgatcaaggttgattttgattatccggttccgcatcctggccgcgagttcgaatag

SEQ ID NO: 178314 - DNA, 1164 bp, Klebsiella oxytoca
atgtccatcaccctcagaggcggcatgtggcactgtcatttctttacgccgtcagggaaaagagttaggcgatctcttggtacgggggacaaaaagcaggcacaggagctccacgacaagctaaaggctgaagcatggcgggttgaccagatcggcgacctgcctgtcagaaccttcgaagagtgctgtatccggtggctgcgggagaaagaccataagcggtcgctggatgatgacaaaaccaaaatagagttttggctgcagcatttttccggccgtgacgtctcgaagataacggcggaggaaatacacgaagccgttaacgggatgatcaaccgtaagcacctgcaggtgtgggagagtaaacgtgatgccgcgctgaggaagggaaggcctgttccggagtacaagccacggcaggtttctcaggcgacgaaagcgcagcacctttccttcattcggtctctgctcagggccgcggcgaatgactggggctggataaaaacggcaccagttatcaaaacccgcaagccgatcagcaagcggatacggtggctgaccagagaggaagctgagcggttgatcgagtgcatgccggacagcattaagccagtggtgatatttgcactggcaaccggcctgcgccgctcaaacatcatcgggcttgagtggcagcaggtcgatatgcagagaaaggttgcatgggtaaatccagagaacgcaaaagcgggcaaggcgattggcgttgctctgaatgataccgcatgcaaggtattaagggatcagatagggaggcattcccggtgggtgttcgttcataccacggcaaaacatcgcccggatggaacgctgacgcccgcggtgagaaaaatgcgggtggatgacaataacgcctggcgcgccggactgaaaaaagcggggatagaggatttccgttttcacgacctccggcacacctgggcgagctggttaatccagtccggcgtcccgctttctgtattgcaggaaatgggcggatgggagagcatcgagatggtgcgccgttatgctcacctggcaccaaaccatttgaccgagcacgcacggaaaattgacgccatttttggcgctagcgacacaaatacgacacaaggaggaaatcaggccggactaaaacttgcgtaa

SEQ ID NO: 178315 - DNA, 219 bp, Klebsiella oxytoca
atgagcgcagaaatcatcgatcaggccaacgagctggcagagcgccggctggaactgaccatccagaacatgcgcatcaaccatgacgctgtttctgctactcactgctgcgattgcggggaagagatcaaaccaaaacggcgggaagcggtgccgggctgtcagcgctgcgctgactgtcaggaggaagaggaattgcgcggtaagcatcggaggtga

SEQ ID NO: 178316 - DNA, 537 bp, Klebsiella oxytoca
atgaaggtagaaaaaagcgatgttctggcatttaccatttccgatgttgaacgactcgaccctgtcagggtggtcattgaaaactacgagccaggaaaggggagcatcactgtaacctgcttcggaaaggcgtggaccggtgcctggtttgctatgggcggagacaccgttcaggagttcattaagcgtgtcagcaatgactaccttatcggctatttcgacccgcaactgcaaagcacagttgatgatgataacgacgccaaccttgaatttgtaaagggtgaaatcatcaaactccggcgtcagcaggaaatcgatgctgaggaagccaggtatatgtgggtagaggcagaaaacgctgaggatgtgaaggaaagctgctgcgattgtcgcatcggtaataagttgcctggtctgcttggtgatgatccgtggtatgcaaaatggccggcagtgccaaaccacaattatcaatatctcgaacgcatcattgacgcggtacgtggcgggctcgcagaactggagtgtgcagcatga

SEQ ID NO: 178317 - DNA, 1140 bp, Klebsiella oxytoca
atgttgggacgtgccgcgctggtgctggtgaccgcgctactgatgtttccgcaaatagcggaaacgatttatagcccggcgctgaccgatatcagcgcccgtttttccgtgagcgcgccgcaggcggcgctaaccctttccgtgtactttatcggttttgccgtcggcgttttgctgtggggcggattcagcgatcgctacggccggcgtccggccctgctggcggggttaggggtttacgcattggggtgcctgatggcgctgtgggcgacggatttttcgctgctgctggcggcacggatcgtcacggccgctggcgcggcaaccggttcagtggtgacgcagacggtcctgcgggactgctatcgcgggcggcagctggcgggaattttttcgtttatcggcctggcactggcggtgagcccggccgtcggggtctatatcggcggcgggttgaccgccctctgggggatgcgcggcgtattcagcgcgctggcgcttttggccgccgcgcttctgctgggctgcctggcattgatgccggaaacgcgtccgcaaaacctcaggagagggccgtttcttcacgtgctgcggcggatggtgggcgatacgcgtatcgccctggcggcaatcctggtggcggcatttaacgtcagcctgttcagctactacagcctggccccgtttctgttcgcccgattcgatcttgatgccctgacgtttggctacagcggcatggcgcttgccgcgggttcgctgctcggcgcgctgcttaaccaccggctgctgcgtcggaatgtctcgctggggcggattctcgccatcgcctgcattctgcacttagtcggcggcgtcgcggtgtacgtgctgcgggaatcaatctggtttgtggcgccggttgcgctggtcacccttgcctgggccatggcgatcccgctggtgctgggctcggcgctgagcgcctacggcgactgtcggggcaccgccggcgcctttttcggcctgttttattatgtcctgattggcgccggtctgctggcggccgggtgggggcaatcgctgggtgcgtcgctgctggcgtgcgcgggcgtgagcatgctcgccgggtggcgttatatcatcgtgctcaacgagggctaa

SEQ ID NO: 178318 - DNA, 891 bp, Klebsiella oxytoca
atgaaccgacgccattttttgtttttaagcgccgccgcgctgctggcggacggtcgtcttcgcgccgctgaaagccagcaaacgatccgcctgtggcccggcgtgcctcccggcggcggcggaccggacggccccgttcgcttatcggcacgcggcgcgctaagccatatcgcccagcctgaactgacggtatggcgtcccgcagcgccacgcggtcacggcgtattaattgctgccggcggcggctatcgacgcattgaaatggcgaaggaggcctggcccgctgcgcgctggctaacgatgcgcggctataccgcgtacgtgctgacctatcgtcttcccggggaggggtggcaagcgggcggccttgctccgctgcaggacgctcagcgggcgctgcgcctgattcgtcagcgggaagccaaagtcagccttctggggttttccgccggcggacatttgtcgggaatggctgcctgtcgcgctgattttgcctcttactcgccgatcgacggcgtggacgacaccccgccccgggccgacggcgccgcgctgatttatccggtgatttctctcgaacctccgtacacccataccgccacccatcggctcctcgccgggcctcacgccgcggaggaggtggatcgcgcctggtcggtacaaacctgggtcagcgggcggacgccgccctgttttctggttcaggcggaggacgataatgtctccgatccgcacaatacgttgataatggccgccgcctgccgtcagcatcaggtcccggtcaccctgtatcgttacgccagcggcggtcacggttttgcgctgggccgggccggtacgtccagcgtcgagtggcccgagcgctacgctgcgtggctcgcggcgcgttag

SEQ ID NO: 178319 - DNA, 2781 bp, Klebsiella oxytoca
atgtttgacagtaaagcgggcactccgctggaagggtttgccgaatttgccactgccgctgccgccgaaggcgctgtattgctgagaaacaatcgcggaatgctcccactcaatcctctgcagccggtttcactatttggccgtacgcagattgactactatcgcagcggtaccggttccggtggggctgttaacgtggtgagtcgtacaacttttttgcaggcaatgcgggagcgaagcgggggcaggctcaatgagcaactggccgcgctttacgaaagctggattgaacaacaccccttcgacaacggcggagggggctgggcagcggaaccctggtaccagcaggagatgccgctgagcgatgagcagattcgtcaggcccgcgccgtctcgacccaggcggttattgtcctcggtcgtaccgcgggcgaagatcaggataatgccgatgttgaaggcgggtaccggctcacggccgatgagaagcacatgctacaccaggtatgccgagagtttgatgaagtggcagtcgtgttgaataccgccgggcttatcgatctctcatgggctgacgatccgctgctgcgtcaacgcattcgcgcgcttctgtatgtctggcacggtggcgcgcacggcgcacaggccgcagcctcgttgctatacggtgatgtgaccccttcaggtaagctggttggcagcattgtgatatcgctggacgatcatccggcatccccctgctggggtgcggaagaaaaaaatctctaccaggaagatatctacgttggctatcgctatttcgaaaccttctctgcgcagagcctgcagttcccctttggctttggtctctcatacacctctttcaccctgcaatcggcgcgggcggagacctttggcgacctgatcaaggcgaccgtcaccgtgaccaatcgcggggagcgcttcgcgggaaaagaagtggtgcaaatctacctccaggcgccgcagggggcgctcggcaaaccggccaaagcgctggtggcttttgccaaaactcgcctgctgcaaccgggggaaagcgagaccttaacgttatcaattccgctggagcgttttgcttctctggacgatagcggggcgaccgggcatccacactgttatgtaatggagccagggctttatcgcttgctgcttggtaacagcgtgcgcgatctacagccgctgccggttgacggcgaggcggggtacgcgcagaaaacgctgcgaatcctctcctgccatcagcaggtgctggcgccgacggtgcctttcgtacgtataaaaccggtcgcggacggcgatgatgggcgctatcagatcgagtgggaggacgtgccgcggcgggagattaatctgcgcgcgcgcattgaggagcgtttgccagaggctatcacccttaccggcaaccagggactgaccctcaacgacgtggctgaagggcgtaccacgatgaatgcctttgttgctcagctgtctgttgaggagctggcctgcctggtgcgcggagaaggcatgtgtagccacaaagtgacgcccggcgtcgcgtcggcttttggcggcgtagccgacagcctgctggaaaaaggtattcctctggcatcgaccgccgacggcccatccgggattcgcatggataacggcgcgaaggccactttgcttcccagcggtacattattggcctccagctgggacccgatcctcgtggaacgcttatacgtgatggaaggcaaagagctgctgcgcaacggtatcgacctgcttttagggccggggatgaacatccagcgccatccgctgaacgggcgtaattttgagtacttttccgaagatccgctgctcaccgggatgatggcggcggcggtggttcgcggcattcgcagcggcggcgggattgccaccctcaagcactttgcctgcaacaatcaggagttcgccagagccaaagcggattcggtggtgtcagagcgcgcgctgcgtgaaatctatctcaaaggttttgagtatgcggtgaaatccggcggcgcaaatgcggtaatgaccgcttataacccggtcaacggccaccatgccgcatccaactacgatctcaccaccaccgtactgcgcgaggagtggggctttcgcgggatcgtgatgaccgactggtgggcaacgatgaacgatcccatcgatggcggcgcggcgagcactcacaacaccgcggcgatgatccgcgcgcagaacgacctttatatggtggtcaataataacggcgcggaagttaatgcggggggagataataccctggcggcgctggcgacaggcgagctaacgctcggtgagcttcagcgctgcgcgataaacatcctcgactttatgctgcagacgcaggtctttaagcgcggggagatgccgcgggcggggattattcgcctggcggcggatcctgcgtgcgatggggcctgtcctggcgcaattaaaattgccgagcagtcgcggctgcgctacgacgaggagctggtgctgagcgttgagcgaacagcggtttatgacgtgctggtgagcgttcacgctaacggtgcgccgctcgcacaaaccgcctgcaacctgctgcttaatgaacaatttgtggcgacgatccagaccaacggtacgctcggtcgtgagattgtgcagaagctgtgtcggattgagctacagtcggggaaatatcgcgtagactttgattttatcaagccgggtctggtggtggactggctggagctcaggctcgttaatgactaa

SEQ ID NO: 178320 - DNA, 1392 bp, Klebsiella oxytoca
atgaaaataaaatatatggctttggctattggcgccattatgtcctctaatgtgatagcagcaaaaaataatacctctgccgatattgaccagcgccttgcgcaactggagcaaagattaattaacgctgaacagcgcgccgccgacgcggaagcgcagatacaaacgcttaaacaacagcaaacaacggcagcaaaaaccgcgccggcggtgaaagtcgatgccgctgacccggtcgctcccggcgcgacgcccacgaagcttacgctctctggctatggcgacctgaagttttatggcgatgtggaattcaatatggatggcgccagcggtagcggtagcctgacgtcggtaaaaacctcttcgagtaaaaactgggcgccgggtactaaagaacgttgggatattaacggccgtattctgctgggcttcgatggtatgcgcaaaatggataacggcaattttgccggtttctccgcccagccgctggctgatatgaccggtaaaatgaaccttgatgatgcggtattcttctttggcagggaagatgactggaaggtgaaagttggtcgtttcgaggcctacgatatgttcccgctgaatcaggatacgtttgtcgaatattccggcaacacggctaacgacctctatagcgatggctacggctatatttacatgatgaaagagggccgcggccgtagcagcagcggcggcaacttcctgctcagtaaaacgatagataactggtatttcgaacttaataacctggtggaaaacggcagtacgctgttccaggactccagctatcacggcaataccctggaaaatgagaaaaacgtcgcctatttacgtccggtgattgcgtggaatagcggtcgcttctctaccgcagtagcgatggaaaagaacgtcgtgaagaatgcttacggttattacgacaatcgcggcagttgggtcgaccagtcggaccgtaccggctatggcttgacgatgtcatggaatggacaaaaaaccgatccggaagatggggtcaccactaacctgaacgtggcctatatggatgcctccgatgagaaggatttcaccgcagctatcaactccctctggcatcgttttgaactgggttacatctacgcccacaacaaaatcgacaagtttaactcggctaattatgtctctacctgcgacgatggctgctggatctccaacgtgggtgactacgatatccacaccattcacgcatcgtacctgttccccaatgtcatggatatgaagaacttcaacatctaccttggcgcttacgcctcgtggattgaagcgaaaccaacggatggcgacaaacatgaagactcccgctacggtggccgtctacgtttcaaatatttcttctga

SEQ ID NO: 178321 - DNA, 1359 bp, Klebsiella oxytoca
atgtctgctggcgacaaaatttctgtcagagaaaaagtaggttacagcctgggggacgcagcgagccatattgtatttgactcctccgttgccatcttagcctacttctataccgatatttatggtctaccgcccgccgtgatggggacgatgtttttgctggttcgtctgctggatgcgattaccgatccgattatgggggcgattgcggatgccacctcaacccgctgggggcgcttccgtccgtggctgctggctatctgcgtaccttttgccgtgagctgcgtgctggtttactccataccgtctttctccgactcggggaaagtggtttatgcggttgcggcatatatatttatgacgttgatgtacaccgccattaatattccttactgctcgctgggtgcggcgctgacttccgatccgcgtgaaagcctctctctgcaatcctggcgttttgccatcacgccgattggcggcgcgctgggtaccgcgtttattttaccgctggccgatcttctttatcctggcgatcgggcgacgggtattcaggtctccatggcgatatttggcgttatcggctgcctgatgtttgtcgtctgtttcgcgaccactaaagagcgcgtccagccgatcaaagaagaaaatctgaatattgcccgcgatgtgaaaattcttttccgcaacgatcagtggcgtattctctccgtttacaactttatgatgctggttgccgtggtgattcgcggcggggcggtggtatattacgtcaatagcgtgctgaataaaggtgcggacgttattacaatattcatgctcggcgggatgtttgcctccatgctgggttcggtgctggcaaaaccgtttggtacgcgtttctgtaaggtcagactctctttctggattaatctcgtcaccgctgcgctgggcgtcgtatgctttatggtgccggtacaatattgggtgctggtgctcggcgtgcatattctgatctccattattcagggcggcaacggcgcgctacagtggtcaatgataaccgacgttaataactatggtgaatggaaaacccagcgtcgtatcactggaatgaacgtcgcggcgaatatttttgtgattaagctcggtgtagccgttggtggtgcgattcttggatgggtgctggcttactaccattacgcggctaacaccacggtgcaaccagcctctgcggtacatggcgtagtgctattgttcaccctggtaccgtcaattttctatgttcttaccgcagtctctattaaattctatggcttaacagaaaatagaatgaatggcattgttgatgatttgaaaaaaggaacttttgccgagtcctga

SEQ ID NO: 178322 - DNA, 2013 bp, Klebsiella oxytoca
atgaaacaattctccgggctctggcccgacattgtcggacgtgcagccgcgaatagcggactgcttgaacggctggtgaaggatgctcagccggtattagatgcagcggttcgcattccgcagtcagggatcgccagctggaatctctactacttttgtccgcaccacggcgtgcgcctggcgtggcgggcggatacgccccaccagcatgcctgcccggtcgatggggaaatatttagcggtgaaccgtgggatggcgcatggtggcgcgagatgaatggccgtaacgccagcgcctgtcagcagcttggcctgttatggcggctgaccggcgaaacggcgtatcgcgataaagttcgcacgctgctgatgggctacgcggatgtctatcccggctatgagatccacggcgatattcccaacaacggaccgggcaagatgaacgcccagacgctgtgcgaagccaactgcattctggaaatggcgctgggttatgacttcattcgcgacagcctggcgcccggcgagcagcggcacatcagtgaaaacctgctgcgctgcgcggcagcgtttttgcgcgaccatcgtagtccgcagatccataaccatgaggttaaaatcagcgcggcgcttggcgtactgggtttcatcctcgaagatgagacgctgctggagtttgccgtgaaccagccgtacggcctgcgctggcagctggaaaatggcctgctggcggaggggctatggtttgaaggctccgttcactatcactactacgcgctgcagggctttctggcctttgagaagctggcgcgcggcacccgctggagcctgctggacggcccgtggtatcaggcgatgctgacgttcccgctgtcgctgctgctgccggacggcaccttcccgcggcttaatgactgcctcgccgggcaggagaagctcaaccatcgggatctttacgagttcgcctggtttatctggcgtgacccgcagtacgccgcggtgctgcagtttaccgaaacgacgcccgacgagcgtgaaaccttactgtggcgcgaacaccccctgccggaaacgcccctgccgctgatcccgcagcagtcgctgtttgcgcccggcgccggcctgacgttatggcggcgaccgcagcaggcgctgctgattaagcacagcccctggggcggcgagcacgaccattacgacaggctggggctgatgctctggcatcgcgacggctggctgctcacggatatgggcaccaccggctacggtgcgaaaatgcactatgactattacaaaaacagcgccacccacaatacgctttcggtcaatcagacaaaccagcctccggccaatccgcaggtgctaggctggcatatggatagcgactctctgtggctggatagcgaggttgactgggggaagccgccgccggagctcaacagccatagccgcatcgagtgggacgcggcggcctggcgaggcgtgcgctttcgccgtcgcctgctgtggcttgaagaggtactgatcgatctctctaccgtggaaaatccgcatcgccagcagcttgactggacactgcacctggcggcgcgggcgctggaccagagcggtacgccgcagcctttttcgctcagcggaccgctgcggcatatggccaatgccaccatgaccccgctgaacggctgccagccgcgccactttgcgcgcgacaaagacaccgttgcgctctggctttccggcgatggtgaactctggcaagggctggcgcccgataacccggcgattcgcgatctcagctatctggtgatgcgcaatcacctgccgcaggcgcgtttcgtctgcctgtgggatttcgctaaccgcgcgccgctgacggaggtgaatgtgcatcatacgccagccggtacgcacattaccttctggcgcggcgatcgcgtcacgcacgtgacgctgtacgacgatcccgggaaacgacctgatgcgatccttccgctcccggaaagcggcatctga

SEQ ID NO: 178323 - DNA, 1566 bp, Klebsiella oxytoca
atgcagactgcacaaaaagttatcacaacctaccgcaggaaacgtatcctggtttgcttgctggtcgcgctactgaccctgacgacaacattagtgatacgatttatttcgcagcgtagcttaaatcagcagcgcgtccagctcagcaccaataaaatggtggccgcgatggataatattctgcggcccctggcggcccagcacgccacgctgctgcaacttgtgaaccatccctgtcaggacgtccacctcacgttacgtaagctggcggcatcgctgcaaacagtacgttccatcgcgctggtccagtctaacctgctctattgctcgagtatttttggccaacgaaatattcctgttcaccagttacagccggcgctccccaccaatcacgccctgctcaccttcagctacgacgcatcgctgcttaaagggacgccggtgcttatccagtggtatcccgcttcgcttagcggcgccgacggcgtgctgctggtgatcaatatcgagctgctgggcgagttaatttttaacgcaaaatcgccattaattaccggcattggcctcagcattggcgataaaagttttattagcggttccgggctgattaaacaggaatccttgccgggcgagcaaatcatctaccgccagtcgtcgacgcagtttcccttcaccattaacgtcagcgggccgggcgcctcagcggtggccctcaatgagctaccggccgaactgccgctggcgctgataatcagcctgttaatgaccggcatcgcctggctggcgaccgcgggaagaatgagcttttcccgggaaattaatctcggtattgccgcccacgagttcacgctttggtgccagcctctgcaggacttgcgcacccgtcagtgctgcggcgtggagatactgctgcggtggaataatccacgcagaggcgctatttcgccggaggtgtttatccccatagccgaaggttataatctgatcgttcccctcacccgctatgtcatctcccagacggcccacaaattagccctttttccgcaggacaaacattttcacatcagcatcaacgtcgccgcccgccatttcgccaacggcgaaccgctgcgcgatctgcatcactactggttcagcgcccatccggtacagcagctggtggtagagctcaccgaacgcgacgtacttcaggatggcgaccaccatatggccgagcatctgcatttcaaaggggtgcagctggctatcgatgatttcggcaccggcaacagctccctttcctggctggaaaagctgcgccctgatgtattaaagatcgataaatccttcaccagcgcaattgggattgatagcgtcaacgcaacggtgaccgacatgatcattgctctcgcccatcggctgaagattgtgacggtcgcggaaggcgtagagacccgggatcaggaagagtatctgcgcggcaacggcgtcgatttattgcagggattttactacgcccggccgatgccggtagaggactttccgcagtggctggcggcggaaaagcgtcgggagcttaacgcttaa

SEQ ID NO: 178324 - DNA, 129 bp, Klebsiella oxytoca
atgagttacaaatatagcctgcgctatattttgtcattccccggcgaatggaatatagccgcggctatattccattcgtttaattcgccgatatttattaacgaattattcacttctaaatttaaatga

SEQ ID NO: 178325 - DNA, 654 bp, Klebsiella oxytoca
atgtatcagcgtatttacggttgcgactggcgtaatatctggctggtgggcgacctgcacggctgtttcgcacgcctgatggcggcccttcgtgaacgcaagtttgacccttaccaggatctgcttctttcggtgggcgatctgatcgatcgtgggccgcaaagcgcggagtgtctggatttactgcgctatcgctgggtttacgcggtgcgtggaaaccatgaacagatggcgctggaggcgcttgccgacggcgatatgaggctctgggagatgaacggaggcgactggtatacgcagcgtgcggcgagccaaaagcaacgccttacggcgcttattgcccgctgccgccgcctgccgctgattattgaactccacagcggtgagcaggtgcacgtgattgcccacgctgattaccccgccgcggtttatcgctggcagcgcgttgttgatgagcaccaggtgctgtggcgtcggcagcgtcttaccgaccacctcgccgggcgtcacggcgcgattgccggcgctgaccatttctggttcggccatacgccgctgaaacgacgctacgacagcgataaccagcactatatcgatacgggggccgtgtttggtggagagctaaccctggtggcgctacagctggcaggctaa

SEQ ID NO: 178326 - DNA, 765 bp, Klebsiella oxytoca
atgattcgctgtagatttgcgccgtttatattcgctttattgcttccctcatccgtgctggccgccagctccgttctggtatggccgatatttcaaacgatcgaaagccacgaaacagggtctgaactgtggctggagaatcgcggcagcgcgccggttaatttgcagctgcgcgtgtttgcctgggatcaaaaagcgtcagcggacgtctacgccgatcagcgggatgttgtcgccagcccgccttttaccacggtagcgccggggcagcgccagctggtgcggctcatgcgcgtcgcccccatcgcaaacggcaaagagcagtcctatcgcattgttatcgatgagatccctgccgcgcaacccgcggcgcagacggaacagaacgccgccgggctgaaaatgcgcatgcgctatgtcctgccgctgtttacctatgggcagggcgtcacgccgctaaagaacgcgggttcagtcgaaccggtaagggccacgctgcgctggtcgctctcgcagcaaaataaccgccagacgctgtgcatcgaaaacagaggcaatcagcacgcgcgcctcagcgcggtttactgggcgaacgcgagcggcaaggggcgcataccccaggctaatggtcttctcggctacgttctggcgcagaaaaagagctgtttcccgagcgccggaaacgcttccgcgccgtcaggaatgcatctgttcgcgaaattaacggataacggtcaggcggtggaaattccggcgaatcgttaa

SEQ ID NO: 178327 - DNA, 1335 bp, Klebsiella oxytoca
atggaaaataactcactcaaccacccgatagataaaacgctgccgagcgggcaggcgccacgacttttatccaatattgaggtcggcgccgtgccgttggtgctctttatcgggatagccgcaattgttgccatctccgcgaccgcaggcctgctgccgaagaacatgattggcggtctggcggtaatcatgaccctggggttcgcgctggctaaaattggccgaatggtgccaatcctcaaggaggttggcggcccggccattttgtgcctgatgacgccgtcggtgctggtctatttcggcatgttcgaagcgcataccctcgataccgtgcacttgctgatgaaagaggccaacctcctctatttcgtcatcgcctgcctggtcgtcggcagcattctgggcatgaacagaaccatcctgattcagggaatggtacgtatgtttgtcccgctggtggtggggaccggggcggcgatcttaaccggcctgctggtgggcagcctgtttggctacagtttctaccacacctttttctttattatcgtgccgatcatcggcggcggtatcggtgaagggatcctgcccctgtcgctggcctattcagctattctcgggcaaacgcccgacgtttacgtggcgcagctggcgccggctgccgtggtgggcaacattttcgccatcatctgcgccggttttctggcgcgcatggggacgcgacgtccttcgctctccggcagcggaatgctgatccgcagccatgaagataacagcgtctttgcgcaaaatcagcgcgcgcagcccacggatttccagctgatgggggccggattattaatgatttgcgcgttttttatcgtcggcggtctgctggaaaaggtggtgcatattccggggccggtgctgatgattctggccgcggtattttgcaaatacgcgaaagttatcccggcggcgatggaactgggggcacacagctgctacaagttcgtctccgccgcgctggtttggccgctgatgataggcctgggaatgctgtatgttcctctggaaagcgtggtcgcggtcttctcggttggctacgtggtggtttgtggctcaatcgtcattgcgatggcgctaagcggctttcttatcgcttctcggctgaatatgtacccggtcgaagcggccatcgtcaccagctgccacagcgggcttggggggacgggagacgttgccattctttcggcatcaaaccgaatgggattaatgccttttgcccagatagccacccgtatcggcggcgcgtcgacggtgattaccgccacgctattgttgagctggcttgcgtag

SEQ ID NO: 178328 - DNA, 948 bp, Klebsiella oxytoca
atgccttcactgctcttagaatccctttttcccctggtgtttatcatgctgctcggatggctaagcggtaagctgggctatacccgccgcgaggatgcgtccgtactggccacggtggtcattcgtttcgcgcttcccttccatctttttatcggcgcactgaatactcatcccgataagatgaaaaacttcacctttatggcggtgttagtcatcggtctgatggggtcatatatcctcacgctcctgatctcacgctatgtttttcgtcatgatattaaaaccagcgcgattcagtccctggtgtgcgcgttccccgacatggcctactttggcgctcccgtgcttgcggtgctgattggtccggagggttttctcggcgtgcttatcggtaacctggtgaccagcgtattgatgatccccctgaccatcatcctgattcgcatgggtgacaagcgcggccgcgctgacgcggaacagcctaatccgctgcggcttatcctgcaaaacctgtttaaagccgtccgaaacccgatcgtctggataccgatttccggggtactgctcagccttgccggagtacagctgccgcacatgctgagcatgcccattgagatggtgggaaaagtggcgggcggcctctccctgttcgcccttgggctgctattttacggcgaacgtcctacggtcaatattcaaacctgtaccaatatcagcatcaagaatctgctccagccggccatgatggccgtagccggcctcgccttcgggctcagccatagcctgatgcagcaggtcattatcatcggcgcgacgccttccgccattgcggcagggatgtttgccctgcgcagcgatacctatatcgagcccgcctcatcctctattttgctcggtaccgcagtgggcgtcgtcactgaaggattcatgatttatttaatctcttaa

SEQ ID NO: 178329 - DNA, 1686 bp, Klebsiella oxytoca
atgttagccacagaaaccttatatacgccctataacggcgccgtgctgctggaaaacccgttattaaataaaggtctcgcgtttactgaaggtgaacggaccgcgtttaatcttcagggtctgctgccgcataatgtcgaaacgattgaagagcaaaccgcgcgcgcgtgggggcagttttgccagtttaaacgggatatttcgcgccatatctacctgcgaaatattcaggatactaacgagaccctattctataatctgctgcgcagccatatgaaagaaacgctgccgatcatctataccccaacggtaggtgaagcatgtgaacacttctctgaaatttatcgccggggacgcggtctgtttatttcatggcctaaccgtcacaacattgatgagatgctgcagggcttttcccgcaatgatatcaacgttattgtggtgaccgacggcgagcgcattcttggcctcggcgaccaggggattggcggcatggggatcccgattggtaaactctcgttatatacagcctgcgggggtatacacccggcatcaacgctccccattatgctggacgtgggcaccaacaacgcccagcatcttgaggacccgctgtatatgggctggcgtcatccgcgtataagcgacgagcagtacatggaatttatggacatgtttgtccatgccatcacgcagcgctggcccaatgtgctactacagttcgaagattttgcgcaaaaaaacgccacccggcttcttaaccgctatcgtcaccagctgtgctgtttcaacgatgatattcagggcacggcagccgtgacctcaggtacgctgatcgctgccgccgctgctgccggtacgcggatccgcgatcagcgcgtggtgtttctcggcagcggatcggccggatgcgggatagcggaaaaaatcattgcgctgatggttgatgacgggctctcagagcaggaagcgcgcaatcgcatctttatggtcgaccgccctggcctgttgaccgatgagatgccggatttgctggacttccagcagggccacgtcacgccgcggaaaaatcttacccgctgggataccagtgcggcccacctgtcgctgatggatgttgtacgcaacgtccatcccaccgtactgattggcgtatccggccagccgggactgttcagcgaagagattatcaaagagatgcaccggcactgcccgcgtccgattattatgccgctgtccaacccgacctcccgcgccgaagcccagccgaaggatctgctggaatggacccgggggaatgcgctaattgccaccggcagcccgttcgcgcccgtattctatgacggtaagacctacgatatcgcacagtgcaacaatgcctatgttttccccggtctggggctggggattctggccagcaaagcggcgcgcgtgaccgaagggatgcttatcgcctgcagtaaaaccctggccgcccactcgcctttggccacccgcgacgccggcggattactgccgccggtcgacaagattgagatgatttcccgggcaattgccgcagaggtcgcacgcgcggctcagcaggatggcgtcgcgccgcagattgacgaggctcagctggccgcgaatatcgataaaatgttctggcgagcgcgctacaccgcgtataaacgatcgccattttga

SEQ ID NO: 178330 - DNA, 717 bp, Klebsiella oxytoca
atgattaatgtgctgattgtcgatgatgattccatggtggccgagctgaaccggctgtttctcagccgggtggcggatttccactgctgcggcgtggcccccacggtccgcgaagccagggagatgctcagccatttggcgcaggtcgatctggtgctgctggatgtctacatgcagcaagagaacgggctggatctgctgcccgcgctacgcgccgatgcgcgaaatattgatgtcattatgattacctccgctgccgataggtgcacggttcagacggcgctgcattatggcgtggtcgattacctgattaaaccgtttcagtttccgcgctttgaggaggcgctgttgtcatggcgtaaaaagcgcgatctgaagaatgcgaaatccagctacgcccaggccgatgtggacagcctgctgcgcagcggggttcagcagcaggaaagcgcacgccgcttgccgaaagggcttacgccgcagacgcttcgtctggtgtgccagtggattgacgcctggcaggaacgtgacttttcgaccaatgaactggccgcggcgctgcagatatcccgggtctcatgccgcaaatatctgatttggctggagcagataaatatcctctacaccaccaaccattacggcatcaccggtcgtccggaatatcgttaccggctcgttgccgatcatttggcgctactcaaacaatacggccaatga

SEQ ID NO: 178331 - DNA, 504 bp, Klebsiella oxytoca
atggccgtaccaggaatggttcaaaagctgaataaccagatgaatcttgagttctatacctcaaatttgtatctgcatttgagcgaatggtgtactcagcaacggttgaacggtaccgccacttttctccgtaaccgagcgcaagccagcatcacgcagatgatgcgggtctttgattttatgaaaaaatcaggcgcctggcccgttgtgaaagcagaaggaacctacggcactgaatgttcgtccctggaagatctctttagcaaaaccgtggaagattatcagcagcgcagcacgatactttccagcctggcggaagaggcgaaggcgcaaagcgatgaatcaaccctgcgttttctgacgctgcttgctgaagagcaggatcaggatggcatgctgctggagaccattcttgaagaaatccgtcatgcgaaaaatgccggaaccagcgtacaacaaaccgatagccacctgctggatctggtcagtcaacagcgcgtataa

SEQ ID NO: 178332 - DNA, 888 bp, Klebsiella oxytoca
atgtttactggcctctgcgcttttcctctgactccgttacatcagcatggcgttgatgaaaccgcttttgcccggattgtcactcgcctcgccgactctgccgtcgatgctctcggcgtgctcggttccacgggaagctatgcctggctcagccgcgagcagagaatgcaggttatccgacaggccaaatcgcatgccggagcggtgccgcttatggcagggatcggcgcgttggggaccgatcgggtccttcgtctggcagaggatgcgcagcgggctggcgccaatgcgctgctcctgccggcaatcgcctatcagcccctgacggaagaggagatttttgctttttaccagaccgtcacccgcgaagtctccgtgcccgtctgcgtttacgataaccccgttaccacgcatgtgacgacctcagatgcgcttaaaggcgcgatcgctgcgctgccgggaatcgcctcaattaaaataccgggtcccgctaaaaatgacgtcacacggcgcgttcagagcctgcggcggcagctaccggctgagatgacgatcgggattagcggagacgcctgcgcggccgatggcctgaacgccggctgcgaagtctggtattcggtgtgcggcggcctgttcccgcacgtcgccaaagagctgacggcggccgcgacgcgggggcaggctcagcgggcggaagcaataagcgccaggctggagccgctgtggacgctctacaggaagtatggcggaagcctgcgggtcactgccgcagcggcgacgatcctcggtctgtgcggtgaggattgtttgccgcgtcccctgctaccgctttcgccggatgcctttcgtgagattgctgagacgctgcgcagcctgaaccttgagtag

SEQ ID NO: 178333 - DNA, 1473 bp, Klebsiella oxytoca
atggtaacctctgcaaaaatagtcgggctggttgaggttatggcgcaaaatttatccaaggaaaatcccccgtctttgaaggttgaacataccggagaagacgcgcaggcgctattgcgtcagctaatggcgatatacgatgtcaaaacgctggtcgcgcagttaattgccgtcggcgagcagcactggagcccggctatcctcaagcgcgttgcgacggtagcgcgcgcggcaggtcgtatcacccgccaggagcaggcccacctgcgcacgctcctgccggagccgccggtgcatcatccgcattatgggttccgcttcgtcgatctgtttgccggtatcggcggtattcgccacggttttgaagcgattggcgggcaatgcgtgtttaccagcgaatggaataaacatgcggtgcgcacctataaagccaactggtactgcgatcctgagcagcatcgtttcaatgaagatatccgcgatgtgactttgagccatctccctgaggtgagcgaggaagaagccgcgcagcatatacgccagactatcccgcagcatgacgttttactggccggcttcccctgccagccgttttctctcgccggcgtgtcgaagaagaatgcccttggtcgcgctcacggctttgcctgcgaaacgcaggggacgctgttttttgacgtggtcaggattatcgccgcccgtcagccgccgatttttgttctggagaacgtcaaaaacctgaagagtcacgatcgggggcggacgtttcgtatcattatgcagacgctggatgagctggggtacgaggttgccgacgcggcgcataccggggcggatgaccctaaagtcatcgacgggcgcttttttttaccccagcaccgggagcgtattgtgctggtgggtttccggcgcgatctccagctgcatgagggatttaccctgcgcgatatcgccactctctatcccactcgccggccgacctttggcgagctgctggagcccgcggttgacgacaaatttattctcaccagggtgctgtggaagtatctctatcgctacgcgcgtaagcaccaggagcgggggaacggttttggctacgggctcgtcgacccaacgaatccgcacagcgtggcgcgaacgctctctgcgcgctattacaaagatggcgcggaaatcctcattgaccggggctgggatcggcctctgggcgaaaagcattttgatgaccctgaaaaccagcttcgtcgtccgcgcaggctgacgccccgcgagtgcgcgaggcttatgggttttgagacgccgcagggatatcgcttccgtattccggtctcggatacccaggcctatcgccagtttggcaattccgtcgtcgtgccggtatttgcggcggtggcgaagctgctggcgccgcgtattgaacaagcggttgccaggcgtgagcaagagattaaccatggccgacgttcacgataa

SEQ ID NO: 178334 - DNA, 993 bp, Klebsiella oxytoca
atgaaagaaattaatataaaccacacgaggagcaaaataccttcgttagcaatcgttgttccttgttataatgaaaaagaggcctttccatactgcctggaggggcttaccacggtattacaaaacctcctcgaaaaagaaaaaatcgctcgaaatagttatatcctctttgtcgatgatggcagtaaagacaacacctgggaacaaattaaatccacatcacaggaaaagtcattcgtccgcggtctgaaattatcaaggaaccggggccatcagatcgccctgctggcggggttggcaaacgcggatacggacgttaccgtaagtattgatgcagacttacaggatgatataggttgcattgaggaaatgatagacaaatataatgaagggtttgagattgtttatggcgtacgcgacaacaggagtagtgactcagtattcaaaagggcaacagccaataaattctattctctgatgtcagggctgggtgtcaatcaggttcctaaccatgcggacttccggcttcttagccgtacagcgttgacagcattaaaagattttaaagaacaaaatttatatttaagggggctaattccgctgttgggttataagtccagcagcgtttattatagcagagatgaaagggttgcaggcgaatcaaaataccccttaaaaaagatggtagcactggcgttagaaggaataacgtctctgacaattaccccattacgtatgatcgctgccgctggggttgccacatgccttctatcttcactagctgcaatctatgccttcattgagaagctcctgggaaataccgttgcgggttggacatcggtaatgattgcgattttcttccttggcggtgtccagatgctttctttggggataattggcgaatacgttgggaaaatatatatggaatccaaaaatcggcccaaatattttatcgaagaggtagcaaaacacgaaatgagaggcgagcaatga

SEQ ID NO: 178335 - DNA, 1458 bp, Klebsiella oxytoca
atgaacactgaggacgaacggatgacgtcttactctaaaaaaattattgcaatgctttacctcgcggcaattttcttagtttatagcccaacgattatatttagttacgcattttcagatgactggtcgacactttccgatgttttttcagggaaaggttctccgtttcaatgggatatgcaatccggcagacccttgtatgccgttgccagacggcttgcctttacgctagttcacaatatcgatgaccttgcctatcttagattttttaccgtaatatcggtatttatgttttgcttttttcttttttcatttatagaaaaaagaaacatattcgagcgtaaaataacaacgatcgcattccctttattaatatgcctgacgcccgcagtacaggtttataattcctgggcgacatgtttcccttttgtactctccatactccttgccggaataagttatgcgacattaaaaccgatcaataagaaaacgacaattataagatttgcagcatccgtcattattttatggtttgcatttgccatatatcaaccaacggcgatggcatttttatttttcgtcatgcttgataactgtctgaaaaaagacaaacccttttccatcaacattgttttaatcagcggcgcagttttatttatcggcatgcttggtagcctgctattttcaaaatttgtacctgtatggttatatggcagttcaattgcacgtgccgagttaactaataatccacttgagaagttacgatggtttctaaaagaaccgttgattaacgctatcaacaactttaatataactcccggcacttttttcacaacgctctcattaataatttgcgcaataggtttactttcaataataaaaggcaaatcaggcccgattaaggttctcatgtttattatcatggggattggtgcctactctccaaacttattagtcaaggaaaactgggctgcatataggtcactgatagcactggagttcttcacatgcgctcttattattattgggttagatgccttgacaagcaaactcaacatagcaaaaaaagcgctacccatattgacggtattcgcgatgatcgctgcatcatacaatatctttaatggtttcattatcccacaaaaatcggagttaaacgcattagccagcgcgctttcctacaaggtggggaaaacatttacaggggatgttctttttgacattcaagatcctgcctataacgcctttactaaaacacaacgttatgacgagtttggcaatatttcccttgcggctccctgggctatcaaggggatggcggagcaaatcttaattagcaagtcaatgcatttcaggcttcccgagaatgttattctgacggcaaaggagcaatgcgccactgattgcatcattataaaaacgggcgatgcgatgaggagttcaacctccaactattga

SEQ ID NO: 178336 - DNA, 1212 bp, Klebsiella oxytoca
atgacgatttctttgtcagaccgcgttcagcgcgtgtcactttccgccaatgcggcggcgaaacagcgcaccaatgaactgaaaagagccgggggggatattttggatctcaccactggcgaaccggattttgatacacccgatcacatcaaacaggcagcatacgaggcgattgcgcgtggcgaaacaaaatacacgccgacgccggggattccggcgttgcgtgaggcggtgcagcagaaattacagcgggaaaaccggctggaattcgctgttgcagacatcattattgccaacggtgccaagcaggtcattttcaatgcctttgccgccacgcttaatgatggcgatgaagtgattgtaccggtgccgtactggccgacatttccggacagcgtgcggtttaacggcggcacgccggtgtttatcgaatgccatctggagcagggttacaaactgacgccggaacaactggctgccagcactacatcgcgtacccgctggctggtactcaatcatccgggaaacccgagcggtgcggtatattctaccgctgaattacaggcgctggccgccgtcctgcgcgggcatccgcaggtgctggtcatgctcgatgacttatatgagcagattctgtttgatggctgtgaacatcagaatctgctcaacgtggccgatgattttcaggcgcgtagcctgctggtgggcggcgtatccaaaacttatgcgatgaccggctggcggattggtttcggtgccgggccgaaggcgcttattaccgccatgaccgtggtgcagtcgcaaatcagttccggtgccagttcggtgagtcaggcggctgcgcttgcagcctttaacggggggctggattttattgcaccacaggttgcggcatatcaacaacggcgcgatgtgataaccgacattctggcgaatattgacgggctggagttgcgggtgccgcagggcggtttctttgtcttttgccgctgcgccggattaatcggacgttaccggcctgacggggcaaaaatcgaaaacgaagctgacgtgctggattatctgctggaaagcggcgtgtccggcgttggcggcagcgcatacggcttgtcgccctatttccgcttatcgattgccaccgataacgctacagtagctgaagccgggcggcgtattgcatcggcttgcgcgaagctcagcaccgctcagtaa

SEQ ID NO: 178337 - DNA, 1332 bp, Klebsiella oxytoca
atgacctcttcttcatcttcttcagaaaacacgcgtaaattgcgtcttggtctgtttgtgcagccgctcgggcatcacgtcagtggctggcgcttaactgaaaacctcggttcgccgaccgatatcgactggctgacgtggatcgccagaaaagccgaagcgggtaaattcgatatgttcttcatcggcgatgccctggcgaccagcgtctaccgtttaccgtccaccatggcgcggcttgaaccgctgaccttgctgtcggcgctggcggtacaaacccgccatatcgggctggccgccacggcttcaacgacattcagcgatccgtttaatctggcacgcagcttttcttctctcgatcacatcagccgcggccgggcggcgtggaacgtggtgacgtcgttttcaacggacgtggcgcgtaatttcagccgtgacgatatgcccgcacatgccgaacgttacgccgtggcgcatgagtttctcgaggtgacgttcaaactgtgggaaggttggcaggaaggggcggtacagccggacaatgccagcggtcagtatttcgtcaatgagaaaatcaaaccggtgaaccatcagggcaagtatttccaggtacaggggccgctgaatattacccgttcgccgcaggggcgtccggtaattatcgaagcgggttcctccgctgacggccagaaactggctgcggccaccgccgaagtcgtgtttaccgctgccgcaacgctggaagaagcgcaaacattttaccgtgcgcagaaacagcaggtgaaagaggccggacgtaatccggagcatatgctgattttgccgggtgtaatgcccattgtcggccgcacgcgggaagaggcgcgcgaaacctggcacgaactgaattcgctggtggatattgataacggcatccgccagctgtccactcgctttaatatggatctgagcgtgtttccgctcgacgggccggtgccggatgtgcctgccggtgaaggtaatcagagccgtgtgaaactgctgaccgatctggcatatcgcgaaaatctgaccttacgtgaactggccgcaattgctgccggttcgcgtgggcatcgcgtgctggtcggtacggcggaagatatcgccgatgatttccagcactggctggaagaaggcggagcagacggtttcaacatcatgcctgcagtgatgccggaacagctttcgctgtttgttgagctggtgatccccgaattacgtcgccgtgggttgttccgtgaagaatacgaattcagcacgctgcgtgaaaacctcggtctgcctgagcctgactttaaccctcagacttaa

SEQ ID NO: 178338 - DNA, 1086 bp, Klebsiella oxytoca
gtgttcgccataaaatcaccgcagacctatcatcatcagcccggcctgctttcacgtaccggtgagctgcttgccgttcattcctccgatatcgcgatcatcaccagcccgaaagcgtggcgggcagtgaatccgcaactggaaaccagcctgaaggcagccggtattcgctggcaggtcaattttctcaccacggaatgcaccgatgcggctatcgaaaaacatctggtcagcgtgcgggaacaaaacgccacgctggtgctgggcattggtggtgggcgggtgcttgattgtgccaaagcggtggcgaacctgctgaccgacgtcgggctggtgacaataccgacagttgccgcgacctgcgccgcctggtcgccggtcagcatcatttataatgagcacggcgggcatgtgcgcagccagccattgtcgcgtatgccacttatgctgctggtcgacacgaatgtgattgcgcaaaacgatgtgcgttatctcaaagcaggcattgtggatgcgctggctaaatggtacgaattccgcccgtataaacagaaaagcgacgatagtctggcgctgaacctgaaagtgcaggcagcacaactggcggtggacgtctttgaacaatatggcgctcaggcggtgaaagacaacgcccgccatgtagtcacgccggcgctgatgaaagttatcgacgctaatatcgcggtggcaggtatggctaacagcatgcgcgatgaaacccccgcgccgggcgtggcgcacgcgatccacaaccgtttcacccatcagccggaattgcatgactggctgcacggcgagaaagtgggtttcgggttgctggtgcagtcgctgatggaaagctataacggccagccggagctgcagttgctggggttgttgcgtcaatatggcgcgccgctggcactgccgccactgaatggcgaccgggacacgatcatcgcggccattgcccgcgaagtgaaattctccaccgaaaatgccgaccgtttgccgttctcagtggcagcggaaaatatcgaaaaagccctgcgggcaactgaagttcatcattattctcagggataa

SEQ ID NO: 178339 - DNA, 1383 bp, Klebsiella oxytoca
atgtcctcacatccgatagattttcttttacttggtaacaattttggcacaccagaaatgcgggaaatctggtcagagcaaaatcgcctgacacagcaaatcaatgtcgaagttgcgctggcattagccgaaggtgagctgggtgtaatcccgcaacaggccgcgctgaccattgctgagctggccgatgccagccagctgaatattgaggatatcgccgcttctggctcgcagatgaagcattccctgatgccggtgctcagcgcactacaacagcaatgtggtgacgcaggggaatacattcattacggcgcgaccacgcaggatatcgtcgataccgccaccgttttacagctggcgcaaaccctgaaagcgatcgtccgtgacagtaccgccgtggcgaatgtgctgaaatctctggcgtgcgagcatcagtacacgctgatggctggccgcacccacggcatgcaggcgctgccgaccacatttggttttaaagtcgccgtctggctggatgaatttatccgccatctcgaccgcctggacgccatcacgccgcgcctgctgaccggcaatatcagcggagcgatcagtacctacgccgcactgggcgaagcgggtccggaagttgaacgccgcacactggcgcgcctgaaccttaatacgccgaatatcggctggcaggccgcgcgtgaccgcttttctgaatacgcctcggtggcggtgctgatcagcggcacgctgggcaaaattggcaacgaactttacaacctgatgcgcaccgaaattaatgaaatcgaagaaccattcagcagtggaaaaatcggctccaccaccatgccgcacaaacgcaatcctgcagccctcgaaggtctcgccagcctgacccaaccgttgttgcacagcgcatctctgatttatcagtcaatgcacgtggagcatgaacgtgatgcgatgagctggcgcgccgagtggatcaccctgccggaaatctcgatttatctctctgcccagttgcaaaatgcccaagcgattctctccggcctgacggtcaataaagcccgtatgctggcgaatttacagatgcaggacggcctgctgctgtccgaaaaagtgatgtttgaggtcggtaaaaaactcggcaaacaaactgcacatcatctggtgtatgactgtgccatgcaggcgtttgaaaaacggcaatcatttaaaactgttctgcttgcgcatccggtgctggcagccagtattactgaacaggatcttgaccactggttagatccggctcattacaccggctgcgccgcgcaaaaagtcgatgacgtcatccgttttgccgtgcagtccggtcatctgagttctcctgaggagcacgggttatga

SEQ ID NO: 178340 - DNA, 537 bp, Klebsiella oxytoca
atgacgcaccatttcaggcgtctgacgctggatgataaacacgattatctggcgctgatgctggccgcctacgcgcccattaaagcgctcgggattcagtttgatgcggccaccgccgatctggcacgcgtgacgcaacatctcgacgatcatgcggtgtttgcgctgtttgatgaccatcgaatggtcgcttctgtcaccctgcgtttcccgtggggcgcaatgcctgggccgatgggcctgccgcatattggctggttcggcacgcatccggactacaccggtcagagcctcggcaaaaaactgctgggctggctggaaaacaacattctgatccgcgaactgaaagccccggcttactccctcggcaccgccaccagccatccgtggctgcgcgacatgtatctgaaactgggttttcaaccggtcttcgaaagagacctcggcaaagggcatatcacgctgtacctgaaaaaaattctcgatgaaaaaagccacacccgctggctggaacgtcagccacctacaggagtttaa

SEQ ID NO: 178341 - DNA, 1185 bp, Klebsiella oxytoca
atgtcagatatcacgcaagaccatcagcctgtggcggcgttcattcaggatttccgccaccacatgcaccgctatccggaactgtccaacgaagaagttaacaccaccgccagcatcagggaggcactggagaagtatcaaatccgcgtgttggatttgccgctcaaaaccggtctggtagcagaaattggcggcatcaatcccggtgaactggtggtgctacgttctgatatcgatgctctgccaattgaagaacaatccggcgtggattacacctcgcaaaatcccggtgtgatgcacgcctgcggccacgatttccacacctcggcggcgctcggcgcggcgattttgctgaaagcgcaggaagagtcgctttccggcacggtgcgcatactgtttcaggcggcggaagaaaccggtcacggagccccggcgctgattgataccggcgcgctcgataacgccgccgtcattttcggcattcataacgatccctctttgccggtcggcgttatcggcagcaaagacggcgcattaacagcgggcgtggatcgctttgcgatcgccatttccggtaccggcagccacgcggcacgtccgcacgaaggcaacgacccgattattatcgccggacaggtgatttccgcactgcaaaccctgatcgcccgcaacgtgccgtccgcacacaacgcggtgatatccatcactcaggttcacagtggcagtacctggaacgtaatcccggattccgcctggctggaaggcactgtccgcacctttaatcaggatacacgagaactgatcgagcgccgtttccggcaggttctcgcaggcatcgctgcggcatttgataccgacatcagcctggactggcagccaggcccgccgtcagtggtcaatacggctaagtgggtggatttcgcgctggcgcgaggcgaaggctccggcttcgaagcccgtcgcgttgaagccagcccgattggcgaagacttcgcgttctatcagcaaaaattacccggcgcgttcatcatgatcggctccggtggtccttacgcgctgcatcatccgcaatttcgcgttgacgatcgcgccctgtttccgactgcacattacctgtcgcaactggcggtacaggcactgcaaacgctgagtgcggaaattctcagcaaagaaaaaaaagattga

SEQ ID NO: 178342 - DNA, 1335 bp, Klebsiella oxytoca
atgacattaacgcagtcgctggcgaaacttatcgtcagttcatcccctactccagccgctcatgaggcagcccgcgaagggttactggattttctggcggttaccctgccggttttacgcggcgatttacccgatgcagggctgaacagtttgcatcaggtttaccgcgctggcgatcgggccacccacgcgttactgctcggatatgccggtcacgcgctggattttgatgatttccatcccgactttcgcggccatcccggcgtggtgattttgcccgcgctgttggcgctggcctcacaacggccagacatcagcggcgggcagtttctcgatgcgtacgtgaccggcgtggaaatggccggacgcctcgggctggccgccggttttcagcattacaaactcggttttcacaataccgccacgctcggcacgattgcggcctccgctgcctgtgcgcggctggtggatgccactgaacggcaaacggcgttgattctgggtttagcggcgacgcagtccgcagggttacgtgcgcagttcggtagtgacgtcaaaccgctgcacgccgggctggcggcgcagaccgccgtcattgccacacagctgacgctggcaggctttcacggccaggcagacaacgtgcttgacagctttttatcggcttactgcgccggtcagcaacagccggaaaaactcatttcagactggggcgcgccgtggcggattgtctcgcccggtctggaattcaaaccctatccgacctgcggtggcacgcacagcgctgccgatgccgcgcggactattcgttatgactggctgcaaaccggtcaaggcacagatgcactgatcggcgccatcgaacggatagaggtgtctttcccgccgggcggtgatattgcggcgtcggtacgaaaaccggcaaccggcgttgaagcgcggttcagcctggaatacgtgattgcagcctgtctgctgcgcggagacttacgcttagaggatttcaccccgcaagcggtggaagccgacattgccgcactggcagagcgtgtctcgcgttgcccggatttctccgcaccgccggacgagctgaaccccgctgcgcgttttcatcaggtgacggtattcctgcgcgacggcactctgctgcaacggcgtttcacccgtcagcaaagtctggcgatcccgtttgatttgccggcgaaactgcgcacctgtttgccggatttcactgacgcacagcggacagaaatcgtggcactgagcaggctggaaagccgcgacagtctgccacggcttgcagagatgttgtttgggaaacgggttaaggaataa

SEQ ID NO: 178343 - DNA, 762 bp, Klebsiella oxytoca
atgggtgaggccattgaatttcgcaaagtcaccaagcgtttctccggtaatatcatactggatgaaatcagcctcgatattccggccggttcggtcacggtgatcctcgggccttctggttcagggaaatccaccttgctgcgctgtatcaatcatcttgaaaaactcgatggcggcacaatccgtatcggaggtgaactggtcggttatcagcagaaaggttccgcgctgtatgaactgagcagccgcaaaattgccgcacagcgcagccgtaccggcatggtgtttcagcaatttaacctgtttccgcaccgtacggttttgcaaaatattatcgatgcaccgctgcgggtgaagaagcaaaaccgtcagcaggtagtcagtaaagcccgcgcgttgctccggcaggtcggcttagacaaccgcgaagatgactggcctcagcagctttccggtggccagcaacaacgcgtggcaattgcccgtgcgctggcgatggacccggaagtgatgttattcgatgaaccgacctccgcgctggatcccgaactggtgggcgaagtgttgcaggtgatcaaaaagctggcgcattcagggataacgatggtgatcgtcacccacgaaatcggctttgcacgtgaagtggcggataatgtcatttttatggagggcggaaaaattgtggcgtcagggccgacgaaaagcgtgctggatgaaacggagaacgtccgtgtccgccattttctgtcgactgttttataa

SEQ ID NO: 178344 - DNA, 939 bp, Klebsiella oxytoca
atgagcagtgaaacacacgatcagcaggcggaagaactacggatcgtcggtaaaaaatatatcgggcgctggataagcgccctgatcgtattgctgatattgctggctatggggaactccatgctcagcaatccgcgttttgaatggtcggtaatcgccgaaaactttaccggtccgtcaatcattcagggcgtactgatgacgttgcggttgaccgcaatttccgtggtttttggttttgcaggcggcacggttcttgcgctgatgcgcctgtcatccaatccggtgctggtcgctgtcagctggggttatacctggtttttccggggggtgccgatgctggtccagttgtttctctggtacaacattgccgcgctttacccgaatatttcgatttcgctgccgtgggcaggtgaaatctggagcgcttccgcgaactcactgattagcccgttcagcgccgccgtgattgcattagtcatgcatcagtctgcctatgccgcagagattatccgcgccggtattcagagcgtcggcaccgggcaagtcgaggcggcacgcgccctgggttaccgcccgtcacagatattccgccacaccattttgccgcaggcgatgcgggctattctgcctcctgcggggaatgaagtgatcggtcagctgaaaaccaccgcggtcgtttcggtgatttcattacaggatgtgctgttctcggcgcagattatttatcagcgcacctatgaagtgatcccgctgctgctggtcgccacattatggtacctgttgctgacgtcgttgctgtcggtgattcagtattacgtcgaacgacatttcagccgcagcagccacaggaaggtaaaacgtaaagtcacgaaaaccggcgcagcccgcacggtcagcaccgtcagtctcagcgcaggagaaaccagccatgggtga

SEQ ID NO: 178345 - DNA, 897 bp, Klebsiella oxytoca
atgacgttatctaaattactgctccctttgctgattgccggaaatctctcttctgcatgggctgcggagcaggttgttccgtcttcgaccacctttcatgtcaccgctgatgatgcgctgaaaagtaagcttccggcggacatcgccaaacgcggatatattgttgcaggtactaatccgaatactccgccaaccacttttttccaggaagacaataaaacgctcgccgggcgcgagattgatgtgatgaatgccgtggcggcaaggctcggtgtggaagtgcgctggcaggataccggcggtttcgacaacatcattccggggctgaaatccggtcgctatgacgtcgcgctatccaatatcaatgccaccaaaaaacgtctcgagcaggtcgatttcgtcagttattacgatgcgtcgcgcctgggggtgatctcgcgtaaagacgcaaacattgcgccatttacctcttttgacgccgtgtgcgggcaggaagtgggcgcaggagcgggtactacgcagatcgggcgccttgaagcggccagcaaaatttgtactgatgccggtaaacccccgatcaagattgccgtattcccggatcgcccttcaggcgtacaggccgtggtcagcggtcgggtaccgatgttcttcggcccgtatgaaggtctgacgtatcaggttagtcaggtcaaaccgctgacgctgaccggcaccattcatgtggatgatgcgcctgtatctgtggcgttccctaaacagtcggggctggaagaggcggtgcaggcatccctgaactcgctgatcaaagacggcacttaccagcagatcctcgataaatggtccatcggttttggcgcagtcaaagagtcaaaacgtaatgaagagattttcggatga

SEQ ID NO: 178346 - DNA, 960 bp, Klebsiella oxytoca
atgaaagcagcggtctatgacgtggaaggcgctcccggcgtcctgaaatatgtcgatgtcccggagccggtcacagggcccgacgacattctgatttctgtcgaggctatctcgattgagggtggcgatttgatcaaccgccgttcaacgccgccgccgcttccttcatggatcgttggctacgcggccgcgggcacagttgttgccgtcggatcgaaagtccgaagccgtacggttggggacagagtcgctgcttttcacatgcagggatcgcatgcggaacgttgggctgtgcccgcggaacgcacctggcttatacccgatggggtgggaatggcagaagcggcagcgttgccgatttcatttggtaccgcgcatcattgccttttcacgcgaggcatgctccggcagggagaaaccgttcttattcaggccgcagcgggtggcgtggggctcgcggccgttcagcttgcctcacaagcaggcgcaacggtcatcgccgtggtaagcggaacgcagcgacgaggtcggttgcgtgaacttggtgccgatcatgttgtggatcgtacaaaggataacatcgtggacagtgtccgacagtacacccatggtaccggtgttgacctcgtcatcgatccggtgggaacgacgttgcctgtttcgctttctgcactcgctccggaaggtcgtctggtcttcgtcggtaatgctggcggcgacagtctgactgtcgacttatggccggcaatgcagtctaaccagacgctcatgggggtattcatgggacctctttttgcaaggcatggagttcgaaccagcgtggacgagatgctgcaggctgtagcagcagggcgcgtcacggttgtcattgaccgcatctttcccctggctaacgctgccgcggcccacgaatttgctgagacagcgaaaccgcttggccggatcgtgatgaagccatga

SEQ ID NO: 178347 - DNA, 396 bp, Klebsiella oxytoca
atgacagcacgcgaagccgtttttcccctcggtcggcaggcgctctatgagcgcaatcgctattcaccggccatcaaatccaatggtttcttgttcgtttccgggcaggttggtagccgcgaggatggttcgcctgagcccgatctaaaagcgcaggtcaggctggcattcaataatctcaatgctgttctcgcggctgcgggctgcacgttcggtgacgtggttgacgtgactctctttgtcgtcgaccccgagtcaaatctcgacgctatctggagtatcctgccagaatattggggggaagcgccttaccctacgttgaccgggatcggcgtgacgtggctttacggattccagtttgagattaaggtgattgccaggctgccctgcgcgtga

SEQ ID NO: 178348 - DNA, 921 bp, Klebsiella oxytoca
atggatcgtttcgatgcgatgcgcgcctttgctcgcgtggtggaagcagggagcttcacaaaggctgcccaaacgcttcatatgagtaaaaccacggtgacgcagctcattcagcagctggaagcgcgcctgcgcgtcaagttgctccatcgcaccacccgcaggctcggcgtgactgccgatggcgcggtctactacgagcgcgtcatccgcctgctggcggacatggaggatgctgaaaacaggctgtccagtgcggcgatgacccccaggggacggctacgggtggatgtgcccagtccgctggcccgcctcgtcctggtaccggcgctaccggctttccacgcgcgctaccctgacatccagttcgacatgggcgtcagcgaccgggtggtggacctgatcggcgacaacgtggattgcgtcctgcgcggtggcgacatcaacgaccagtccctgatcgcgcgccatgtcggcgatttgcaaatcggcgtctacgccgcccctggctatgcggaacgccttggcgcccctgcgcacccgcgagagctggaaaacaccgaccatcgcatagtgggattcttgtcctcgcgcaccggtaagattgatcctctggtcctgcgcagtgggagtgaacatattgaaatcacaggccgctatgtacttgccgtggatgatggcaacgcttacctcgaagcggggctcgctggcttaggtgtgattgcgctgccaacctatatggcggcaaaacatcgggccagtggcgctttaattccgttatttgaacaatggcgtatcagtccaatgccattgtacctggcgtttccgccgaaccgccatgtcaacgccaaactgcgtgtttttattgattggatcgttgaattgatgcagcagcatgttcccaattccaataataagtaa

SEQ ID NO: 178349 - DNA, 930 bp, Klebsiella oxytoca
atgtcgcttcgcaagttttgttttgcttctccgccgaaagggcggatttttatcgccgcgctggtctccacgctttatggcattaacgcttacgccaggccggatatgcgcccgctggggccgaatatcgccgaccgcggctccgcgtattatcacttcaacgttgcttatttcgattcccttgatggcgaacggcattataaggtctggacggcgataccgaacgcggcgccgcccgcgcaggggtatccgattctgtacgccctggacggcaacgcggtgatggaccggttgtccgactcgctgcttgagacgtttacgcaaaaaacgccgcccgttattgtggccatcggctatcaaacgaatttgcccttcgatcagcccgcccgcgcttatgactaccggccgaaagtagaggagaatcctgccgacgccggatgggaccgacggaagagcggcggcagcgaggcatttcgccagctattagaaaataccatcgtggaaaaagttgagcgcgggatcgctatcaaccctcagcagcgggctatctgggggcactcctatggcggattattcatcattgacgcctggctggcgtcatcccgcttccaaatctatttttctgccagtccttctctgggacggggcaacgcctcgctgttagcaaaaatggccgcggcgaaggcggatgcgtttaaccggaagtccctgtacctgatggagggggcggttgcgacccagcgggcctcttccgcgggagcagaagagatccggggcaacgtcctgcagacggtttccctgctcaagaaaaatggcgtggcggtcaactggtggccctatcccgggctatctcacggggagatgtttagcgcctcgctgcaaagcgcgctgctggcgatgagcggttttccccggggctcgggcaattag

SEQ ID NO: 178350 - DNA, 258 bp, Klebsiella oxytoca
atggaatggtggattaagaaactacgcgaggcctcgacgtctacacatacccacgcggttctgcaaagcggccagctaaccatcattgcggaactcacttcctgcggccggcgtctacaggagggcgataagctgacgccgctggctaacgcgctgtactgcattaacgacaataagtcgctcaccctaaaagtgctcaacgccacgcatttcagcgctgaacgctggggcgccatcgcgaatatcaccgcgcattaa

SEQ ID NO: 178351 - DNA, 333 bp, Klebsiella oxytoca
atggacagaggggaaatctggctcgtttcactggatccgattgcaggccacgagcaaagcggaaaacgtccggtgcttatcgtatcgaaggcatcgtttaacaagctgacccggttacccgttgttgttcccatcaccagcggtggaaattttgctcgcacggcaggtttcaccgtttcactggaaggggcagggacaaaaacaacgggcgttattcgctgcgaccagcccagaaccattgatatggctgcccggaacggcaagcggctggaaagcataccagacgctgtggtaaatgaagtgcttgccaggctggatgcaattttaagttaa

SEQ ID NO: 178352 - DNA, 258 bp, Klebsiella oxytoca
atgtataccactcgcctgaaaaaggtcggcggatccatcatgttggcggttcctcccgccgtgctcaaaacgctggagttgtcgacggacagcgaagtcggcatgaccattaataatggctgcctgattattgaaccccagaaacggcctcattattctcttgaggaactgctggcgcagtgcgatccgcacgccgaaatgagcgaagaggatcgggaatggattgatgctcctgcggtgggcaaggagatcctgtag

SEQ ID NO: 178353 - DNA, 348 bp, Klebsiella oxytoca
atgatttttgaggcgaaagcttggggcgttccttttgtttctgcccgcaaccctgaagacagagccaaggacgaagatctcatcgttatggcaattcgtcatatactgaatgacaaagcgggagccgaccaaactgggttcaaaaacgccaggtatatcgccgccattttcgtcagcgataccaaccccggcggctaccgggaggatcggggctacaacgggtttagcggtattagcgctcgcactgccccggtatcacggaagcggacagcgttaacggcgcgggatggcgaccggacgataaagccgcagaagcgtcaggcgtacagacgatacaaaatagcgtga

SEQ ID NO: 178354 - DNA, 915 bp, Klebsiella oxytoca
atgaaaaatattcccgaattgcaacatgtagaaatgcttattcttattgtgaagcatggaagttttcgtcaggcagcaaaagagttgaatatttctccaccaacgttaactattgccataaataatctggaagagaaactgggcgcgaggcttttaaatcgttctacgcgcagtctttccctgaccgctatcggccaggagtttctgaatgacgttactcctgtgctcaatgactacaggcgggtgattgataaccttaatgagcacagagcaaagccggaaggggtggtgagactcaatttgccacgcattgtgctggatctcttctttcaacgttacttcgcaccgttcaaaaatgagtatccggatattaaacttgagttattcaccacggacagaaaagtcaatattatagattcaggatttgatgcgggtatacgctatacgcaagatgtgcctaaagatatgattgccataccctttggagagccgctatctcttattccagtggcgagtgcggattttataaataaatgcggcgcaccctcttcaccaaaagatctcgttaatttcagatgcattaatcgttgctttccaggtggggaactgtaccgatgggagtttattagcgctacgggcgttataacggaagtggctgtgaagggcgatctggtgatggattccgatgcggcgatgatacaggctgcggaatccggattaggtattgcctttgtatatgagaatctggttcaggataaaattaaagaaggcgggcttgtccgcttactgtctgattatcgttatcctgccgatcattttaatatttactatccgagccgcaaacatatcccggtccccctgagaacatttataacatgggtgatgtcgatgaataaaaatatcctgcagcaatag

SEQ ID NO: 178355 - DNA, 999 bp, Klebsiella oxytoca
atggaaacacgttatctgggaaagaataaatttcaggtgtcggcattaggtctgggttgtatgggaatgagttttgcctatggcggagccgaagagtcgcaggcaattaacaccattcacgctgcggttgatttgggcgtcaccttccttgataccgcagaagtttatggcccatttgataatgaagtgctgatcggaaaagcaatcaaaggcgttcgcgataaggtacagattgcgaccaaatttggtttccgcattcttcctggcggtcaggggcttgagcgtatggccggcgttgacagccgtcctgaacatatccgcgaagcggtagaaggctccctaaaacgtctcaacgtcgagactattgatctcctttatcagcaccgcgttgatcccaccgtccccgttgaagacgtggtgggaacaatggcagatctgatcaaggaagggaaaattctccatatcggactttccgaggtctctgccaatactttacgccgggcctgtgaagttcatccgatcgccgccgttcagactgaatattctctctggacccgcgagccggaagaaaacattcttaaaacttgccgcgaattaggggtaggatttgtgccctatagcccgctgggtcgtggatttttaaccggcaaaatcaccgatcggtccggcttcgccgaggatgattttcggcgcaatcttcctcgcttccagcacgatgccatgcggaaaaaccagcagctactcagccagctgcgggatgtggccgataaatatcgctctaccctggcccagctcgctctcgcgtgggtgatgagtaaaggcgatgatatcgtccccattcccggcgcgcgccaaatcgcgcatttgcaggataatgccggcgcagccagcctggctatttccgatgttgatattaaactcatcgatcgcatctttacccctgacaatattcacggattaaggtatacccagggtgattttcatttaatcgataagtaa

SEQ ID NO: 178356 - DNA, 927 bp, Klebsiella oxytoca
atggcggattttccccctattgcgagtttacgtagttttgaagccgttgcgcgtcttggcagcgtgacgctggcggcgaaagagctacacgttacgcattcagccatcagccagcagattaaagtgctggaggagatggtcggcctcaagctgtttatccgtcacggccgcggcgtgcagattaatgaagaagggcggctctatgccttacaggtccgcgaggctttgcaccatattgctgatgccacccggctggtgcaggtcaacccccgccggcaggagctgaccctggcgatggtgccctcattcggctgccactggttgttgcctcgcctggaacgatttcgggagaaatacccccatatctcgctgcgaatacaggcgagcctggcgataaccagcatgcagcaggaaggggcggatttggctatacgcatgggaaaaggcgactgggaaggaacggagagccattaccttttctccgatcagcttatcgttgtggccgcgccaacctataacggcggcgtgctcccccgtacgccgtcagagatagcgaagagcaacattatcttttccatggagtcgtggaaagcatggtgtatcaacgcggggcttgaaagagagattgtgccaggcggtttgtgcatcaacgactcaaacctggtgctggaggccgtccggctcggtaaaggtatcgcgctggaacgccgctctttagttcaggatgcgctctccagaggtgagctggtacagcttacgtctttcaccgccccttatccgtggccttactggctggtttcatcgcagggcgcagagcagaaaaacgaagccgttctatttaaggcctggcttgatggggaggttaccgcgtggcgccagcaaactggcgcggtggaggagaaatgtgcgcgagacggtaaaccttag

SEQ ID NO: 178357 - DNA, 618 bp, Klebsiella oxytoca
atgaagcttattggcatgatggattcgccttatgtaaggcgcgtggcgatttcccttgaactctacggcgtcgagtttgcaagtcacccgctgtccgtattcagcagctttgaagccttttccaggataaaccctgtggtcaaagcgccgacgctggtgctggataacggaattcgcctgatggattcgtcgctgatactctcttattttgaagcccaggccgccccggggcgcaagctgctgccggtcgcgccggacgcgctggcaagcgatctgcaaacgctgggctttattctcgccgcgggtgaaaaggcggtacaaaatgtctatgaacacaatctgcgcccggcggaaaagcagcataatccgtggatagcgcgcatcacgactcagctgctggcagcctgcacggagtggaacaggctactggaggagcgtctggaggagcgtccggcggccgcggttcccgatcaggtggccgtaacgagtacggttatctggacctttattcagtcaacgatccctcacgtggttcatgcgggagactttaatcatatccggtccgttgccgaattatttgaaacccatagcgcctttaaaaaacatccctttagctaa

SEQ ID NO: 178358 - DNA, 822 bp, Klebsiella oxytoca
atgatctacaaaattcaaggaacgatccatttcaggagcgatgatgggctgatatggctcgatgaagactcatgcgtcacgctgacagccaccacaagccgcctgcttaagttccttttagaccacagggagcatgtggtttacaggaacgagatacttgaaaaagtctgggatgcgcatgggctgcggacctctagccatagcctcaataaatatatttctgacctgagagccatcttcaggaatatgggctgtgtcgaggagattatcgttaccgtgccccgggttgggtttatggtgtccgcgagcatactgattgagagggtggataattcagcccctgtcatacgtaatgaaaacgatgcggaagctattgcgttaagcagcagcggctgtacacataagggaacacgtaaattttctgcgggatgggcaaaaaagtctggctatgcgctgcttgcgctatttgtgttggttatccttttctggagcgtgagtgccgaccgatatcgcctgatttttgcggccggccaggatgaaggctattatctgggaagcattgattcttgcccggtcagaacttttaacgccataccgaatgagcaacagcaaaagatgatggttctggtccgccagctgatcgcaaaacagaaaatggtgtgcttaggcaacagcgttttttactttaatatttcggaatctgttttaaaagccaatgagggaaggatttttttggcccactgtatctactcaaaaataaaaccaggtgcgctgtattcatgtgagaactactataggcctgattatgaaattcctgaataa

SEQ ID NO: 178359 - DNA, 801 bp, Klebsiella oxytoca
gtggctgccgctcagatagagcgtggcggtgcgccccagctgctgggtgacgctaagctgcactttgccgcgcttgttgtaagcgaggttgtagtagtcggtgaatttaggcttcacttcaatcaccccgtcctgggtctcgacgttgtagccgctcatccggctgtaggtggtatcggcgaagctgaagtagccgcgggtcgagtagcggtagcccaccagctgaatattggtgccggtatccgtcagcgacttgttatagaggaaacgcaccgactgcccctgatgctcgctgtcatcgggcagggtggcgttagcctgggtgatatccagcgacagcgcgcccaggtcacccatgtttttccccacgccgaggttaaaggcgcggtagcggtccgccagctgggtgccgccgtacagcgtccagcccgccgggaggccgtggagcaaggtgccctggaaaaatttcggtttttcctgctgattgctgccgctgcggtactcgccggcggtagcggcatagcgggtatggccctcgcgctggagcaccggaacggacgagtaggggacggagaagacctggctgctgccgtcggcctctttgatggtcacctgcaggtcgccgccgttgcctgcggcgtagagatcgttgatggtaaacgggccgggcggcaccgtgctctggtagatctcatagccgttctgtttgaccgatacctgagccgtgccccgggcaatcccgtgaatgaccggggcgaaccccttctggctgtccggcagcatattgtcgtcggaagctag

SEQ ID NO: 178360 - DNA, 204 bp, Klebsiella oxytoca
gtgcgcggtctggtgacggagatgactgacccgggcgacgagctgcaggcctcacacccgctgcgcgacgcgaaggtggtggtggaagatatcgaggacaatccgggcttcttccgggtgaagctgtacgcggtgccgcacttccaggtggaagggatggacgtgaacctgtctctggtcagccagatgccaaaggcgaaataa

SEQ ID NO: 178361 - DNA, 1341 bp, Klebsiella oxytoca
atgaaaacggaacaaccgttatggggcaggggcgttatggtctctccccagcacttccagcagcaggccgcgtattcagcctggtctgcggaatgtatcgcccgactcgggctttctcatccctgggggatgatcgatgccacattcgaatcggatgcactgaaactgggccgcctgcaggcccgtcatctgcatatccgtttccccgacgggacattaatcgatacggataacgctgacgatttgccaccggtactggcgcttgagaatgaatcgcagcacgtggtggtggtactggcccttccgctgctgcgggcgaacggcggcaactgcctgaaacccgatgaggtggctgagcgtcctgttcgctatcggcagcgctggcgggatgtccgcaacgcctttggggaagatacccgccagattgcggtgatgcgcccggagctgacgctgcgtttcgcccatcagaataacagcgattacctgacctgtccgatcgcccgcctgcagcaggattcgcagagggcgtggcaacttgatgagacgtttcttcccccgctcctggccatccagggtagccgctggctgatgacccaactggagcaactgatgacccagttgcgtacccgcctgagccgcctgatggatatgcgcagggaaagcaacgaacggatggcggattttgccgtggccgatgtgtccctgttctggttgctcaatgctctgaacagcgctgagcccgtgctcggacagtttcagcgccatccgcaaagcccgccggagcgtctgtatccggagctggcccgtctggcgggcagcctgctgaccttctcgctggagcaccaggtgagtgcgatcccggtctggcagcatgagcaactgaataacgttttcccgccgctgtttgatttactgggtgacctgctggaagccagcctgccgtcgcgggtggtggcgattgaacttgagcacgatgcccggctgcacttctggcaggcccgtctgcatgatccgcgtctgcgtgaaggggcggattactatctctccgtgcgttcgcggatgtcggcggcacagctgcaggagcagttcccgcgccagtgcaaggtcggcagtcccgatcatgtcagaagtatcgtcaactcatcgcgggtgggcgtacctctcgcgccattgcgtcatgtaccggcagccattccactgcgtctggaaaaccagtacttcagcctggatgtctctcaccccctgaccaccgaaatgctccagagcggcacatgtatgttttacgttccgggaatgctcggcgagcctgaacttgaactttttgcggtactgagaacatga

SEQ ID NO: 178362 - DNA, 690 bp, Klebsiella oxytoca
atgagtgagcgtaaacgcggcggcgccgcgtccattgatatagatgccctgcttcaggatacctggctgcaggtgatcagcctgcgtcatggtccgatattccaggacggggaagggcgcacgctttgggaacgctgcattactgatgtcgaacgagtccagcgtgagctgaaagcgagcgaacttgatgaagccagctgtcagcatattctcacggcacagtgtgcgctgctcgatgaggcggtcaaaggtcgcggtgtggaggacgatgcctgcgtgcagtggtatgacattcccctgcaggggcacttccttggcactatggacgccggtgacacgctgtgcgatcggatgcgcgatgtgctgcgtgaaccggctcctgaccacgctgttgtgacctgcttccagcgagtcatgatgctgggtttcctcggcaatttccgctctctgaacgaccctgaacgccagaaactcattaatgcacttggtgaatatgtcacgccgttcagctatccacaaacccatcctgtcctggtggaaagccgtgccggacgggaaatgggcggctggctggcatcatggcccgtacgtattggcctgagcgtggtggtggtcgccgcactctggtggggactggatcgctggctggatcagatgctgcagaccctgttgccgggagcggtgaaatga

SEQ ID NO: 178363 - DNA, 1713 bp, Klebsiella oxytoca
atgagccctgcgcaacagcgtggacttgcgctgtgggccgccttgctaagtaccgtggtctgcctgggttttctgtcggtcacccgactggtgtcagtactcgttctgcttaccgttctggggcttatcatggcgtgctggtatgtcgccagtcgtcgcgcgcggcatgacgtcaccctgcaactggataacctaccggaagccacttaccgtcagcccgtggtgctggtctgcggcgatctgccgctggcctggccgcatcaatcaccggtactcatcgtcccgcagggatgctggatccgcgtggaggatcatcaggacctggagcaggtagcccgccagatactgtggctgcgccctgactgggggcgtcagctgtcggtaatggtttgtgtctgtccgcagcaacacccggacagcgaagccctgatcagtcgtctgctgaccctgcgctggcgcatcagccagctgcgtaaagaaacgggtcattctgtgccactgattctgaatggtcaggtcggcagcgcgatgacgaatgacctattctggcagatggctctcccgggtgaaggggtgagggtctggcgtgaatcttcagttccgggctctgtcgctgcatgggtcaccgccggcggaacgcctgcgatgcagcagcaggtgttgatgaacagcctgatgagctggttccatcagcacgtccaggctgtttttatggatgagaaccccgatgtgccggtcattgcccctgccgcagtgctgtggggcatgagaccaatccttgccggaagcctgaccacatcggcctggacggcgtggttgtcccgtcacaccgcgatgcaacaggtgaccggctggcagccggtgggaacggacagtacggttatttccccgttgccggattttgtcctgccattgctgccggaagggcgaggcctgacgccgcgtgacaaagccttccgctatgcgctcgggatcttcacgctggcgactatcgctgcgctgctcagcagtggctggaacaatcgccagcagctgcaacgcgtgagcttcgatattacccgttacgaccgcatctctatggatgactacggcccgaaagccgccgccgttgcggccctgcgcgaggatgcggcattgctggacgaccatgcacgtaacggcgtaccggcccggctgagcctgggtttgtatcagggcgggcgtctgcgcatgccggtgctggaagcgatccgctcgtatgtgccgccgccactgccgcctgaaccacagccgaaacccaaaccggtagcgaaaattatccgcctcgacagcatgtcgctgttcgactcgggcaagtacgacctcaagccaggctccaccaaaatgctgatcaattcactggtgggcgttaaggccagaccgggctggctgattgtcgtgtccgggcataccgataacaccggcaatccgcaactgaaccagacgctttctcagaaacgtgccgaagcggtgcgcgactggatgcgcgacaccggcgacgtgccggaaagctgttttgcggtgcagggttacggcgaaagccgtcctgtcgccaccaacgacaccccggagggccgtgcgctcaaccgccgtgtcgaaatcagtctggtaccgcaggccaatgcctgtcagatacccggcaaatacccggcgtcatcgcaggatgatggcgcatcacaacacaatggagagtaa

SEQ ID NO: 178364 - DNA, 492 bp, Klebsiella oxytoca
atggcaattcctgtttatctttggctgaaagacgacggcggtgcggacattaaaggatctgtggacgttcaggatcgcgagggcagcatcgaagttgtcgctcaggagcataacctgtacatcccgaccgataacaacaccggcaaactgaccggcacccgtatccacacgcctttcctgttcaccaaggaaatcgactcgtccagcccgtatctgtacaaggcggtgaccaccggtcagaccctcaagtctgcggaattcaagtggtacaagatcaacgacgcgggccaggaagtggagtacttcaacaccaaactcgaaaacgtgaaggtggtgaaagtgagccctgaaatgtacgacatcaaggatccttctaaagagaagcacaaccatcttgagcgcgtagaactgcgttacgaaaaaatcacctggacctacaaagacggcaacatcattcattccgatagctggaacgaacgcgccaccgcgtaa

SEQ ID NO: 178365 - DNA, 366 bp, Klebsiella oxytoca
atggaaaatccagccagcctgttgcgatgtctgaacccttactgtgcccgtgcgatggaaggggcggcttcgctctgtcagactcgcacccatgcgaaaattttgccggggcactggctgctggcctcgcttgccggagagcagagcatccgcagcattcatctgctgatggcgctgggcgggaaacctaacctggctcgctgtgatgggctgtggcccttactgacgcttggccagagccaactggagcgcctgcgcccgttactggatgcgcaatctgacgagcggccggatctgcagccggaaatcgaactggctcagggtatcggactggagtttgacctcacagaaggagtgcacgcatga

SEQ ID NO: 178366 - DNA, 2343 bp, Klebsiella oxytoca
atgagcagtaatcctccgttaagattcagccacagccatcatctgctttcggtgaaaggctgtgacgccgagcccgatgtactggcgtttgaaggcgatgaagccctgagcacacccttccgctaccgtattgagttcaccagcgctgaccacgccatcagcaaagagatgatgctgatgaagcccggctccctgacgctgcaggccccggttgaccagggctacggcatcaaaatccggcagccggtgcgggtgattcagggggtggtgacggggtttgaacgccttggcacctcaaaggacgaaacccgctacgccctgacgctgcagccacgcctggcgctgcttgaccgttcgcaccagaacgccatttaccaggacatgtccgtcccgcagattgtggagaaaatcctgcgcgagcgccacggcatgcgcggccaggattttctgttttcgctcaccagagagtatccacggcgtgagcaggtgatgcagtacggtgagaacgacctgcactttatcacccgcctgctgggtgaggtcggtatctggttccgcttcaccaccgacacgcgcctgaacatcgacgtggtggagttttacgacagccagcaggggtatgaaacaggcctgacgctgccgtcggtgccgccgtccgggcagcattcgcagggtgtggactcggtgtggaagatggagagccatcatagcgtggtgcagaagcaggtcagcacccgcgactacaactaccggcaggccacggaggacatgaatactctggtggacgcgacccgcggggatgccactacgtacggtgatgcctatcactgggcggataactacctgacggcgggaacgtcccatgaccgcaatccggcgccggagtccggggcgttttacgcccgcattcgtcacgagcgttacctgaatggccagacgcagacccgggccttcaccagctgtccgaccctctctccgggtatgctgctgaaagtcaccggcggggacgaagtggccgaggtgtttgcgcagggcgtggttgtcacggcgatgcacagccatgcccggcgtgatgaagactttggcgtccggtttgacggtatcccggacagcccggattttagtttccgccctgcgcccggcagccgtccggtgatggcaggcaccttaccggcccgcgtcaccagcaccaccgaaaatgacacctacgggcatatcgataaggacggccgctaccgcgtcaacatgctgtttgaccgtgacagctgggagaccgggttcgagagcctgtgggtccgtcagtcccgcccctacgcaggagatacttacggcctgcacctgccgctgctcgcgggcaccgaggtggcgataggctttgaagacggcaacccggaccggccgtacatcgccggggtgctgcacgactcggcgcacggcgaccacgtcaccatccgcaactacaaacgcaacgtcctgcgcacgccggcaaacaacaaaatccgcctcgacgacgagcgcgggaaagagcatatcaaggtcagcacggagtatggcggcaagagccagctgaatctcgggcatttagtggatgccgataagcagaagcgcggtgaaggctttgagctcaggacggacagctggggggctatccgggcgcagcagggtattttcatcaccgcagatgcacaaatcaaaggtcagggacaggttctggcgatggatgcggcgctggggacactcaatcaggcgcagcagttagcgaaatcactgagcgatgctgtagccactgcacaggctgaactcgcgcagatccaggcgcaaaaaacattgctggaatcctctctcaaggatctgcagcagtccgcgttgctgatgagcgccccggacgggatagctcaggtatcaccgcaaagtattcaaatcagcagcggacagaactttatccagacctccggagagaacagtgactttagcgtcttcaaaaaattcaccgttgcggcaggcgagatcatcagcctgtttgccaaaacgctgggcattaagatgtatgccaataagggtaaggttgatatccaggcacaaggggatgcaatgatgctgacctccctgaaaagcatgaccatcaccagtaaagacgatgaggtggtgattcaggcaagcaagaaaatgactttatgttgcggtaaaaccgctgtggtcatcgacccgtctggcgtcaacattctgacgccaggtgatgtgaatgccaaatcagccagcctgaaccatctggcatcacagagcttcagcccagcacaacctgaactgccgcctgcggccagctgtgtggagagtgcgcgctga

SEQ ID NO: 178367 - DNA, 873 bp, Klebsiella oxytoca
atggataccctcactaacttaactgatgccctgaatgccaggcagaatgaataccgctacctggtgcttgatccactaaaaaaggtagcgagctgggatccattgcacgcagacatgctcaggtatagccacggtaacgatgccctgcgcaggatattgcgtccggatttggcctggtcgccggagcattgtccgattctgctgttgcttgcttctccgggcgggtctctggatgaagatctggtccgaagcagtgaaacctatgcactcagagaaacactgtacgagaagcgctatgtctgctgctggctgagttcagcgctttcaccggatgaaatggctgtctggctggctgatttgtgcaaacacatcaaaccgggcgttagcatccctgtgttcgaacccctgcgccttgatctattgcaggcgactgctgaccctgagttgcttacgggtctacttgccgcaacgattcagtggcactggatgtcctgtacgggcgaactgaggacactgagtggtaaatccggtggtgatgcctggatgctgaactggggaactgaacaggcacaagctgaagtccgtaatatctggcgtttgctgtctgcctggcatgaatccagtgacgccttacctccagaggctgtgcgccttgccgctgatgtctggtctgcctctgagaaagcggggctgcatcatctcagtgaccgattatgcctggcgctcaatgctctgatcctgcccgttgatatcactacacatgctgtcgtacaggcccggctgcaggaagccgcggaaaacccggcgctgcactttacgcaactgcttcagaccctcccgccctttgcctggcaggaactgcgtcaggcatga

SEQ ID NO: 178368 - DNA, 3138 bp, Klebsiella oxytoca
atggatatgagagcacaggtaaataaaaacgcagcggcaagtcagcaggcagcatccacaccttcaggctgtaagtcgtgtgagcgtaagggggttgcgatatacccgctacgtgtggctgcagtcccggcttctctggtgaataccggctggcatcctgccgttcctcaccaggatatagagctgaaggggggcgagttcaaatacgccctgcgtacactgcgcgagggctatgtgtatgttctggcagataaacaggtctggtatgcctaccaggtcaccccgcagggctttttgcgcatgttcaatgcgaacgaaatgccggaaggagggaaagtggagcctctgagtgccgcctgtctgcagcagaatcatgatatccgcagcagctttatcaatatcgagccgaagcatacccatgcagccgtggccttcagcaatgacccgtggccccgggaagtgctggcgaaatataaacaagccggagccccggccccgcgttttacgcaagtgactattgctggtgggaaaacagcgacaattgaaggtgcggggcgcagcctgacgcttgaccccacgctttcagctctgacaaagaacgtgctggagtttgcgacagaaaaattcccgagtattgtcggaaaagaagggcagcccgatggcgcgtatggtttttatccgcgaagggatatcaggaagcagacggcgctgggtaataaggttgcggagttacaggagcagtacggtgtggtgcatgccattgtgctggatgatgccatcgggatggttcaggaattgaacagtgccagaatggatgtcgttaaggtaatgaccgactatcaggctaagactgaaaatcggcataagaagatgatatcagatgccattatacaaattcgggccggaatagcggaaaaaatagctacagatcccaccatccgagcgattcccggaaaatatcccatcagccgtgccaaacgggtatccatgaaaacccaggatgcgatggagcgactggaggactattaccatgagtcaattcgcgctgaatttgcctcgggttatcagtcaacggtagatggctaccagcggaagctgaaatctgtcgtacaggatttaagtgcggcttatcagtcggttttttggcataccgtgatcgagcatgattatgcgccagagatcagtgttatcagttgggctgcacttctgggcatgctagccggtaatctccacggtggcatggtagggatggacaaaagcgataaagcgactgatggcggtaaaaccgtctggctttcatggatgcaggacccgaaaagtccaccttacagggctttgctggcaggcagaaaagatctgccgacgtcggtctatgacgggacgatgacttacgccaatcttaaaacgctgctcaatagcgacgagatggggcatttccttaacagcgacgccttcaggcaaacaacagcaagcctggtgatgtcgctgaatggggcgttcagtcaactgagcaacgtgctttcagcgaaagctgaagccgggtttgtccggacaatgtcggccctggcctgtgcagcaggtgaagggcctgtggtggcggtttattccggagaaatgaccgtcagggattatcagaatgtcgtgcgtaagccattaaatacccacggacaatcagttctgactcaacgtcttgagaatgctgatagtatcatcagtgcttcccgggctggtcactggcctgaaatcaccgacccggtaatcctggaccgtaaaattcaggtcaaactggcggctcctttgaaaacggttgactcgttgatgtttaagcaggcagcacgcaaggcggggacaagcgcgtcggcgataaaatcggggaacttacttaaaaatccagctcagttggcagggctgccggacctgacaccagagatagtcagccactctctgacaacaggggaaattcctttaagcgccgcagatatgcgcagagtcgcaggctttcagtctgaactgccgccgagtttttatgcaggcagcctgggactggtgctagccggagtcatgcttggttttcagatccataccatgcacgagaatatgaaatcgctgaaaacctggctacctgactcacaatctgtaatgtcgcttggctcgggaacgcttttaatgatggcgactggggcagaaatcgtcgggcagacctatacgatgttccaggcgagcaaagagatggtgcacccaatgctgaaagtggctggagtgatcggtggcgtggcggtggtgattgatggtgtttcgacattgatgaaagctcgagatgttgcagagtctggtgatcaaaaagcagctgttgaatatgcatttgcgggagttataactgtttctgcgggaatcatcggtgttgcttttggttatgttggcaattttgcgcttttcagcgagactctacttttagggccagtgggctggtgtattgctctgggattagtggcgctgattttgacatccgctgctgacagcaatgttcgctcgccgctggagcgctggttgacccatacctgttttggcgtggttgaaaagcgcggcggtaaagagaaagcctggagtgccgccagcctgagtgatttgcaggaagcgatgaaagaattacataccattgccagcggtgtttcagcgcagctggttcgcgaccggatcactgagttctcgttcaattccacgatatcgggaaccgagatggtgtccgttctggcgacccttcccgattatagccagtccggttcagactggctggttgagttagctgccattgggagtggtgggcgtgaggtgctggcgcgtaacggttccccgacaaagcttgcaggcctggccaaaccagtgcctcaggctgttgaattgactcatatcatgagcatgaatgcggtagtcgttccacctgccattaaaatgacctctgcgcctgcactggatgaaacgctagtcacggcgggtaccagtaaaatactgcagctgagtggagaatacccgctaaatacccggcgcttcacgggcatggagctgaaagtcagttactggccagacagaacgtatccagaagaaattttgcaactttcagccaccatggacagccaataa

SEQ ID NO: 178369 - DNA, 807 bp, Klebsiella oxytoca
atgactgataatttttttgatcgtgcaaaaccgaagcttaatcctcccgtcagtgcctggaaggaggacctgccggagaataatcaaccacaattagtacctccgcagttgctctggctaaataaaataaatgacacctggctggaaattcctcgttacgataaagggatgacctggtggggaatgattccttctgcagtattaatgcttggttttaccatctactcgctttatagcattgtcataatgaaaatatcctggcatctcagcgggaatatattactccttgttgttttgttaagttttatgttttttttacattgctttttgttttgcatgaagttgtattttgtaactactcgggaccaacccgtccgtttcaacaaaaaaagacaaaatgtttatgtttttaaatgtaaaaaagatcgtattccgtggtttaaatggcctgtcattataacccgatataactgggctgatgttcacggtgaaatccggtattgcagcgatcgctaccgttcgggccatcagctatggggctcgatctgcgaaccgggaacgtataatgtcatccatcgttttcagcttgcagacggagagcccgcagagttacagcaagtctggagtttcctctgcctgtatatgaaaggcgagccagtgcccgcagagcccaaaaataaaggcaggcccgacagctggcgtccacgaaaagcagacaaatggccggaagagtgggagcgggaatccactaccgcaccagatggcagcactcctgttattcggttccgtgaaacgctgccggaataa

SEQ ID NO: 178370 - DNA, 801 bp, Klebsiella oxytoca
atgaccgacaatttgtttgctcgcgctaaaccgaagcttaaccctcccgtcagtgcctggaaagcggatatgccggaaaacagtgagccacagctggtgccacctcagttgctctggatgaataagataaataatgtgtatcttgagatcccccgttatgacaaagggatgacatggtggggcatgttcccattagcattagtagtggttttgtttttagggtttatgttaactatgtgtgctttgatgctgcaatacgtagatggctacgcaataccttgcttggcaatattgagcgttgtggttttatcgacattggcatttttttgtttgaaaattgcattcgttacacctcgcgatcagccaattcgtctgaactgcagacgacaaaatatttatgtctttaaatataaaaaagatcgtattccctggtttaaatggccggtcattataacccgatataactgggctgatgttcacggtgaaatccggtactgcagcgatcgctaccgttcgggccatcagctatggggctcggtctgcgaaccgggaacgtataatgtcatccatcgttttcagcttgcagacggagagcccgcagagttacagcaagtctggagtttcctctgcctgtatatgaaaggcgagccagtacccgcagagcccaaaaataaaggcaggcccgacagctggcgtccacgaaaagcagataaatggccggaagagtgggagcgggaatccaccaccgcaccagatggcagcactcctgttattcggttccgtgaaacgctgccggaataa

SEQ ID NO: 178371 - DNA, 801 bp, Klebsiella oxytoca
atgaccgacaatttgtttgctcgcgctaaaccgaagcttaaccctcccgtcagtgcctggaaatcagatatgccggaaaacagtgagccacagctggtaccacctcagttgctctggatgaataagataaatgatgtgtatcttgagatcccccgttatgacaaagggatgacatggtggggaatgattccatcagcattattcacttttggaataatggtttttgttatattagtttgcgtgcagatatctgaatatatagatggttacgcaatgcctggattgataatgctaagtatcacttttttttcaacaatgattttattttgtttgaaaattgcatttataacgccacgagatcagccagttcgcttaaatcgcggtcgccgtaaaatttacgtatataaatacaaaaaagaccgtatcccctggtttaaatggccggtcattatcacccactataactgggctgatgttcacggtgaaatccggtattgcagcgatcgctaccgttcgggccatcagctatggggctcggtctgcgaaccgggaacgtataatgtcatccatcgttttcagcttgcagacggagagcccgcagagttacagcaagtctggagtttcttctgcctgtatatgaaaggcgagccagtacccgcagagcccaaaaataaaggcaggcccgacagctggcgtccacgaaaagcagataaatggccggaagaatgggaacgggaatccaccaccgcaccagatggtcgcactcctgttatttggtcccgtgaaacgctgccggaataa

SEQ ID NO: 178372 - DNA, 819 bp, Klebsiella oxytoca
atgaccgacaatttgtttgctcgcgctaaaccgaagcttaaccctcccgtcagtgcctggaaagcggatatgccggaaagccgtgagccgcaactggtgcctccgcggcttatctggatgaataagataaatgatgtgtatcttgaaatcccccgttatgacaaagggatgacctggtggggaatgattccattagggggcggagtgtttggtatcattttttatatattaatcgatacgatatcaacacaaatacagagtgatggtagggactttattccatattttattgctctggcggggtttgtcttttttttaagtatgtttctaagttgtattaagatttattttattatgcctcgagaacaacctgttcgtttaaataaaatgaggcaaaggatttttgtttataaatataagcgcattgatcctatcccctggatgaaatggccggtcattataacccgatataactgggctgatgttcatggtgaaatccggtactgcagcgatcgctaccgttcgggccatcagctatggggctcggtctgcgaaccgggaacgtataatgtcatccatcgttttcagcttgcagacggagagcccgcagagttacagcaagtctggagtttcctctgtctgtatatgaaaggcgagccagtgcccgcagagcccaaaaataaaggcaggcccgacagctggcgtccacgaaaagcagataaatggccggaagagtgggagtgggaatccaccaccgctcctgatggcaaacaaccatccgtttcacaccaaaaaatattaactgactctgtaaaataa

SEQ ID NO: 178373 - DNA, 1149 bp, Klebsiella oxytoca
atgctgatgatcctgattggattttgtatcgtcatttcccgtctggtgacgggcaaaaataacgtgttgctgaccgtgggcgctcccgcgattatgcttggtgggttgctgtttattttgttcgtgatttatctgctgcgtgcaatttccgccaatgcccgggacagggagcgggaacagacgatcctcaaagaagttcgccggggcagacgtgcgctgcaaattctggcggccgaatgctgcacggcacactcctctgcgaataaaccgttcacggccattggcagcaatctcgtgaaaaatgagaatgtcttttatccccagcaatcctggcgcggggaggaagatacccgtctgagtcagatagcccgtaccgggggagccaaagaagagcagcatcttcaggcgttattcagggcactaatccgcaaactggcgcagccgctgtctttcctgccagcagacaagcccgtaatgatgcttctggagcactcctcgtctatatctgaggaggaagccttcgccctttttggggacgcattgcggcagtcaggtattcagcaatctgtttctacccttgccgggagcggtgcgcaggcgattgatcactggctcgaccatcatatccgcagcgaggctgtccttctggtggtgtcgtggcaatacgcaccgctcaatacctcaatgtccgctgaagctataagcggaatactgctggggaaccgactgacgcaggacatccttccgccgttggcctttcttcaccgcccggaagccggagaaggagagcctgacgcattgcactatgccattactcaggcgctcgattgggtgccggttggcgtcgaaaagccggagcatctttggcttagtggggttgatgctgaaaccgaagcgcatgccgctttgatgaaaggcattagtactacaggtctgaaaaatgtcgacccgcagatgggttttcataatttcaatgattttctgggtgatcctggtaacgcatcactctggcttgccgtggcaggtgccacacaatcaatacaacaacaaccggcacatcacttactgattagccgcgatcaacaaactggaaaggtctggaatatggttgtatcccctgcgtcttccgctaaggagggcgaagcatga

SEQ ID NO: 178374 - DNA, 3471 bp, Klebsiella oxytoca
atgaggcgattcctctcgctatttaaaaaaccggaaattgtgttctggcttttggtgttaattgtgctggtttgcagccttgccgtggtgagtatcgtctactggctgcctgaaaggctacagctcatcagggaaacctccgcctggtatgcctggctgagcggtactgtggcagcaagtattgcactggccataactggagtatttcttttctttggtgcgcgagctgaaggtaaacgtagcttcagtaaagagcggcaaaatgcgcagggtgatgatgttaagacgccaccaaagaaagatgtaacacccgtatctgctgcagtgacgacccgtcaacaaattctcaaccaccttcgtcgtcgctaccatcttttctggcgccacaaagtccgcctgctgttaatcaccggcgatgaagccgctatcgaacaactggttcccggcctgcaacagcagcagtggctcgaaggcaaccgcaccgtgctgatttacggcggcagcctggcaccggagcctgaccgcgaaaaatacaccgcattgcgcaagctgcgccgcggacgcccgctggacgggattgtccgtgtcatgcccccgtcacttaacctgaccccgcaaatcagcgacagcgatttacgcgggctggaaaaaatcagcgaactgctgcgttattccgccccggtctggctgtggcagctgtgcgacagcaactggtcgcagggtacgcgtcctgagcaggctgtgggggcaagttttcccctgcgcgcaaaagaagacgatattatccgccaactggagcggatgctcccggccctgcgggtgcagggggtaagccaggtcgctgagaacaacagccacgacttcctgctgcgtctgggccagcacctccaggacggcggtatcgtccgccgggctcagcaactgctaccatggctctcggtctctcagcaacgtgttccgctacgtggcctgatgttcagcctgccggagaatacatccgccagtacgtcagcgggaacggccgatgatgagcaatatatccctgaattacagcgccatgccctgaccctgccggcgacctggcagggtatcgttgacgactgcacccgtatatgtggccgccgcgtcggcatggcgtgggagaggacgcttgcctggacactgatgaccctcatcggtgtctggggggcggggacgctgctgtcgtttacgctcaaccgccagcagatagtctctgttgcgcagcaggcccatgccctggtggcgcatccttccgtgtcggacgaccagctgacggccctgcatgccctgcgtaatgatgccggtcgcctgcagcaccatgttcaggagggcacgccatggtatcagcgctttggccttgaccataacccgcagttgctcgacgcgatgctgccctggtacggcgtggcgaacaaccgcctgatacgcgacccggcaaatgccgcgctgaagcagaagctcagcgcgctggcaaactcggcccccaacagcgaccagcgggcgcagctggcgaaaccgggctacgaccagctgaaggcctggctgatgatggcccggccggataaagccgacggcgcattctacgcacagaccatgaaaaccgtgcagccgacacagacgggcatctcagccggtctgtggcagagcctggcgccggatttgtgggccttctacatcaccgaactgcctgcgcagccgcagtggacaatcacgccggatgcgcagttggtcagccagagccgccaggtgctgctgcagcagatagggcggcgcaacgcggaaagcacgctgtatgagaacatgctcaaatccgtgcgtcgtaacttcgccgatgtgtctctggaggacatgaccggcggtaccgatgcgcggcgactgttcaccactgaggaggtggtgccggggatgttcacccgccaggcctgggagggggggattcagcaggccatcgaaaaggcagcgaactcccgccgggatgaaatcgactgggtgctcagcgacagccgaaaagccgtctcctcagacctgtcgccggaagccctgaaagcgcgtctgacacaacgttacttcactgactttgccggcagctggctgagcttcctcaacagcctgcagcttaacccggcgaacaacattgcagacgttaccgaccagctgacgctgatgagtgacgtccgccagtcgccgctgattgccctgatgaataccatcgcctggcagggacagaccggccagcaacgcgaaggcctttcggattccatcatcaaatcggccaaagacctggtcggcggaaaagacaaaccggtgattgaccagtctgcatcaggcccgcaggggccgctggatgaaacctttggtccgctgcttcaactgctgggcaaaaacaaaggcagcaacgtgatgtcggcggataacacgctgagcctgcagacttacctgacccgtatcacccgcgtgcgtctgcgcctgcaacaggtggccagcgcttctgacccgcaggcgatgatgcagaccctggcgcagaccgtattccagggcaaaagcgtggacctcaccgacacctggcagtacggcagcctgatttcggcaagccttggcgaggagtggagcggttttggcagcacaatgtttgtgcagccgctgactcaggcctgggagaccgtgcttcagccgtcggcagccagcctgaatgataaatggagccgctcggttgtcgcgaactggcaaactgcctttgacggtcgtttcccgtttgccgccagcaaaagtgatgcctccctgccgatgctggcggagtttgtgcgcaaggacagcgggcgcattgagcgcttcctgacgacggagctcagcggtgtgctgcacaaggagggcagccagtgggtgccggataaggtcaacagccaggggctgagcttcaacccggccttcctgcgggccattaatcagctgagccagctgtcggacattctgtttaccgatggcagtcagggcatcagctttgagctgcaggcgcgccctgtgccgcaggtggtggaaacgcagctgaccattgatgggcaaaagctgcactactttaaccagatggctgactggcagtccattcgctggcctggcgacacttacaagccgggaaccatgctgacctggaccaccgttaatgccggtgcgcgtctgtttggtgattacagcgggacctggggctttattcgctggcttgacctgggtaagcgccagcagcttgaccgcagccagtggatgatgagtttcaccgcaccggatggccgcaccctgcagtgggtgctgcgttcacagcttggcagcgggccgctggcgctgctggaattacgcggcttcacgttgccggaacagatattcagcgtcgacagcgcggctacggctcaggcgctgatgatcaaaacggaagacagtgatatggacggaactgaatga

SEQ ID NO: 178375 - DNA, 279 bp, Klebsiella oxytoca
atggcgaaaggttattatctggtaaagggtgacatgaccacttgtggtggaaaaattcttggaggtgatccgaccgataccgtcatggggatccctgtagcccgggagcaggagaatgtgacctgcggaaaacatgccggtacgtacaaaatagtgggacatattccgaacaataatgccaatgggcggaaatatgctggttcgctacatagcaccagcagttgcccctgcggcgcaaaatttatcccttcccggtatgaacgtacttatggtggctaa

SEQ ID NO: 178376 - DNA, 1755 bp, Klebsiella oxytoca
atggatgacttaaccctgcgttactacgacgctgaaatgcgctatctgctggaagccggcgaagagtttgcccgcgctcaccccgagcaggcggcaatgctcaatctcgataaagcgggtgcgcgcgacccgtacgtggagcgcctgtttgagggctttgccttcctgatggggcgtcttcgcgagaaactcgatgacgacctgccggaactgaccgaagggctggtcagcctgctgtggccgcaatacctgcgcaccattccgtcgatgtcggtggtggagttcacgcccgactggcgcgagatgaaagagaagatgcgtatcgtcaaaggtttcgaggtcaattcgcagccgatcggcgagaagggcacgcgctgccggtacaccaccaccaaagaaatcacccttcagccgctgtcgctggagcatgcccgtctgtcgactgaccctgacgggcgttcggtcatcaacctgcgctttaactgcagccatctcgccgactggagtcgtgccgatctcagccagatcccgttttacttcaatgctgacgcaccgctggcctgcgccatgcatgaagcctttaccatgaacacggcgcgcctgtggctgcggatgccgggtgacacggacagaaagccactcgacgggtatttcaccgcgctgggatttggcgatgatgacgggctgtggccgaaggacagcagcagctttagcggttatcagcttttgcttgaatacttcaccttccgcgaaaaattcatgttcacgggcctgcgcgggctggagacggtggtctttccggctgagcttccctggttcgaaatcgacgtggtgctggcggaacgctgggagcatgacttcagctttaccgaaaagcatctgcgcctgaactgtgtgccggtgattaacctgtttccgctggaatctgacccgctgacgctgaattcactgcagaccgaatacatgctgcgcccgatgcgcgtgcaggatggccataccgagatttatgctgtcgattcggtgatatcctcaagccagtatacctatgtaccgttctccagtttccgccacaaaggcggcatgatgcgccatgaagcgccggagtattactaccacacccgcgtgcgccgcggtccgtcaggactgtataacacgtggcttttcctcggcggcgaagcctttgataatcacacggtgccggaaaacgaaagcctgtccctcacgctcaccggtaccaatggccagctgccgcgacgcgcattacaaagcaccgtgctggatacggtgatgaaaagcccctcggccagcgtcgccgtgcgtaacctgtgtgcgccgacgctgccctgctatcccccggcacaggaccgttttcactggcgcgtgctgagccacctcggcagcgggtttctgtcgatgatggataatgccgacgtgctgcgcggcaccctggcgctgtatgaatggaccgacagcgagatgaaccgccgtcgcctggaagccattattgacgtgaagcacagtgagaccggtcgatttgagcaggggtacctggtacgcggcgtgcagattgaggtaacgcttgacagccacggctttgccggtcgcggcgacatctgcctgttcggcgagatgctgagccgcttcttcgcgctttacaccgacatctatctgtttaactgcctgattattattctgcaaccgaccggagagcgcctggaatgggaagagaagcacaaccgccgcattcccggctga

SEQ ID NO: 178377 - DNA, 1086 bp, Klebsiella oxytoca
atgggaagagaagcacaaccgccgcattcccggctgagcccgcggctggcagccgacctgcaccgcatgaatttttatcgcttctgccagcttctggagaagcgtaatccggacaggccgctgatgggatcaaccagccaccctgctgatgacccggtgcggtttgcgccgcatccggggatggggtttccgggcagcgaactgaaagccgtcgaatatgacaaggatgatgacagcaggccacctcgcatccgcacaacctttatggggatgtacggtgtcgactcacccctgccgacagcctatctcgatgacatcactcagtgccgtgaagggcatgacgcgctgcagggctttctggatattttcagccaccgtatcctgacgcagttttaccgcatctggcggaaatactcttatccggccacgtttgaggcagggggaactgactgcatttcgcagtcgctgctgggtctggtggggctgggcataccgggaaccgcaaaccacatcgccacaccggtatcccgctttctggcgctgctcagtgtgctgcgccaacccggcaaaacccaggaggggatgcaggcgctggtgagactgctggccccggatactacggtgcaggtaagtccgtactgcctgcggccggtggagatcggccagccgctgggtttttacggcgatgacgattttctgctggacggcaatacgccgctgggggaagaagcgatggatgcgggcagtcagctgctggttgcgctcaggacggataacgaacaggaagcgcagggctggaaaccggatggtctgctgtatcaggattttctggtgatgctgcgtgtttatctcggctggcgttttaaggccaggatcaccctgaccacccggacccaactgctggccgtcccgccgctcggcgaagaacctttctggctcggcatgaacggcgtgctgggagcggaggagggggcgtttgcggacgatatcccgctgacctttacgacagaactgggttactacaccgggctggtgcctgcgaaaccacaacaaggaaatcgacgtgctaagtacaaatttgattaa

SEQ ID NO: 178378 - DNA, 546 bp, Klebsiella oxytoca
gtgctaagtacaaatttgattaagcccgcgtgctggctacctgctctactggcgttcagcctggtgggctgtggggtgacgcagagtatcacggatggcaccaaatcggtgtatacggcggtgttttataagaagattaaggtgctgcatctggattttacagcccgtgaagcactgaatacggattcccgcgagagtaactcactctccgagccggtggtggttcgtgtctaccagttgaaagaccgcaaaaccttcgacaaaacggtttatcagcaactcctcaagaacggcgacacgatcctgcaagccgacctgctggcgacccgcgatgtggtgataaagccgggtggggatgcgaatcttgatatgtcaatggaagaaggcgcgcagtttgtcgcggtggccggactgttccgccatccggatatggtcaacaatacctggaagcaggttctcagacgtgaagatctcgatcctgataaaccccgtgttctggaagctggaaataaccaccttgcattacagccgctgaaggaggactaa

SEQ ID NO: 178379 - DNA, 1419 bp, Klebsiella oxytoca
atgcatgactatggcatctggacgattattaccccgctggtcaccattattctggctatcctgactcgccaggtgatcctttccctgctcaccggcattttcgttggctacgcggtgattaaccacagtattatccagggcgttggcgccaccctgaacgggattatcgaaaccttcgcttccgccggtaatgcgcgaacgattgtttttatggtgatgatcggcggtattatgcggctgattgtggtgaccggcggcgtgcggaaactggtgcagtttctgtcggaaaaaaacgatttcgtcaccaataaaaaatcggtccagctgctggcgatgctggtgacatcgttgatttttatcgagagctcgataaaccagctgatcgccggggcctcgacgaaaaaccttgcccgacgctataaagtctcaccggaaaagatgtcctatattatccagacatcctgcgtctccgtctgctcgtcggtgatgatcaacggctggggggcggcgatgatgggcgttatcggcgtacagattgcgcaggggtacctgaccggcgagccatttgaagtcctggcaagctcaatgatctggaacacgatggcctggttttcattagcctcggtgctgttttatattctctctggctgcagctgggggccaatgaaaaaggcggaggtgaagtttgaaacgatccagaccgaaatagaacaagagcatggcgaagaggaggcggactcggtaattgaccatccggcctgcaattcattgctgaacttctttattcccattctttccactgtgttaatggttccggttgttctgtatattaccggcgacggacaattctcaaaaggcagcggctcgatgtcggtctactccggcgttatgtttggtaccgtcgtctcttttatctggttccgcgcgcgcggtattctgaacgttgagaactttttcaaagagctgtatatcggctacgccagcatggttaaaattagctcaatcatgatcctggctttcctgatggggcatatttcagcggagctgaataccgggcagtatatcgcctccattacctccggcgttattccatccggtttcgcgatcggctttatctttctgattgccgcggtgatgtcgctggccacgggcacctcatgggggaccttcgccattatgattccgattggcgttcagctgggcgtctcaataggtatcgacccgcactttatgatcggcgcggcgatttccggctcaatttttggcgacatgacttcccctatctccagcgatgccatcgtggcctcgatggcgaccagctgcgaccatattgagcatattcgtacccaaatgccttatgcgctggtgacgggtagcctggcgctcgttgtttatttaattgtcggttttacgctttaa

SEQ ID NO: 178380 - DNA, 909 bp, Klebsiella oxytoca
atggtctcgacaacagcagtagccgctatcaaagaatggcggaaaactaataaatttatttgtcacgttaaactcaactataaaaaggtattgcggaaatgcagagaaatatctttaatcggaggaaaatataaggaatatcggtcgttatgtgaaaattacgcttgcgcaaaactaacaggagcaaccgaggggctggttaactttgaagataaaccctttaaggcctatttaaataaaaagatgtcaaaaagagcgaagctcaatattgctcatggcgctttgaattttatagagaaaacctttcttcccgaggcgttgccgcagctgtacgatatgaaagcatttggtcgttcgctaatcactattccactgaaaaacggtacctgcattgatgtgaagctgctggcatcgccttttcaggaggagggggagctgatgctattaatgttcctgggtgataaacgcgtctacagtatctgtttttcctgcaccgaagatggccgggcctggattggcggcatccagggtgggaaagacattgataatgaagaagtgaaagcgctgaccaaggagctttacggcatccgacctaagaacttaattatcacgctgctgtacggttttttgtcgcatttcaatatcaaggagatctatgcgatcgacagccattaccatgttaaaagcgacagagtaaaaaccagctattctgagctttggctggaaattggcggtgagaagcatcgtcgcggctggtataaattaccggcgaacgagataaagaaaagcctggaagaggttaaaagcaagcaccggagccagtttatcaagcgagaaggcttgaaagagctggcccagctggatatggccgccgcgctacgcgacattagcgtggatcgtcactgctga

SEQ ID NO: 178381 - DNA, 672 bp, Klebsiella oxytoca
atggaaacaatccctcgtgtgcaacatgacacagatctgctccggaccatcaccaaacccatagacgacattgataaactcattcgctgcctggcacccaaatgtaaccaaatgttaatggatgggagacgaaacatcggcatagtaaaagaaaaccagcatcaatgcttggttttgttccgtggcacgatgtctttatatcgcaacaacgatggactcatcatcaactccgaaacgagtccattcatctttggcatgaatagtcagctacgttattcccggcatatttacctgcgcacccaggaaacatcttctattggtctgatatcaattaacgaggcgcataagatcatcgccgaacagcaattatgggaaaatgtctcacgacttctggaatattcgtcggcaaaagtctacgcccactgctttaaggtttctaaactttcctgttatgagatcattgttcatcagcttatagaattaaacaatgaaccggaagcgatcaaaaataaaatcaccgccgccaattatattctgtcgcgaacctttttgtcgcgcagtggagtcatgagaaccctggccaaattaaaacagctgggcgctattcagctccatcgagggattctggtgacgatgaatcaactgcctcccagcctaaagcttagtgaataa

SEQ ID NO: 178382 - DNA, 552 bp, Klebsiella oxytoca
atgaaaaaacgaaaatatttaagtaaaaaagaggtgcaggcattaattgatgcttcgcagcagcaggatggctcgctgcgtgattattgcatgctcctcatgtgttttattcacggactgcgcgtaagtgaattacgttttttaaaagtgagcgatattgatttatccagccagcggatcgccattcggcgtttaaaaaatggcttttcaaccattcatcctcttcagccccgtgaacagctggcgttaagccagtggctggttaagcgcacgagctgtttaaacgccgatcttccctggctgttcctgtcgcgaaaaggcactccgctttcccgacagcacattcacgttatgatgcgaaattatggcgtgcaggccggcattgccgttccggtacacccgcatatgctgcgccacgcctgcggttatgcgcttgcggaagagggcgttgatacacgcctgattcaggattatctcggccatcgcaatatccagcataccgtcttgtatacggcgagcaatccggcgcgctttagctcgattaccctctga

SEQ ID NO: 178383 - DNA, 528 bp, Klebsiella oxytoca
atgagaattatcgccagcccggccgtcataacgttatttacggcgatttcgtcgtcattacccgcttatgctgcggatgtcactctttatatcaacggcgatattgttgcgtcttcctgcaccgtcgaaaacaacggtatttataatatcgatctcggacaaaatattcccagccgccggcttagcgcggccaactcttactccgcgtggaaagaattttacgtcacgctgagccactgccctgtaggaacatcaagcgttaccgctcactttacaggccctgtcgacggagctgaccctgatttatatgccaacgtgagcagcccggacagttcacgcaatgtcgcgatagaacttcagcgtataaccggttcaattaatgcaggcaacggaaaatctattgccgtcgacgtcgataataaccgtcaggccatattcgatatgcgcgcgcgcatatttagcgtcgcaggggacgccaccgcgggtcatatcagcgcgatggtcgttatgaactttacctataactaa

SEQ ID NO: 178384 - DNA, 1002 bp, Klebsiella oxytoca
atgaaacgagtcaacgtcccccttatgctggttactctgatcgccagcgctgcccacgcggagaacaactattgtcccagttctccgcccacgccgtttacccagcagctcgcgcagatcgcggtatcgcgggcgctgccggtaggcagcgatattcccggcacgcagcgggtcttcacctttaacggaaactgcaaaggccgcagcggttgggcggatgtcaccccggggcaccccattatcgcctgctattacggcagcggcgaagaagtcgcgggttttccgggggtctatgaaaccggcgtcgaaggcatcggtattgcgctacaaaatagcgctggccaaagggtgagtggtatcggcagcgattgcgatacgcgcgcgcaggcgctggggtatatctcccgcgacgccagcatgacctttggatatacggtcacactaacgctggtaaaaacgggggatacggcaacgagcggtactctcgatgtcgcgcaaaccaaatttggcatgggggtctatgataccggtctgggcatcggcagccaggggcagcaaaactatatcggctatgccggagatattgtttataaagcggtaagctgcaccgtcccctcgacgttaactgtcaacatgggatctgttccggtgggccaattctctggtccgggcagcaccagcgacgaaaaaaatctgtcaattccggtgcgatgcgacgataaggtcgccgtgaatacgtcaataagcagtcaagattatctctccccgacgctcggcgtagtggccttaagcaatgaaaccggcgtagcccagggggtcggcgttcaggtgctttataacggctcgcccgtccagttcgatcgttttttcccggtcggcaccatccctgaggctggcgcatcgataaccctgccgctcacctttcgctattaccagaacacgccggagatccatcccggccacgccaacgcggtggccaccttaacgatgatgtacaactga

SEQ ID NO: 178385 - DNA, 2571 bp, Klebsiella oxytoca
atgaacaaaagaacctcaagcgactcgcccttgaatttagcttaccttatcgccacccagattgccctgattgtggggataagcccctcagctaacgcccgggaacggttcaaccccgcccatctggaaaccggcgcaggcgggctggccaccaccgatctctccgccttcgaggagcatggcgggcagcagcccggacgctacagggtggatatttatgtcaatgacagcaaggtggatacccgggacgttgagttccgcatacagcaaaacgcgcagggacagaacacattacagccctgcctgtccctgaacgatttggcctcatggggcgtcatgatccagcgttatccgacgttaggccagcccgatgccagctgcgcaaggctgtcggcgattcctcaggccagcgccgactttcgtttctcgcaccagcagctgctgttaagttttccccaatcttcccttaccaacgccgcgcgcggctgggtcgatccggcgcggtgggatgacggcattccggcggcgctggtcaattacagcgtcagcggcgccaacaaccgggacaaaaaaggcggcggcggcggcggaaacgcgcagtacattaatttacgccccggtcttaatatcggtccctggcgattgcgtaattacaccacctggaaccgcaacagccagaacggtgaaagcggcacctcaacaaaatgggataccgtttatacctacgcccagcgcgatatacgctcgctgaagagccgactgacgctgggcgatagcaccacgccttccgatattttcgacagtattccgtttcgcggcggccagctggcgtctgacgacgatatgctgccggagagcctacgcggctatgcccccgtagtgcgggggatcgcccgtacccatgcccaggtcacgatccgacaaaacggatacatcatttatcagacctacgtttcgcccggcagcttcgaaatcaccgatatgtaccccaccggcggttccggggatctgtacgtcaccatcaaagagtctgacggcagcgaacaattcctcgtggtgccctacgcctcggtcccggtgctgcagcgcgaaggccggttaaaatacgccatgaccaccggcgtttaccgcgcctatgacaacggcatcgataaagccccgctggccgccggcacggcgatttatggccttcccgccggctacaccgtatacggcggcggccagttcagtaacagataccaggcgttagcgttgggcataggtaaaaacctgggctccattggcgccctatccaccgatatcacccaggcctggtcgcagcaaaaaaatcgaccgcgagaagaaggccaatcctggcgtattcgctacagcaaaaacctggtgcagaccgggactaacttcaccttcgctggctatcgctatgccaccagcggctactgggatatgcaggacgttcttaatacctggcgcgatgggcggcgctacgtgatgccggaacgcaggcgcaaccgcgccgagttaaccgtcagccagaacctgtttcagataccaggcaacctcgcgcttagcgccatcgtggaagactattgggatacaaacaaacgcatggagtcatatagcgcgagctacaacggttcgtataaaggcatcagtttcggtctgagctacagctataacattcactctgcggaacgctacggccagcgctccgggcgcatctacgaccgcgatgggctgtttgcgctcaccatgagtattcctctggagaaattattcggcggccatcccacctacgtcagctacatgatgaataccagtaagcaggggaataccaccaataatctgagcctgggcggtaccttattggccgataacaatctgagctggagcgtcatgcagggctatggttctcagggccagggaagcaatagcgggattaatgccgactggcgcgcctcttacgccgagaccctcgtcggctacgcccgcgatcgctacagcgaacgcgttaactatggtttgcagggcgggatcgtggcgcatcgcaacggcctcacctttagccagcccctcggcgaaacgatggcgctgatcgccgcgcccggcgcacaaaacgtagcggtgcttgggcagtcaggcgtcaaaaccgatcgcttcggctacaccgtcgtcccctacctcagcccctatcgcaaaaacgatctcacgctgaataccgaaaccctggccgatgatgccgaactggcgctggcaacgcagacggtcatccccacgcgcggcgcgctggtgaaggccagctatgaaaccagcctcggtaaacgggtcctgatgaccctgagaaaacgcaacggcgcgtcggtaccgttcggcgcaacggttatcgatcccgcctccccgacgccaaaaagcttcatcgtaggcgatggaggacaggtttatctgacggggctaaaagacgcgggtcagctggaggttagctggagtcacgaccctgatggccggtgcagagtgaattacagcctgacgcaaagcgccagcgggatcatcaaccttaatgcacagtgtttatag

SEQ ID NO: 178386 - DNA, 690 bp, Klebsiella oxytoca
atgcataaaggatatagaatatttccccttctcctcctggtgctggcgagcgaattagcggcggcgacagaaagcggcggcgtcacaattggcggcacgcgactgatttttgatggcggcaaaaaagaggcctctttaagcgtcagcaattcggataccggcccatatctgatccagtcgtgggtggagccgcgcaataacgatccggccaggccgccgtttattattaccccgccgctgttccgcctcgacggcaatcagcaaaacctgctgcggatcgtcaataccggcggccagctccctaccgatcgcgagtcgctttattggctaaacgtcaaagctattccgacaaataccgccccggaagacgcgaacacgttgcaaatcgccgtaagaacgcgcctcaagcttatttatcgtcccaaaacgctgaagggtatcccggaagaggtgacccataagctgaaatggagcctgacgggcagcaggctaacggtatcgaatccgacgccgttttacatgaatttcaacgaggtcacggtgggcaatcatcccattaccgaagccacctttgtcgcaccaatgagctcagccacgtttgctacccctggcaaggtgaccggcctggtgtcatggaaaatcattagcgactttggcggcgtgggaaaaagccacacgcaggttcgctaa

SEQ ID NO: 178387 - DNA, 519 bp, Klebsiella oxytoca
atgaacaagagtcttattgctgttggtctgttagccggtgtcatgtccgcctccgtattcgcggatgatggccgtattaatttttacggctccatcaccgatagcgcctgtaccgtgatcaataatatgaccaacccgctgtcggttatgatggggaatgtctccagcaaagccttcaacggcgcgggctccacggcctcggcgaccaaatttattattgagctgaaagattgcccgaaatccgctaagtcggccacggtaaaattcgacggcacggcggacagcagcgtcggcactattctagcgctcacccaagagcctggcgtggcacagggcgtcgggatccagttaatggacaataaaaacgtcgtcgtcccattatataccgcctcgtccgcttacccgctgcagccgggcgaaaatagtctcgctttcgtcgcccgctattatgcgacatcaagcaccgtaaacgcagggttcgctaactctaccagcacatttaccctcaattacaactaa

SEQ ID NO: 178388 - DNA, 549 bp, Klebsiella oxytoca
atgaataaacgaaaatatctcaccgaaactgagataaaaaaaatcatcaacgaggcgtataagggagcgaacccggagagggatcgttgtttaatctggatgtgcttcattcacggctgccgcgtcagcgaaattcgccactggcggctatctgaccttgacttgcataaccactcaatttacgtcaaacggcttaaaaatgggttttccaccacgcatcctctcttttccagcgagatgacgtttatccgtgaatggctgtcggcgcgtaaaaactatcgcaacagcgacagcgactggctatttctttcgcaaaaaggaacgccgctatcgcgtcagcggatccacgtattgattagccactatagccaaagtgcgggtttaaggattgcggcccatccgcatatgctgcgccacgcctgcggtttttcgctggccgataagggcatggatacccggctaattcaggattatctcggtcacagaaatattcagcatacggtgctttatactgcgagcaatgctgcaagatttaaaaatatatggtga

SEQ ID NO: 178389 - DNA, 981 bp, Klebsiella oxytoca
atgagtcgcgcattaatcacctttaatcagctttcggtctcttttgccgccgacaaaaaccgggtacgcgcggtacaggatgtgtcgttcactattcgcgccgggcagaccgttggcgtcgtcggcgaatccggctgcggcaaaagcgtcaccgccatgtcgttaatgggtctgctgccaccgcaggcggcgcgcattgacggcggggaaattctttttgagggccaggacctgctgcggctgaaaaacgcccgtatggccgacctgcgcggcaatcagctggcgatgatttttcaggagccgatgaccgccctgaatccggtactcaccgtcggcgagcagctctgcgaaccgctgattcgccaccgcggcgagccgccgaaggccgcatggcggcacgctacccagcgcctgacggatgtcgggctggcgcgcgcggagagcctgatggccagctatccgcatcagctttccggcggcatgctgcagcgggtgatgattgccatggcgctgagctgccagccgaagctgctgattgccgatgagccgacaaccgccctggacgtcaccgtgcaggcgcagatcctgcgcctgctgcgcgaccaggcgcgggccaaccggatggcgatgatgctgattacccacgatctcggggttatcgcgcagatggccgagcacgttgtggtgatgtacgccgggcgtatcgtcgagcagggcgcgaccgccgcgattctgcgtcacccgcagcatccctatacccaggggctgattgcctcgcggccggtgccgggggcccggcgccgacgcctctattcaatccccggccaggtgccggacctcgccgcccttcccgccggatgtgccttcgccgagcgctgcgcaaaagccaccgcgcgctgccgacagagcattccgccgctgtcagggcaagaccggcaggccgcctgcttttacagtgaactttcggagtccgtgacatga

SEQ ID NO: 178390 - DNA, 948 bp, Klebsiella oxytoca
atgctcagctctctgttttctgctaaccgacgcctgcgcaaggcggaaatcccggcgctggcgcaggtgaccccatccccctggcgtcaggcctggcaggcgctgcgccgcaatcgcctggcgatgctgtgcctgctgctgctggtcgtaatggccctctggtgcatactggggccgctgtggtcgccgtggaaagacgatgccaccgacgcgctgatgattaacaggccgcccggcgcggaacactggctgggtaccgactttctcggtcgcgatatttacacccgcctgctgctggccgggcgcatttcgctgattatcggcctgctgaccatgctgctgtcggtcacccttggctatctgctcggcgcgctgtcgggctacgccggcggcctgaccgataaacttattatgcgttttgccgatctggtgatgactatccccggcctgccgctgctgattgtcgcgggcgcgatgctctcggagctcgatttctcgccggactcacgcatctatatggtggtgattatgctgagcctgctggagtggccgaagctggcgcggctggtacgcgggcagtgcctctccctgcgcgagcgcgactttatgctggcgacccaggtgctgggactgtcggcgcgacgccgtctgtttggtcatctgctgccgaatacggtaccgattctggtggtcatggcgaccatggcggtggcgaacgccatcctcagcgagtcggcgctcagctacctcgggcttggtgtggtaccgccgacgccgtcgtggggcaatatgatggacgccgccaacagcctgatcgactttcagcgccggccctggctgtggatgccgccggggatcgccatttttatcaccgtcatcgccattaacgtgctgggcgacggcctgcgcgacgccatggaccctaaaatgaaacagaggctgaaatga

SEQ ID NO: 178391 - DNA, 807 bp, Klebsiella oxytoca
atgattaagctgtgcgcaacctgcgggacgtcttatgacgatcgcggcaacaccctgaaccattgtcgtatctgtgaggatgaacgccagtacgtcccggccagcgggcaggtctggatcaatccagacgatctgagcgagacgcatacgaatacgtggcagcagcataacgatcggctgttgagcgtcaggacggtaccgaaatttgcaatcgatcagcgcgcgtttctgctgctaacgccgcaggggaatattctctgggactgcatcgccaatcttgatgccgccagcaaaacgctgattaccgccctgggcgggataaacgcgatcgccatctcccatcctcattactacaccacgatgcaggactgggccgacgcctttaatgcgcgaatttatctccacgccagcgatcgcgaatggattatgcgcgatagcccggccatcacgctatgggaaggagatgcgctggagatcctcccggcggtgcggctgctgcgcctgggaggccatttcgccggaggaaccgttctgcactgggcgaaagatgacggtattatgctggcgggcgatattatccaggtgacgccgggggcgcgcgccgtttcgtttatgtggagctatcccaatttgctgccgttggcggccgccagcgtggagaagatcgttgaacgtctgggcgatacgcctttcggggcgctgtacggcgcctttaaggggcagaacgtccccaaaaatgcccggcagatcgttctggactcagcgcagaaatacctcgcctgtcttaagacgacggcgcaccgctga

SEQ ID NO: 178392 - DNA, 504 bp, Klebsiella oxytoca
atggcaagtgaaaaagagaggctgcccgggattaaagagaacgaattttttcttaattttgaatgcgctgcccgccagataggcctcggaatattattggcgatcatactggcagcccttttgggtctcttttctggaggctattttagcactgccgaaaaaacaactgcgcagcgcaatttaacggtggcctatgaccgcttcggtcgtttgcaaactgaattcaggttaaagattaccgcccatccgcgggtcgcggataaatatatttttagccttggcggtgattttacctcttcttttgaaccaggcagtatctggccccggccagacaggatgtacagtcagaacgaccggctctttctggtctataatgatttgaaaagcatgaataatttttctatatggctctacgttacgcccacccgcccaggtaagttgaaccactctttgcagctaaacggcgaacccgaaatccgcttctggcaatttatttatccttag

SEQ ID NO: 178393 - DNA, 990 bp, Klebsiella oxytoca
atggcagtcatggcgatcactggcggtactgcgggagtcggtaaagcaacggccctgcgctttgcacgggcaggctatgacgtcggcattattgcccgcgatggccgaagccttgaggcgacgaagcaggagctccttcgttgcggcgttcgggtgcataccgtgcaggccgatgtggcaaatgccgatgcgctcttgaccgccgccggcgaaatcgaaaatcggctcggggctatcgaggtatgggtcaataacgcgatgtgtgcggtgctggcgcctttcagagcgatgacccacgacgaatttagacgggtaaccgaggtcacctacctcggctacgtcaacgggactcgcgccgcgctggcgctgatgacgccccgcgatcgcggagtgattatccaggttggctccgcgctcgcctatcgctccattccgctacagtccgcctactgcggggcaaaggccgcgattcggggttttaccgatgcggtacgtacggagctgatgcatgagaatagcggcgtgagtattgcgatggtacagatgccggggctgaatacgccgcagttcgagtgggcgcgcaataagtttgcctgggcgatgcgcccggtgccgcccgtatttcagccggaagtggccgcccaggctatcttcaacgtcgcgcgccggcccgtacgcgaactctgggtagggagcagcacgattcagtccattattgggcaatttctttttccgggcttccttgaccggctgatggtcaaaaaagcgtgggaagggcaaatgacccggcgcttgaatgccgacgaccgtcaggactatctcgaacagccggtcagcggattgcataaaacgcacgggcgtttttcctctgaggcgaaatatcgcgccaccgccatcacttccggcgtgccgggaaaagcgctgctgggcggcgcggcagcggcggggttacttttagcaaaatggtttatctcgcgtaaaaaacgctaa

SEQ ID NO: 178394 - DNA, 186 bp, Klebsiella oxytoca
atggcagaacatcgtggtggttccggtaatttcgctgaagaccgtgataaagcatctgaagcaggacgtaaaggcggtcagcacagcggtggtaactttaaaaacgatccgcagcgcgcatctgaggccggtaagaaaggcggccaaaatagccatggcggcgggcgtaaatctgataattcctga

SEQ ID NO: 178395 - DNA, 690 bp, Klebsiella oxytoca
atgcatcttgaacgacacagcattgaacgcgtcggatggttgagggctgctgtactcggggctaacgatggtattgtttcgacagcgagccttgttcttggcgttgcgtctgctaatacgggctcttccggggttttacttgcgggcattgccgggctggtcgcgggggcgatgtcgatggcagcgggggaatatgtttccgtctcatctcaggccgacacggaaaacgcggctctcgctcaggaaaagagggaactggaaacagattatcagggagaagtacgcgagctgactttactttatgtgcaacgcggactcgagccagagcttgcccaaaaggttgccgaacaactcatggtgaaagatgctctggacacgcatgcccgcgaggaactgggactgacggataccaattctgcgcgccccctgcaggctgccgttttctcggcgctgagtttttccgctggcgcaacgttgcctttagtcgttgcatggctttctccagcaacgctggtttttctctttgttattctctcctcccttttttcactggccgctcttggctatatatcttcaattgtcagcagagcctctcctgtcagggcgatcggcagaattactttctggagcaccctggcgatgttttcgtcgatgggaataggtcatcttgccgggcaggtattgttttaa

SEQ ID NO: 178396 - DNA, 483 bp, Klebsiella oxytoca
atgactaccttttaccaattgactgccaccagcctgcacggccagcccatctcaatggctgactatgctggcaagctcgttctggtagtcaataccgccagccactgtggcttcacgccgcaatatgcagggctggaagcgctctacgcgaaatacgctgctcaggggctgatagtgcttggtttcccctgcaaccagtttggtaagcaggagcccggcggcgtcgatgacatcgagcagacctgtagggtcaattacggtgtaagcttcccgatgttcgagaaagtggaggtcaacggcgccagcgcgcacccgctgtttcgttacctgaaagatgagttacccggcgtgctgggcgggcggatcaaatggaacttcacgaagttcttgatcggtcgcgacggcacccctctcacgcgtttcgcgccgttcaccaccccggagaaaatggagaccgccatccttgccgcactaaagatttaa

SEQ ID NO: 178397 - DNA, 1773 bp, Klebsiella oxytoca
atgttgaacgatctcagcagcgatgaaagcaaaagacgcgcggcgattgacctgttaaaaaacgcggacgaagggcgagacgaagcgttaaaaaaatacactcatctggtctgccagttgctaaaaatgccaatgagttttgtgtcaatccttgacgatgaaaagcagtacatcaaatccgctcagaatatcgcccccacggacaccagcctgggcggagcattttgcgaacagaccctgaaacagggtgagactttcctttgtcctgatacgcatcagcacccgatctttcatcgcgatcgggcggtcagagaagcgccattcattcgcttttatgcaggatgcccgctgaaaacccgcgacggagtgaccgtgggtaccttgagtatcttagatacgcaacccagggtactttcagatgagcagatcgctatttttaaggcgctggccgagctgatatcggatttcttagcctcctggcactcagtggggtatatcgacgtcgtcacgcttttacccaatcggcagcgcctgctcaaggacattgaggtgtcggcggagggtactttcaggctggtcattattgactgcattgatatgccatttgcctacgagatggcccgctcattggggatgctggcggtagagaatttgcttcgtgacatgaccgtcgcgctgcaggcgcgcctgcccatggcgagcaaactttacgccgtggcggttggacgctttgcctttttcaccccggaacccatggcgctgtcattggagggtatagcactacggcttcagggaacccaggccaggatcggcccggacgttcccctggatttgaatattcacatgggtgactccggtatttgcgatagcgacatgacgccaaatgaaattctgcggcgcgcggtgagcgcactgcatgaagcgataagccaggggcaccgttttacgacctataatgacgcactggacatccgcaagaagcgagatttcagcctgctcaccgaactcaggcaaacgctgcagggaaaccaggggttatatctggtctttcagccaaaaatttcgctgacgacgggagacgtgacgggcgctgaagccttgataagatggaagcatcctatcaatggcgaagtgctgccgggtgaatttattccgctggtcgaaaagactagcctgatgcgcgaactctcggcctgggttatcgatcatactatcgcgcagttgagtgactggcgggatcgggggctttctcttcccgtctcaattaatctcgccgccagcgatttttctcgacccgatttcgctgaggagcttgagcagaaactgcgggaggcgtgtcttgacccagccctgctgggggtggagtgtctggagactgagaagatgcttgaaagtccggccgcgctgaacggactggacatgctcaaaaaacgcgggtttaaaatttctctggatgactttggatcgggatacagcaacattaattacctgcggcaaatcccgctggacatcatcaaactcgaccggtctattgtgaggcatatagtccatgagaaagccagccgcattattgtgcacaacgttatcaggctcctcaagcagctcgattacgtcgttcttgccgaaggcgtcgaggatctcgaaacggttgagattttacgcagcctgggctgcgatgaggttcagggatatttttttgcccggccgatggtctccgttgattttgccgcatggtatcgcgccagaaaggcagacctgggaaagaaatcctga

SEQ ID NO: 178398 - DNA, 348 bp, Klebsiella oxytoca
atgcagtggaatattgaaaatagccttgtatgtcctgtaacaggaacaggtttttcagttgcggcaagtgccaaaaatctgaaattaattatttggtatagtggggattattttttgagcattggttcggttattaacatcacacaaaatgaagttttcattaatggtgtgcccggcgatttacaggttattcatgcattcccctatacggaaaatttatggtcaacattttcaaagaatattgaatgccccggtaatcagaaccctatgctgctcatctgcaatcgaagaagcctctgcaagttcgccttgtgcccctacggcgccaggcaaaagaggccgcaataa

SEQ ID NO: 178399 - DNA, 171 bp, Klebsiella oxytoca
atgtttatttttacattcactcgcagacgcgttggcaaggcgattttgctacctttatccggcggcgaattcaccggcaaccatccggcgcggcagataaacagactggctttccttgagtccatgatttcccggcgtttctgcgcgggtttttaccaacaaaggtggtga

SEQ ID NO: 178400 - DNA, 1527 bp, Klebsiella oxytoca
atgagtatgtcatccataccgtcgccttcccccaccggtaagctttatggctgggttgaaaaaataggtaacaaggtcccgcatccgtttttactgtttatctatctgattgtggcgttaatggtcgccaccgccatcctgtcggcgctgaacgtcggggtacagaaccccaccgacggctcgcgagtggtggtgaaaaatttgcttagcgttgaaggattgcactggtttttgccgaacgtcattaagaacttcagcggtttcgcgccgctgggggccattctggctctggtgctgggggccggttttgcggaacgagtgggcctgctgccttcgctgatggtgaaaatgtcatcccacgttagcgcccgttacgccagctatatggtgctgtttatcgccttctttagccacatctcttccgatgccgcgctggtgattatgccgccgctgggcgccctgatgttcctcgccgtcggccgccacccggttgccgggctgctggcggccatcgccggcgtcggctgcggcttcacggccaatctgctcatcgtcaccaccgatgtcctgctctctggcatcagcaccgaagcggcaaaaacccttgacgcctcgctccacgtcagcgtgattgataactggtattttatggcaacctcagtgatcgttctcacgctggttggcggattgattaccgataaactggtggaaccgcggttagggcaatggcaaggcaacagcgatgaaacgctgcagacgttgacgccggaacagcgcttcggcctgcgcgtggccggcgtggccgcgctgttgttcgtggcggcgatcgcgctgatggtcgtgccggaaaacggtatcctgcgcgatcccatcaagcataccgtgatgccttcgccgtttataaaagggatcgtcccgctcattatctttttcttcttcgtcgtttcactggcctacggcatcgccaccggcaaaattcgccgccaggccgacttgcctcagctgatgattgagccgacgaaagagatggcaggttttatcgtgatggtcttcccgctggcccagttcgtcgccatgttcaactggagcaatatggggaaatttatggccgtcggcttgacggatctgctggagagcgcgggaatgaacggcgtaccggcgtttgtcggcctggcgctgctatccgcctttttgtgtatgtttatcgccagcggttcggcaatctggtcgattctggcgccgattttcgtgccgatgtttatgctgctgggctttcacccggcattcgcgcagattctgtttcgcatcgccgactcatcggtgctgccgctggcgccggtatcgccgtttgtgccgctatttctcggcttcttacagcgctaccggcccgacgctaagctgggaacctactactcgctggtcttgccttatccattaatattccttgccgtctggctactgctgctggttggctggtacctcgtggggctgcccatcggaccgggtatttatccgcgattaccttaa

SEQ ID NO: 178401 - DNA, 2778 bp, Klebsiella oxytoca
atgaccagtcatccacgaattttgcgtccttttactttaccgaacggtactgagcttaaaaaccgcctgttaatggcgccgatgaccacctgcaccggttattttgacggtaccgtgaccagcgaactggttgagtactaccgcgctcgcgcaggcagtatcggcaccattatcgttgaatgctgctttattgatgactacggtctggcgttccccggcgccatcggtatcgataatgatgaaaaagtggctggcctggcgaaaattgccgccgccatcaaggcggaagggtcaaaagcgattctgcagatctaccacggcggccggatggtcgacccgcagcttatcggcggacgccagccggttgccccgagcgcgattgccgcgccgcgcgatggcgcagcaaccccccgcgcgctgagcggcgctgaagtcgagggcatgatcgcgaagtttggcgaaggcgtacgccgcgccattcaggccggtttcgacggcgtcgagattcacggcgcgaacacctatctgatccagcagttttattcgccaaattctaaccagcgcgacgatgaatggggcggcagccgcgataatcgtgcgaaattcccgctggcggtactggacatcacccacaaaatggcccgccagtacgccgacgatgcctttattatcggctaccggttctccccggaagagatggaagtccccggtatccgttttgctgacaccatgtatctgctggaaaagctggccgcccgcggcgtcgactatctccacttctcggttggcgccacgctgcgcccgtcgattgtcgatatcaccgatcccacgccgctgattgaaaaatattgcgccatgcgctctgaaaccctggctcaggtgccggtgatgggcgtgggcggggtagtgaacgcggccgatgccgagcagggtctggatcacggctacgacctgatggcggtgggccgcgcctgtatcgcgtatcctgactggacggcgcgcattgccgccggcgaagagctggagctgtttattgacagcacccagcgcgaagcgctgaacatcccggaaccgctgtggcgcttctcgctggtggaggcgatgatccgcgatatgagcatgggcgatgccaaattcaaaccggggatgttcgtcgaaaccgttcaggacgacgctaacgagctggtgatcaacgtcagcctggaaaacgaccgcattgccgatatcgcactggcggcaagcccggtacagaccgtcgagttcaccaccagctttgaagagatccgcgagcggatcctcagcgccaacaccccgcacgtggatgcgatttccggcgcaaccagccagagcgaagcggtgaaaaaggcggtttccaaagcgatgctgaagtccagtaaagcgctggccgccgaagagggcgcgggcgatgcggcgccgaaaagctacgatgtggtggtggtcggcagcggcggagccggtctggcggccgcgattcaggcacacgatgaaggcgcgagcgttctgatcgttgaaaaaatgccgaccatcggcggtaacaccattaaagcttctgccgggatgaacgccgcagagacccgcttccagcgcgtgaaaggtattgaagacagcaaagagctgttttaccaggaaacgctgaaaggcggtaagaacaaaaacgacccgcagctgctgcgccgcttcgtggagaatgcgccggaggccattgagtggctggcgcgtcgcggtattatgcttaacgatatcaccactaccggcgggatgagcatcgaccgcacccaccgtccgcgtgacgggtcggcggtcggcggctacctgatcagcggcctggtgcgtaacatcaccaaacgcggtatcgatgtcctgctggatacgtcggtggaagagatcctgatgaccgacgatgaggtgagcggcgtgcgcctgctcaccgatgaaaacgaatccgttgtggtacagacgaagagcatcgtggtggctaccggcggcttcagcgccaacagcgcgatggtggtgaaataccgcccggatctggcgggctttgtgaccaccaaccataaaggggcgaccggcggcggtatcgcgctgcttgaacgcatcggcgcgggcaccgtggatatgggtgaaattcagattcacccgaccgtcgagcagcaaacctcgtacctgatttccgagtcgattcgcggcggcggggcgatactggtgaacccgcagggcaaccgcttcttcaacgaaatggagacccgcgataaggtttccgccgcgattatcgcgctgcctgagcacttcgcctatatcgtctttgacgagcacgtccgggcgaaaaacaaagccgccgatgagtacatcgctaaaggtttcgtcaccagcgccagctcgccgcgtcagctggcggagaaactggggatggattaccatgcttttctcaatacgctggaacgctacaacggctttgttgaaaaacagcatgacgatgactttggtcgtaccaccgcgctgcgtgcgccgatcaatgaaggcccttaccatgcgattcgtatcgccccgggggttcaccacacgatgggcggcgtgaccattaacaccgataccgcggtgctgaatgccggtcatcaggtgattgcgggcgcttttgccgcgggcgaagtggttggcggcattcacggcggtaaccgcatcggcggtaacgcggtggccgatatcattatcttcgggaccctcgcgggccatcaggcggcgaaacgcgccagaggttaa

SEQ ID NO: 178402 - DNA, 885 bp, Klebsiella oxytoca
atggtcgttgagcaaggcagttttacccgggcggcggcgcatctcggcgtcacgacctccaccttaagcgcaaccatccgtcgtctcgaggagcgcatcggcgtacgtttattacaccggacaacgcgcagcgtcgcgccgagcgaggccggcaagcgcatgatgcagcggctggctcctgcgctggcggcgctggaagacgcggttaccgatgcccggacggccagcgcgcccgcgggccgcctgcgcctcaatgtgtcgcgcatcgccgcgattcattatctggcgccgctgctgggcggatttatgcaacgctatcccaacattgagctggatattgttaccgacgatgctttagtcgatatcgtttcttccggttttgacgccggaattcgtcttggtgaaaagctccatcaggatatggttgccgtcaggctgagcggcgaccttgaaatgaaagtcgtcgcctcgccgcactatctggcgcaagcgccgcagccgcgaaagccgcaggatttgctgcagcacccctgtctgacttatcgcagacccagcgacggcagcgtttatcgttgggagttccagcgcgacgacgaacgctacgagattgcggtcaaagggccgatcgtcgtcgatgagccggccatgctgacgccgttagccctcaagggcaccggtattgcctatcagtttgcccatcaggtcgatccctggctggagacaggccagctagtccagctattgaaagagtggaccccggcatttcccgggttttacgtttactaccccagccgtaagcagatggcatcgccgctgcgggcgtttattgactatctgctggccgtcggcggcaaatcgcgtccgccagaattgccgtctggctga

SEQ ID NO: 178403 - DNA, 741 bp, Klebsiella oxytoca
atggcgagatttagcgcaaaaagagttcttatcaccggtgcgacaagcggaatcgggcttgccggggcaaagcgcatcgatagcgaaggcggttgggtgatcgccaccgggcgcgatcccggacggctggcgtctcttcgccggcagctctcggatcgggcgcgggtcattgacaatgatgccagcgatccgctgaccggcgcggcgctggccgaggcgattgattcatccggcgggcttgatggcctctggctcaacgccggatacgcagcggttggggagctgtcgcaggtggatgccgcggcctttgatcgcatgatggcgaccaacgtgcgcgggccggttctccagatggcggcgctcgccggaaagcttaaggcgggagcctcggtggtggtgacggcgtccacttccgcttatgaaggggccgcggcggcaagcctctattcggcgactaaaggcgcgctgatttcgttaacccgctgctgggcctcggcgttaggggaacgaaatatccgcgttaacgcgctgattcccggcccgattgacaccccatttcgccattttatgcgcgacgaggtgcgccgcgaatttgaagcctcggtggtgagccgcctggcgcttcaccgccaggggacggcggctgaagcggctgatgtggcgctgtttctgctttccgacgcggcgtccttcgtgagcggtagccagtatgtcgtggatggcggcctgacgttgcgctaa

SEQ ID NO: 178404 - DNA, 1698 bp, Klebsiella oxytoca
atgcacgctcttattacacttgtgctatgtgatatttctattatgcctgcaattaaaaatacgattatatctatgaccgcattagcgatgttcgtcagctcggcgaccttcgcaaatgacgatacctcgaaaaaaaccgatttcctgctgattggcggcggtattatgagcgcgtcgctggggacctggctgcaggaattacagccggactggaaacaggtgatggttgagaagctggatggcgtcgcgctggagtcctctaacggctggaacaacgccggtaccgggcactccgcgaatatggagctgaactatacgccggaacgcccggacggcaccatcgacgtcagcaaagcgctggatattaacgaacagtttatgatctcccgccagttctggacggcgcaggtcaaacgcggcattttgcacgatccgcactcttttattaactccacgccgcacatgagtttcgtctggggagataacgttgattatctgcaaaaacgctacgccgcgctgcagcaaacgaccttattccaggggatgaaattctctaccgatcacgcgcaaataaaacagtgggcgccgctggtgatggaagggcgcgatccgcagcagcgcgttgcggcaacctggactccggtgggtaccgacgttaactatggggaaataacccgccagctgatcggtagcctgaagaaaaataataacttcacgctgcagacctcttcagaagtcaccgattttaaacgcaatgccgataattcatggcacgtgacgattaaaaacgttaatagcggtgaagagcaggcgatcgatgcgaaatacgtatttatcggcgccggcggcggcgcgctgaaattactgcaaaaaaccggtattccggaagcggataactatgcgggtttcccggtaggcggctctttcctgatgaccgaaaacccggcggtgaccaatgcgcaccagcaaaaagtttacggtcaggcctctgtaggcgcaccgccgatgtcggtcccgcatcttgatgcccgtttcctcgacggcaagcgcgtggtgctgtttgggccattcgccaccttctcgacgaaattcctgaaaaacggttcgttcttcgacctgcttagcaccaccaccaccgataacgtcctgccgatgacccacgtaggtctggacaacttcgatctggtgaaatacctcatcagccaggtgatgctgagcgacgacgaccgttttgcggcgctgaaagagtattatcctggcgcgcgtaaagaggactggaagctgatccaggccggtcagcgcgtgcagatcatcaaaaaagatgcagagaagggcggcgtactgaagctgggtaccgaagtggtggtcgatcagcagaaaaccctctccgcgctgctgggcgcttcgccgggggcttctaccgccgcgccgattaccctgaacgttcttaagcagatgttccctgagcagttccattcagcggaatggcagcgccgtattcacgatatcgtcccgagctacggccagaagctgaacggcaacgtcgcgctgacccagcaggtttgggatgataccgcggcggcgctgcagctgaccaaaccgccggtgattgagatgaacgccaccgcgccggtgatgaccgccaaaccggcagagccgaaggcggaaacgtcgccgcagcacgatatggcgctgtaa

SEQ ID NO: 178405 - DNA, 621 bp, Klebsiella oxytoca
atgtcatcaacgccgcgtcctcatgatttagtctggttgaataatgccgccgcgctggaggcgattgaggagtcctgggtcgcgcagcactggcgtattagcctgccggtggtggtacgacgcgacgttgatgctaacgcccgcattccggtgggcgtacgggggatgaagcgcgatcagcgggccgcagcctgggtacagagggaaaatatcgtccgtaccgtcagcccggaaaccctcgccgatcgccaacagctcctgcgctcgccgtttgtctcccagccgccggtacaggcggcgatatcactgaccttacacccctggccgtggcgctggggcattaccggcagcaccggctacgcgctggccaccgagattccggtgcttcacgccgccagcgatctcgatctgctgatccgcgcgccgcagccgatcgcacgcgaagcgctgctcgcctggcagtcccgcgtcgcgcagctgccctgccgggcggatacccaggtcgaaacgcccgcaggggctttcgcgctaaatgagtggctgcgcgatggccgcgtcctgctgaaaacgtcccgcggcgcgcgcctgaccgctgcgccgtggaacagggaggaagcatga

SEQ ID NO: 178406 - DNA, 2157 bp, Klebsiella oxytoca
atgattcatttgccaggctggcgcaatattccctccgccagaacgctgtccatcatgattgtcctcgccgggatcggcttaatcgtgtccattgtttcgcttctttatctcacccaacacctgatcggcctgaaagcaaacgaaattgataagcatcgttccgtgttatcggtggatggggcggtgcagacctcggtgaaccgcgtgctgtcgctggtgatggataacgctatctgggatgatgcggtgcatcagacctatgccgacaggctcgatccgcaatggctctacaactcatggggatcgggttttaaaatcaataatctctatgacggcactttcgtactcgaccagcactatcgggtgctgtggggatcgtttcgcagtgagagctttaccgagcaggatacccaattcctcggcaacggttttcgtgcgcttatctcgcagcatgccgccgcgctgcgcagcggtaaaagcgcttatgccggcatcacgcgaacccgagccggtattgcgtttattggtattggcctgattcgcccgacggcagggcggctacaggtgcatgatgatacgcgtcgctatctggtgatcacccgccatatcaactcgcaaatgcttgagcgcctgggcgacacgtttcagattcgcaacctgcacgtcacgccaggcggcggtgaatacagtattccgctgcgcacccaggccggggagatcgtgggttacctgagctggcagccggggcttcccggcgcggaagccgcgcgggcggcctccgacagtatgcggctgattgccgccgtggcggctgggctgatcctgctgtttattctcttcagctacctcgggctttacaagctggcgcgcggcgaaaagctggcgcgcgacagtgccatgaccgactggctgagccgcctgccaaaccgacgggcgctgatcgaacgccttaaccaggtgtgcgaaacctcccaataccaaatgcaaagcgtggtatttatcgatctcgacggctttaaggatgttaatgataactacggccatgacgttggcgatgcgctgattattcatatcgctaaagaacttcgggagcgcgttccgcctgaagggatgctggcgcgtatgggcggcgatgagttcgcgatgacggtaagcggcgaacaggcggtaaatcaggcgctggcttttgcctgggcggtactggaactgttaaaagcgcccgttatcctcaacgagcgaaaaatttatatcagcgccagtatcggtatcgccagcggcctcccggcaagctgctccagcaccgagctttttcgccgcgctgatattgccatgtaccattcgaagaaaaccggcaaagggcgcacgacctggtatgacgaagcgctcagcgacgcgcggcagtatcagctgaatatcgaaaatggcattcgtcagggactggagaacgaagagtttgatgtctggtatcagccgattgtcaacgccgatacgctggttatggaaggcgtggaagcgctgctgcgctggccgcggcgtcctcagggggcactgccgccggatgcgtttatcggtatcgccgaaagtagcggtttgatctacgcgcttggccagtttgtgcttgaacgcgcctgtagcgaactgcagccactggacgatctgctgctgtcggtgaatatctccccggcgcagttccgcgatccggagtttgagtcgcgggtggtgcaggtgctgggccgctgtcatttcccggcccgtcggttacagctcgaagtcacggagagctacgttctggagaatcccgagcgggcgaagtcggccattgagaacttaagggcgcttggcatcgcggtggcgctcgatgattttggcaccggctattccagcatcggctatttacgcagcttcagcttcgacagtcttaaaatcgacaaatccctggccgggctggtggatgtggatacccaggcggcggagctggtgcgcgggaccgtccgtattgccggagcgttaggcatcacggtggtggcggagggcgttgagaatcagcaacagctggcgctgctgcggcgggcgggatgcgacagattgcagggtttcttcttcagcgagccgatgcccgtcgcgtcgttattgcagctgcgccagcagcaaggctga

SEQ ID NO: 178407 - DNA, 381 bp, Klebsiella oxytoca
atgatgtttggtggttttgtggtgttttttcgctgcctgtgctttctgagctactggtttagcagcggcttttttgtgtttcttagcggcctgagctttctgggtggcagccggtttagcttctgcttttttgtgctttttagcggcctgcgctttctgggtggcagcgggtttagcggctgcttttttgtgctttttcgcagcctgcgctttctgctcagcagccggtttcgcagcggcggtatggtgtttcttgtggtgggtcgctttagcggtggtgctgtgagttgcagcagccggcgccggagtcgtggtggtggcagcatcggcagcgaaagcaacagaagacagacccattgcagcggcaacgaccagagctaa

SEQ ID NO: 178408 - DNA, 1446 bp, Klebsiella oxytoca
atggaacttcgaaataaaaaattaacccacgacgaattcatgaccgagcggcatcaggtattgcagacctggcataccggcaaggacgttgagcacttcgaagatggcgtgaagtaccagcaaaccattcctgagaaaaaacgcttttctcacgctctgcttaaggccgaccaggagggtaaaaccctgagccagccgcgcgcgggcgtggcgctgatggatgaacatattgcgctgctcaaaaccctgcaggaagagtgcgatctgctgcccagcaccatcgatgcctatacccgcctcaaccgttacgaagaagcggcggtcggcatacagaaatccatcgaggcgggaacctccaaactgaatggtttgccggtggttaaccacggcgtcgccgcctgccgccggatgaccgaagcgctggaaaaaccggtccaggtacgtcacggtacgccagacgcgcgcctgctggcggaaatctccatggccagcggctttaccagctacgaaggcggcggtatctcctacaacattccctacgccaagcgcgtcaccctggagaagtcgattcgcgactggcaatactgcgaccgcctgatgggcctgtatgaagaacacggcattcgtattaaccgcgaaccgttcggccctctgaccggcaccctgatcccaccgtttatgtcccacgcggtggccattatcgaaggtctgctggcgctggaacagggcgtcaagtcaatcaccgtcggctacggccaggtcggcagcctcacccaggacatcgcggcgattaaatctcttcgcgaactctcccacgaatactttggcaattacggattcgacgattatgagctgagtaccgtcttccaccagtggatgggcggctttccggaagatgaatcaaaagcctttgccattatctcctggggcgcggcggtagccgggatgtccggcgccaccaaagtgatcaccaagagcccgcatgaagcgttcggtattcccaccgcggcggccaacgcgcaggggctgagggcatcccgccagatgctcaatatggtcagcgatcagaagttcccgccctgcgccgcggttgagcaggaagtggagctgataaaaagcgaggttcgcgcggtgctgaagaaagtattcgagctgggcaacggcgacatcgcccgcggtacggtgctggcctttgaagcgggcgtcctggacgtgccttttgcccccgcatcctgcaacgcgggcaaaattttgccggttcgcgacaatgccggcgccattcgcgtgcttgaagccggcgcggttccgctgccgaaggacatcctcgccctgcaccacgattacgtcgctgaacgtgcgcaatttgaaggacgcaaaccctcattccagatggttgttgatgacatcaacgcggtatcccacagtaaattaataggaagaccataa

SEQ ID NO: 178409 - DNA, 771 bp, Klebsiella oxytoca
atgagattattttttgcgtccggcatcatcctttttatccgcgctattctgcatattaagtgcttgcaaaaggcggtggggaataatgtggtgcgaaagaaaaggcatgaacaatgggagggctttagctcgctggcagcgcttttttcgcgggctaccgggctggagaccacggtgattgaggcaaatgacaatcgattacctgctggctacggtgggttaaatttctttgccttaccgctgattcaggacaatacattatccggttatattatttgcgaccatcataacgcgaccgacaaccagcatcgggcggcggcgataagattactgcattttatcgttaataatatgtctgcgattgcagaaaacagggaagtggacgagaaaccgttgcggcataagagagagttttattattcgcaaaaatcgtcgcatgaaataaaactgctgtcggcattacgctatattgatgagaatttatatggtgagctgtctttagagaccgtcgccgctcacgtttgtttaagcgcaaattattttagtcgtttttttaaaaaacgccaggggatgaattttaaagtctgggttaatcagcgcaaaatgcagcgtgccggagaactgcttggcgatccgtcatattcggtagacagcgtagcgcgtaagcttcagtttgcgcaaaccagctacttttgtcgggtgtttcgcgccgctcatcgcaccagcccgcagtcgttccgcgatcggcatctcgcagccgcttcacggtaa

SEQ ID NO: 178410 - DNA, 420 bp, Klebsiella oxytoca
atgaatctggaacgaaagaaggttttttggttttggggtgggatggatctcttttatctcttgcagtttattggctggaacatctaccaccggcgagtaccgctttacgacgatatcctctcatttttaccgctgctgcaaacctggggctccgcggccgcctggctgtttacccttcattttattctgactatcagcattcccgcgtcgatgattctcttctggcgccagagccgctatgcgccgtggctggcctatgcgcagacgccgctgcgtctggcctttatgctcccgtcgctttcgctggtggtctggctggcgcaggcggtggcgttgaaaagcgcggccttctttattgctctgctgctggtctcagaggcggcaaaagtcgtgacactatggcgatgccgcaaggtttga

SEQ ID NO: 178411 - DNA, 582 bp, Klebsiella oxytoca
atgaactatcaggttttccctctctttacccgcaccataaccttgctcttttttctgatcggcttcgctttctgcctgttcgggatttcagccttactaacctacagcatcgtggttggtttgttttttcccgtcggcatatccatgcgcctgcatcggctcaacgaaacgggcctcgcgctaacgctcaccgaggatacccgctggataacctacattcatggcttcccggctaaggagcagagagacgtcattaagaatccctgtttttggtcaacagaaagaacgcggcaattttttcttcgctgctttgcgagcaagatgattcttcaggcagcatgtatcgccatccttgcctgtgacgttctgtcttccgaaggcgacgcggtaactgccatccttgcgctgctggcgctgctgttcctgctctatatgtcaggtaaaagcgcctattccttctatttgctcgccacgaatcagtggcagtgcgaatccctgacaacctctggcggcagtatctggtatcagggattcttgcccaaaaaagagggtaaagacacgctgtttgcgcgattattttga

SEQ ID NO: 178412 - DNA, 1668 bp, Klebsiella oxytoca
gtgaataataaaagtctcataaccgccctttctctttatattctgttaaccgcatcgacattggcgaatgtatcgattagcaataccaatcaggtggaacaggataaggcacgtcaaagcgcattggcaccagcacagcaggaatattcggcatcaggtacaggatcgcaaaaatataaactcgcctttccacttgaagcaacctgccgatatatcaaccatgttgaaattatttccgctgaccacaagttgacccgcggcctgttaggcaatatcgctcgccaggcagaaaaaaagtgcctgggtattgaaggcatacgtctactcaccacaaccttgcaaaatgaactcattgcccggggatatatcacttcgcttattgatgtaccttcacaatccttgaatgatggcattctgagcatcacgttgagctatggctatatcggtaatattagctgggcttccggcaatagcgcgacaaccagcctgtggaatgccataccggctaaaacaggggatattctgaagctaaccgaactggaacaggggatggctaacttgcagcgtttacccggctcatcggcgcagatgaaaatcatgccgggtaagaaccatgcggaaagcgatatccaaatctcccggcatctgacacgaaactggcaagtaggcgcatggctggatgatgcaggaagccgtagcagcgggcgttaccaggccggtggcgcgctttatctttatgacctgacgacgctaaatgacattttctatttatccatggggggcgatgtcgagtttaatcaacataacgatggcaaccagaataaaagcctctattattctattccctttggattttggtcactcaatctttacggttcacaaagtgaatatcgtcagcagttcaatggcagatactccaccattgaatataaaagcaaaaatgattatgccagcgcaaccttaacgcgtctaatttcgcacacccgccagcaaaaaacaaccattgatgcgcgaatagcaaaaagtacctcacattattattttggtggcagcgaactgagcgttatgcgcaaacagaatcctgcctgggatattacggcacatcatcagcgatattttacccatacaatcgtagatgccagcctgggcgtacagcgtagccttccctggctcagttcaatgccaactccggaggaaaaagccggtctgtacagtaagctttcgcgcattattcatgccgaccttcaagccttaatgaagtttgaatcaacgggggataaattcagctatgctccgcatattaatatacaaattagccccgatatcttatccgcagacaatcaatttaatataggcaatcgttggacggtacgaggttttgacggtgaaagaaccctttcaggaaatcaaggctggtactggcgcaatgatttcatctgggatatgcccgccccggaacgacagctgtacttaggcatagacgttggacgcattacaggaacagagcagtacggaaatggcaaagtcatgtctggcgccacggtgggaatacgcggaagcataatttcaactcagtatgatttattcatcggaaccccactgataaagccaaacggttttcatacagaccctgcaaacctgggagtttcattacaatggaggtattaa

SEQ ID NO: 178413 - DNA, 1788 bp, Klebsiella oxytoca
atgtttaaattcaatttaacctatgttgcgctagcagcagcattgagctcaagctttgtttatgccgatccgacaacttacacccatttatcaggcgccaaagtcattgatattgaaaaacccaatgccgccggcgtctcacataatatgtatcgtgagtttaatgttgatagtaagggtgttgttctgaacaatagccccagcgatctctcccatgcgacgttggggaatatcgctaaaaataacaatctgactaatggtagtgcttctgttattcttaacgaagttacctcaaaccgtgcaagctcactgaatggatttattgaagttgcgggtcagcgagctgatgtggttattgctaaccccaatggtatttcctgctcaggatgtagtttcatcaacaccaataaggcgattttaacgacaggaaaggtaacattctctgatactggcgctatcgccagttatgacgttaccgggggtaaactgtccatcgacaagaatggaatggatgccagtaatagctatgcggttctgctcgccgatgcgatagccattaacggtacggttaatgctacgaacgcgatagtggccgcaggaaacttcacctttgataacggctctggcgcgataacctcagcgggcaaagcggcaacggcacggcagtatgtttaccctgaatatagtatcgacattagtaatcttggcggcatcaaagccaatagtattactatggttggcaataatttaggttttggcgttcgaaataaaggcgctattgttgctaacaccagcctctctttgaccagctttggctcactcaccaacgaaggctctatcgccagtaatggtatgatgactcaggtactctctgcaggcaattttaaaaatacgggaaatatatcctcgaataatatcgccttactgaatagcctcagttcgataagcaatagtggaaccatttccagcacaggaaatttattagtcaacgcatccggaaatatcgaaaacacgggtaaattcaaagcggcctccacattgagcgtaatgactaacggtaacctgaaaacgacatatggttccaatttactttcagataatcagttgacagtcaccgccgccggtaacattgaaaacggaggctcgaccagaggtaaaaacacaacggtcaccttcggaggagacacgcttaaagtcactggcaatatttttggctacgatactctgctggttcaggcgaaaataaatgaccagataacatccggggaaattaccaattctggtaccacctccggcggcaacgtgaccgtaaaaaccgatggtactctggcgttaaccaaaggtagctttatggaagcgactgatacgctgacgacaaaaagctactggcttaaaaatgaaggttatatgggggccgatacgatagctattgataactatgtcacacacaactatggggttattgttggtcaggataatgttggcgttaaaacctatcatgagctttataatgaaggcgaaattttaagctcatcaaatatgacgctggatacacggaatcacggtaatattactaaccgttctcacataggagctggcggcactttaaccatgtcagttaataaagtggttaacggaggataccgctgcggtttcctggggtgggcaacctgtggcaaaggcacgatttccacgactaatctggttttaaattcctcacataaatacgccagtgaaatgggcggcactcagcagtttaagagcgcgaccattaacaccatcaattaa

SEQ ID NO: 178414 - DNA, 630 bp, Klebsiella oxytoca
atgaagttatggttagttcgtcatggcgaaaccgaggccaacgtcgcgggcctctatagcgggcacgcgcccactgcgttaaccgagcgcggaatcaaacaagcgcaaacgctgggaaagcggctgcgggccgtcccgtttcagcgcgcgttttgcagtgagcttgagcgcacccagcgcacggccagcctcctgctgggcgaccgtgacgtcccccgccagtccttcgccgcgctcaatgaaatgttcttcggcgactgggaaatgcgccaccaccgcgatttacagcaggaagatgccgaaaactacgccgcatggtgcgccgactggcagcacgcggcgcccaccaacggggagggcttccaggcgtttgccgaacgcgtccgcggctttaccgtcatcctctctcagtttcgggaacttgaccatctgcttatcgtcggtcatcagggcgtgcttagcctcttagtcgcgcaacttctgaacatgccggattcggcgatgtggcacttccccatcgagcatggcgcgtggagccttgtcgatctccagcctgatttcaccacgctgcgcgtactaaatagccgggccgtttggctggcggaagaagaattgcgcgcagaccattga

SEQ ID NO: 178415 - DNA, 954 bp, Klebsiella oxytoca
gtggaagaaaataacgctcagagcgtaccaaccgaacgagttgacgatcgctacgatcggcagatgtttcgcattttgcgcaacatagacctcaatttactcactatttttgaagcggtttacgtccataacggtatcgtcaacgcggcaaaaatactgaatatcacgccgtcggcgattagtcagtccctgaacaaactgcgcgccctcttccctgacccgctctttattcgcaagggccagggcgtgacgccaacggcctacgccacgcatctgcataagcatatcagccaggggatggaggcgtttctcaacgccctggatttaaccggcaatacgcagcgggaacgggtaataaccgttgccacctccccggctatcggcgcgttgatcatgccggttatcaccaaaaagctgcggagcgtctttccccagattttgctgcacaacgtcgccattaccgacgcggccagccagttaaaccagcgtcaggttgacctgctggtcgatagcttcccccacagcgggcaggcgattacgcaccatgtgctatttcaggatagcgtacatatcttctgccgggcagggcatccggccctcgcgctccccgcaaactcagcaaacctgagccaatatgaattcgctctcctgcagcccgaaggccagcgctatacgaccatcctgcgtcacctggaggagcatctcggcgaacgccgctatggtttcagcagctacaatctgttaactcaagcagccctggtcaacgacagcgatatgctggggctaatcacttccggaatgttttccctggtcgagaagatttggcccttaaagatgctcgatttcccgccgctgcgggaagaaaaaattgatattgcgctgcactataacaagctcagcgcgcaggagcccttgctgaaagagatcgtagagacgattcgtcaggctttttag

SEQ ID NO: 178416 - DNA, 1224 bp, Klebsiella oxytoca
gtgtcttttataaaacttccattacccgagtccgttctgcaggccagtcagcagcgaatagaatgggtaatggaaaacttctcccgtatttgcgtctctttttctggcggtaaagattctacaaccatgctgcatctcacggcgcagcaggcccgccgtacaggcaaaaagatttgcgtcctgtttgtcgactgggaagcgcagttctcctgcaccattgcgcattgtgaaaagatgcgcgcagagtatcgcgacgttattgagcaatttttctgggtcgcgttgcctctcaccacgcagaactctctgacccaatatcatcccgaatggcagtgctgggaacccggcgcgcgctgggtgcgccaaccgccagaggacgcgattaccgatcccggctttttcccgttttatcaatcgggcatgagttttgaaacgttcgttcgcgaatttgccgattggttttcgcgaaatcgtcccgcggcgataatgatcggcatccgcgccgatgaatcgttaaatcggtttatcaccatctcctcgcagcgcaagcttcgcttcgccgacgataaaccctggaccacctccgcgccgggcggacacgcgtggtacatctaccctatctacgactggaaaaccgccgatatctggacctggttcggtaaaagcggcctttcctacaacccgctctataacctgatgtatcaggcgggcgttccgctgcgctatatgcgtatctgcgaaccctttggcccggagcagcgccaggggctgtggctctaccatgtgctggagcctgaacgctgggccgccatgtgccagcgcgtcagcggcgtccactgcggcggggtctacgccggtcacgataatcagttctatggccatcgtaagctggataaacccgcgcatcatacctggaaaagcttcgccctgtttttactcgacagcatgccggagaaaacggcggaacattaccgcaataaaatcgccgtctatcttcactggtaccaaaaaaagggaatgatggatattccggacacgcaaccggcggatattggctcgaaagacgtcccgtcctggcggcgcatctgtaaggttctgttgaacaatgattactggtgccgccagctctctttcagcccgaccaaagcgacgcaatataaacgctatcgcgaacggatgaataaaaagcgccagcaatggggaatactatgcaacgacaattaa

SEQ ID NO: 178417 - DNA, 1560 bp, Klebsiella oxytoca
atgtctgtaatacgtcaacgtattctggagaatatgcaaaaattctccagagcaatgatcggtgcagtattgttcttgccggtcatcggcttaattttggcactcagttcagtcttaaccaacccaacattaatttcggagaccagctttttacaccagctcggccagctgctcggcgatactttctggcctttattcggcaatctgggattacttttttgcgtcggcatcagctatggcctggcaaaagataaaaaaaccgaagtggcgctggtgtcggtgatgtgttttatcatgtttcttggcgccaaccactcgtggctggagcatacccacggactcgcggaaaaaattaacggcgaatattacggtaccgggcagactcagctgctggggtttgtggtagtcgatatgggggtcttcctcgggattattctcggctgcaccatcgcctgggtgcataacaaagtgtcgacgattgaactgcccggcgcgctctccatgtacggcggagccaagctgacgctggtggcaatgaccccggtcgtcattttctacgccatcgcctttacctggatctggccgtttatgacccacggcatcgcggcgctgaccggctttatgaaaaacgccggcgtggcgggggtcttcgtctacggcttctttgaaaaattcctcatccccaccggcctgcaccacttcgtctggtcgccgttccagctcacgcaaatcggcggtacgctgaacgtcgacggccaggtcgtctccggcacccaggcgattttcctcgcctatatgcgccacccggatttaaccccggtgatgaacgaggcgctgcgtttctcgcagcaggggatgaccactatcttcggcctggccggcgcctcgctggcgttctaccacacggcgaaaccggagaaaaaaatgatggccaaagcgattctgctaccggccattatcacctctatgctcaccggcatcaccgagccgattgagtttaccttcctgttcgtttcgccgctgctgtgggtgatccacgccacgttaaccgcggcctcgcaggcgatttgcgacatctttaccgtgcgtccctggggcgcttccgggctgattgagttcctgatttacaacctgccgctgccggtctccctgacccgctggcccggctacgtgcttatcgggattggtcagttcgccgtttactacgttatcttccgcacgctggtcgttaagttgaatcttaaaacgccgggtcgtgaagacgatgaaaatgtgaagttatatagcaaagctgattaccgaaaaaaaatgggcgaaccgcagtcggtgaccaacgagattattaatggtctgggtggtaaagagaacattatttccgtcgacaactgttttacccgcctgcgcgtcgctattcataatatggatctggttgacgatgcgatattaaaaagcaccggcgcaaacggcgtagtacgaaatcgaaatgaagttcaggttatttacggcgtcaaagtgggacaggttcgttcccgggttgatagctggctagcagaaaattaa

SEQ ID NO: 178418 - DNA, 675 bp, Klebsiella oxytoca
atgaaacgttcacagattaactacgcgattgataaagcgcatgctatcgccgagtcctttcgcatttgcttacccgagtttgcctgctttaccgccgatatctgggcgaaaaagcggtttgaagagtggcgagaagttcgggatctacagcttggctgggatattaccgattttggcagcggccgttttcaggaaaccggactgacgctgttgaccctgcgtaacggcgcgccgggcgattcgcgctatcccaagccctacgccgagaagatgttgcagattcagcaggatcagcaaaccccctggcattttcattatcacaaaatggaagatattctgaaccgcggcggcggccggctctgtctgcagctggcatgggcgacagaagatgaacggctggatatgcagcgcagcgtgagcgtcgcggttgatggccgccagcgcacgctgaaaccgggagaaaccctggctcttaaccccgggcagggcgtttgcctgccgcccacgctgtaccaccgtttttgggctgaaaacgcgctggtaatgggctgggaaatttcgatggtgaacgatgataagcgcgacaatcgttttctggaagatagcggtcgcttcccgatgattcaggaagatgaaccgaaaaaatggttattgtgcagtgagtacggacgctga

SEQ ID NO: 178419 - DNA, 933 bp, Klebsiella oxytoca
atgaagtatttggggctggatattggcgggagcaaaatcgccgccgtagtgatggatgaacaaggccatgaatggaagcgttttcgcgttgaaacgcgaaaacagacccggcagcagtttatcgcaacgctggtggcgttaatcaccgcgattggggatgagctggctcagcctttggctatcggtgtcgccctgccggggagtatctccccgcagaccggcaagatccgcaatgccaatattcaggtcatcaacggctgccgcttacaggatgaacttgagcagcgcctgggccagccggttgtgctggcgaacgatggcaactgtttcgccttatcagaagcctgtgatggcgcaggtgccgattattcgctggtatttggcatgacgctggggaccggatgcgggggcggtattgcgcttaatcgccagattttccccggcgcgtcagggattgcggcggagtgcgggcatatcacgctgccggggtatcaggaggtcaacgatgggccgcccgagcgctgctactgcggaaaatataactgcgtcgagtcctttatttccggcaccgggctgagcgcgcgctatcgtttgatgacccggcaggcgctcagcagtcaggctattatcgcccgggcgctggagggcgagcacgccgcctgcgagcaggtgctgcgctttcgccagcagctggcgcggacgctggcgacggtggtgaatcttatcgatcccggcgtgattgttctcggcggcggcctgtctaacgtggcgctgctggtgaacgacctggaggcggatgtcgccccgctggtgtttaccgaccatttcaccacccccatcgtgcctgcccgacatggtgacagtagcggcatgcgcggcgccgcctggctggccgtccgcagcggagtcgaaaatgaaacgttcacagattaa

SEQ ID NO: 178420 - DNA, 861 bp, Klebsiella oxytoca
atgttagtttcaatgcacgaattacttaaacccacccgtgaacatggttttgctatcggcgcatttaacgtggcggatagctgttttattcgcgccgtggtggaagaggcggaagcgacaaatacgccggcgattatttccattcaccccagcgagcatgattttgttggcgacgcgttttttagctacgtgcgggatatcacccagcgcagccgcgtgcctttcaccctgcatctggatcatggtgcctcggtggaacatgttctgcgcgccattcagtgtggcttcacctcggtcatgatcgatggttcgctgctgccttatgaagaaaacgtggccctgacccgcgaagtggtgcggctggcgcacgcggtgggggtgtcggtcgaaggtgagctggggaccatcggccagaccggaacctctgtggaaggcggcgtgtcagaagtcacctataccgacccggcgcaggcggaagatttcgtcgcccgtaccggcgtggatacgctggcggtagcgattggcaccgcgcacggtatctatccgaaggggatgcagccggagctgcagatgcacattctgcgcgatatcgccgggcgtctgtcgattccgctggtgctgcacggcggctcggctaatccggatgcggaaattgcggaatccgttacgcttggcgtcggcaaaatcaatatttccagcgatatgaaatatgcctatttccagaaagcgcgcgaaattctgacaaaagagacatggtgggatccgaatgtcatttatccggaaccgattaacgccgcgcggaaggtgattcgccataaaatgaagctctttggctctaccggcaaggccagcctgtactaa

SEQ ID NO: 178421 - DNA, 852 bp, Klebsiella oxytoca
atgtttgccgatatgaaaagtatggtgatcaaagcctggcgtgaacggtatgccctgctggcgattaactgcatgaacctggaaagcgcacgcgcggcggtgcgcgtggcggaaaaacatcgcgcgccgattattctcaacctgtatcaggggcatctgtcgcactttccggcgacgacggcggcggcggtagtcagggtactggcggaggaggcgagcgtacccgtgacgttaagtctcgatcacggcaaagagccgataaaaatacgtcaggctttccgcgccggatttagcgggttaatgatcgatgcttcggcgttcgcgctggcggagaacatccgccagacccgagaggtcgctgaactggccgccagcgttgggctgtgcgtggagggcgaactggggcacctggcggatgcgccgcgctacgaccaggccagcaatgccgatttaatgacccagccgcaggacgtccctccctttatcgaacagaccgggattgacctgctggcggtctccgtgggaaccgcccacggtatgtacgcccccggcgtaaaaccgatgctcgatttcgaccgcctggcgcagatacagcgtgcgtcatccgtgccgctggcgctgcacggcgggagcggtacgccgttcgagcagctgcaacgttgcccggaattcggggtcgcaaaaatcaacgttggggcggcggtatttgaagcggggaaagcggcgctgctgcacaccctgtgccacgacagcaccattgagctggccgatgcgctatcggtgatggagcaggccagcgctgacgccatcgttccctatttacacgcatccggctcaatcaacaaagcctga

SEQ ID NO: 178422 - DNA, 1092 bp, Klebsiella oxytoca
atgagtgagaataaaactcccgtctcacaggaaattaagaagcatttattaaccggtatttcatggatgataccgctgatcgtcgccgccgggatctgtatcgcgctgggacaagtccttggcgggacgaacgttggcgagaaaaccggcaccattccgtggatgttaaaccaaatcggcggctggggaatggggctgattgtgcccttgatctgcgccgctatcgcttactccattgccgatcgtcctggattcgctccgggtttgatcgtgggttttgtctgcgggcaaattcataccggttttattggcggcatgctgggcggcttcctcgtgggctacacggtactggcgctaaaacactatattcggctgccgaagtcgatgcaggggttgatgccgattatggtgctgccggtattaagcaccatcattagcggtttgctgatgatgaccctgatcggcaagcccattgcctggctgcaggacgcgctgattcacatgctggagtcgatgcagggcggctcgcgtttcctgctgggcgccatccttggcgccatggcgaccttcgacttcggcggtccggtgaataaaaccatgtcgctgtttgccgatggtctgctggtcagcggcgtttacggcccggaagcggtgaagtttgtgggttcgataatcccgccgttcggcatcaccttctcgtttctgctgacccgccataaatacacccgtgccgaacgcgaagccctgaaggccgcgttcccgatggggatctgcatgatcaccgaaggggtgatccccatcgccgcccgcgatctgctgcgcgtcgtgggatcctgcgtggtggcgtcagcggtggctggtggcctgatcatgacctggggcgtggagagtccggtgccgcacggtggaatgtttgtggtgccgctctttacgcatcccctgctgttctgcctctctctggcgattggcaccgtgatttgcggtgtgatgctctcgctgtggaaaaagccggtaaccgagcgcgatgaagagtttgatgagctgaacgaccaaaaggtcaaagacgacgaaatcacctttaccctcgaataa

SEQ ID NO: 178423 - DNA, 315 bp, Klebsiella oxytoca
atgaatattgtctgtgttgctgcctgtaccgcaggtattgctcatacttatattgcacgtgagaagctgattaaaggcgcgaaagcgctgggccacaatgtcaaagtcgaaacccagggaaccattggtactgaaaatgaactggcggcggaagatattgacgctgcggatgtcgttattcttgccattgatgtgaaaattaaaggcgaagagcgttttaaaaataaacggattgtcagagtaaaaacggaagtcgtgattaagtcgccgattcagtttatcgaaaaggtcgaaaaatccttagcgaatgcctga

SEQ ID NO: 178424 - DNA, 471 bp, Klebsiella oxytoca
atggacataaccaggattttaaacaccaaacgcgttttgttagatatgcacgctacgaataaagcggaagccatcgaggagttaaccgacttattacaaaaagacggggcgataagctgtcgagaaacctttattcaggatgtctggcagcgtgagtcggaaggctcaacggggtttgaaaatcatattgcgatcccgcatggaaagtcgtccgccgttgttaataccacccttgccattggtcgcacccggcaggatatcgcctgggaaacgctggacggcagccaggtacgctgcattattttatttgccgttcgtctggaagatcaaaataccacccatattcgcctgttgtcccaggtcgccggagcgctggcggatgatgacattattgaacaactgctcaaagaaaccagtccgcagaggattattgatctgtttaaccaatatgccgagtcggacatttactaa

SEQ ID NO: 178425 - DNA, 1572 bp, Klebsiella oxytoca
atgcaaatgattacctcacgacagaacagattattgaaatttctcctgccccgcagagaatacgttacgctgatgaaaattgctgaatatttaaatgtttcagaaaaaacggttcagcgtgatttacgctttttagaacagtggttatctgagtggaaaatgactatcgacaaacgctcaggcgccggcgtgatgctgatcgctgataatgtcacggatctgctgcaattagaccaattactcagtaacgagggggaggacagcgatgtcatgatgaataactcccggcgcgtgaaaattgcttcgcagctgttaagtgagactccgcgggagacatcaattaataagctctctgagcgttattttatcagtagtgcatctatcgttaatgatctgaaaattattgagtcatggattgctccgctcggcttaacgctgattcgtagccagagcgggacgcatattgaaggcagcgaaaacagcgtccgccaggcgatggcgtcgttaattaatggagtgattaatcataatgagcccggctgtattatccattcccggctggactcaggaagctataaagcgctggtgcattattttggtgaggatgacgttttatttgttcagtcattattacaggaaatggagcgcaagctgtgctggtcattaggcgaaccgtattatgtgaatatttttacccatatcctcattatgatgtatcgcattacccgtgggaatgccttaccgcggcgtgaacaggggcagcagatttttgatgagacgatatttagcgttgcccagaatatgctgcgaaaaattgaacaccgtattgaccattcgctgccggaagatgaagtctggtttatttatcagtacatcatctcctctggcgttgtggtggaagagcgagatgatgtcagcatggtgcgctatatgcattctagcgatgaggcccgacaaattaccgatcgtctgattagcgctttttccaccatgattgatctcgatttaaccgccgatcgcgcgttatacgatggcctgctcattcatatcaagccgctcattaaccgccttaattttcggatttatattcgtaaccctctgcttgaggatatcaagggcgagctgacggacgtgtggccgctcacccagcgggcggtcaatcaggtttttagccgctggggcgagcgtgcggtttccgacgacgagattggctatctcaccgttcatttccaggcggcgatggaaagacaggtcgccagcaagcgcgttctgctggtttgttctaccggaatcggcacatctcacctgttgaaaagtagagtgttaagagcgtttcctgactggaccatcgtcggcgtggtttcggcaagcagcctgcatacccttcagccgcaggacaagattgaactggttatttcgacgatcaatctgccggaaatagctttgccggtagtctatgttagcgcattttttaatgatgccgatatccggcgggttacggaaaaaatcgttaccgacaaattacatcgcgcggcaatatctgctgtagataatgaagttttatatccatga

SEQ ID NO: 178426 - DNA, 1365 bp, Klebsiella oxytoca
atgtttcgttttaccttagtttttgttgcgctcctgacggcgggctgcgtctctctcgacccgcactatgaacgtccggccgcgcctgtcccggcgaccctgccgggtagccacggcgaggcaaccgcggtagtcagcgactggcagcaggtagtgaatgacgctcgcctcaaaaaagtggtgaacatcgccttgaccagcaaccgcgacgtgcagaaagcgctggccgatattgaagccgcgcgcgcccagtttggcgaaacccgcgcctcgctgtttccgaccctcgacgccgagctgagccatacccgcagtaaaacggtggccagcggcctcacctcgtcagcggaagccgacggcgcggtttccagcttcgagctggatctgtttggcaagaaccaaagcctgacgcgcgcggcgcgggaaacctggcttgccagcgaattcaccgcccagaatacgcgtctgacgatgatcgccgatctgaccaccgcgtggataacgctcgccgcggacaacagcaatctggcgctggcgcaggacaccatggccagcgcggagaactcgcgccgcatcgtcacccgccagatggaagtcggcaccgcctcggcaggcgacctgagcgatgccgaaagcgtttatcagcaggcgcgcgccagcgtcgccagctaccgcacgctggtggcgcaggataaaaacgcgctcaacctgctggccggagaaaccgtgccggatagcctgctgcccggcacgctggaaagccttggcgatcggagtatcaccctggtgccggcgggcgtctcttcatcggtactactgcgccgcccggatatccaggaagcggagcataatctgaagagcgctaacgccgatatcggcgcggcgcgggccaatttcttcccgtccatctcgctgaccgccagcgccggggtcggcagcgactcgctctcgtcgctgttcagccacggcatgcaggtgtggtcattcgcgccgtccatcagcctgccactgtttaccggcggcagcaacctggcgcagctgcgctatgctgaagcggagaaaaaggggctgatcgccacctatgagaagacgattcagagcgcctttaaggatgtcgccgacgcgctggcgcgccgggaaacgctcagcgaacagctggacgcgcagaataaatacgtcgcggcggagcagaaatcgttgaatatcgcgatgaagagctatcaggccggggtcggagattatctgtcggtgctgaccgcccagcgaacgctgtggtcggcgcaggccacgcttatctccctccagcaaacggatctggaaaaccgcattaccctctggcagtcgctgggaggcggcgccagctaa

SEQ ID NO: 178427 - DNA, 237 bp, Klebsiella oxytoca
atgccagccgcaaaacgcaataagcagaacgtcagcgtgacactggacccaggcctggttaaacaggctcgtgaggtcggcatcaatctgtctctaacgttgactaacgctctaaaaagcgaaatccacagcctcgaaatagcccgctggcaaaaagaaaatgcccaggcaatcgactacctcaataatttaactgaggaaaatggacttctctctgatgaatacaggacgttctaa

SEQ ID NO: 178428 - DNA, 309 bp, Klebsiella oxytoca
atgcagtattacgtttataagaatacaggtcgaattgctgcgtatccttacctccttgatgtacagagtgacattatcggcaagcgcaatactcgggtcgtaattccactgtttccactgaaaaactataaaggtccacgcgccgatcgtttaacaccgcttgtcaccgtagaaggggaagaatacgtcgtgatgactcacgaactcgccagcatcccacatcgtgttctgggtgaagaagtttgtaatctgaatcaccagcgcgaagtcgttaaagcttcaatggattttcttttcgacgggatctaa

SEQ ID NO: 178429 - DNA, 954 bp, Klebsiella oxytoca
atgacgcaaaaaggaaccccctcgacgccgcacgatgcggtttttaaacagtttttatcgcatcccgagtgcgccagggattttatcgagattcatctgcccgcttcgctgcgccagctgtgtaatctgcaaacgctcaagctggagtccggcagctttattgaggccgatttgcgcgccagctactccgacgtactgtggtcgctgaaaacccgcgacggcgacggctatatctatgtggtgattgaacatcagagcacgccggaagcgcatatggcattcaggctgatgcgctacgcgctggcggcgatgcagcgtcatctggacgccgggcacaaaacgttgccgctggtggtgccgatgctgttttatcacggcgcgaaaagtccctatcctttctcgctttgctggctggatgagtttactgatacgcagacggcgcgacgactttatgccgccgctttcccgctggtggatattacggtggtgccggatgacgacattatgcagcaccggcgcgtggcgttgctggagctgattcaaaagcatattcgccagcgcgatttacttggcctggtggagcgattagccgagctgttggttaaaggttgcgctaatgacagccagttgaaagcgctgtttaattacatgctgcagtgcggcgatgcgcctcattttggtgaatttcttcacgaggtcgagcggcgcgttcctcaacataaggaggtactcatgacgattgcggaaaggctacggcaggaagggagacaagaaggcaagttggagggcaagttagaaggtaaacaagagggtagactagaagaagcgttgcgtattgcccgttcacttctggagcaggggtttgagcgcgagctggtgcaggtggcttgcgagctgacggatgacgacctgaagaggctgcaaacgccggtcgcagcctctcctggccgataa

SEQ ID NO: 178430 - DNA, 1380 bp, Klebsiella oxytoca
atgaaaactgtaaaaatgctgccattaaccatggcggtcgtcgccgcgctgtgcccaatttccgtattcgcgcaagaatttactcaagaacagatagacgccattgtggcgaaagccgtcgataaagccctggccgaacgccaggcgaaaatcgacgccgcggctgataaaaaagtggatgttatcaccaacccgcagaccaccgcggccacgccggatatggcgatcctcttcggcctgaagttcagcggctacgcccgctacggcgcgcagttccagaccggcgatcagaagtttgtcggcgtggatggctcctataacggcgcttcggcgatcggccgtttaggcaacgaaggcaacggcggcgaattccagataaccaaagccttcaagagcagtaaaggcgcgatctgggatatcaacgtcatgtttgaccactggagcgatgaagttaacctgaaaaaagcctacgtcggcgtcaccaacgtgctggagtctaaccccaacgcctatatctgggccggccgcgacttccatcagcgcccgcaacaggggatcaacgactacttctggatgaaccacgacggccagggcgccggggtgaagaactttgatatcggcggcgtgcagtttgacgtggcgggagtgtcgcaggtggagtcctgtagcccggaagtgatggccgacgaggccaacccgtcgcgcatcacctgtaccggcggctccggtaccggcgataacggccactacgccctgaccaccaaaacccacaacatcaaggccgggccgatcgacgttgaggtttacgccaactacggtttcgattcgaaagcggtggacagcgacgaacgtctcgacgcctggcagggcgggctggtgctcagccacaccaacgacagcggcgtcaataaagtgatcctgcgctactccgataactcggataacagcgtctacaacaaaaccgatgacctgaccgcgatttacgccagctttgaagggctgcataaattcacccagcaggcgcagatcgaatatctgctggccttccacgactatgacaacggcaaggacaacaccgataaccgtaaaaactacggcgccattgtccgtccgatgtacttctggaacgatgtgcactccacctggctggaagcgggctaccagcgcgtcgattacgaccagggcggcgataaccacggctggaagctgacgctgtcgcagaacatcgccatcggtatggggccggagttccgcccgatgctgcgcttctacgtgaccggcggccaggtggataacaagcgcaccgcgaaggtcaatggcaccaaagacgaacagctggattcgctgaacgtcggcggcatgtttgaggcgtggttctaa

SEQ ID NO: 178431 - DNA, 267 bp, Klebsiella oxytoca
atgtcaccccgtacacaccgccagctcgtcagcgttgaagtgatgtggcctgctcaaacgctaccgcttcccctgcaacaggtagtagaagccttgaatcagggtgaaacacccgatcaaattatcatccgtatgaaccaacagggtctgctggcatggcgcgaagagacaggcgcgcaggatacgcacgatgtttttcaggtccggctggacaatcagaatgaggcgcgctttctctgccgctacgccatgctgccgttacactga

SEQ ID NO: 178432 - DNA, 633 bp, Klebsiella oxytoca
atgccagtaaaacgaaaacatctgactctccaggaggtgggccagatattacgtgcagcagaaagggggattcattctgagcgtgattattgtctgattcagatgtgttttttacatggactgcgcgttagtgaactctgtggtatgcgcttgtccgatattgatttgacagggcgggcggtctttgtcaggcggcttaaaaacagcctctccacgcagcatccactatttgatgctgaactcccggcgttgatgcgttggctaagagtacgccgacgctggcgggatgcagacagtgactggctttttctatcacagaaaggaggcccactgtcgcgccaccaggtcaggttgttactcagacgttacggtgaaatgggcggaataagtgtttcagcgcatccacatatgctgaggcatggatgtggttacgcgctggcagatttgggtcgcgatacccgtttaatacaggattatcttggacatcgaaacattcagcatacggtgatctatacggcgacaaatacacagaggtttatgaatgtttggggagaatatgtaggaactgcacaattagtaccagaatgtaaagtagtatcagaaaaatttagcaaagtgtcaaaacttttctga

SEQ ID NO: 178433 - DNA, 513 bp, Klebsiella oxytoca
atgaaaaaaacgatgttaagcgcgtgttttatgctggttgcggctaatgcctttgctgcagatggcaccatccacttcaccggtagcattactgaccagacctgcaaggtcgataccggctcccagaatctaccggtgaacctcggcaacgttgcccaaacagcacttaacggtgctaaggggatgagagcggcgccgacgggatttaccatcaacgtgagcgaatgcccggaaacggtcaccggcgcgaatgtgaaatttgacgggacttccgataacaatgatcggagtctgctggcgttggacagtggaagtgggattgccaccggtgtcgggattcagattgcggataaaaacggcacggctattccgctgcatacggcgtcaacagactatgccctcgcgaaaggtgctaacgcgctcgattttgtcgcccgctatgtctccacaggcccagcagtgactaccggtacggcaaacggaacttcagagttcaccatcatttataaataa

SEQ ID NO: 178434 - DNA, 681 bp, Klebsiella oxytoca
atgatcaggtatgcagatattttgctggcgttagtactggctttatttaccgtgcaggcccaggccgggattgtaatcggaggaacgcgggtcatttataacggcgacaaaaaagagacctccgcatccatccgaaatcccgataaatccggcgtctggctggtgcagagctgggtggacagcggtgtgaagggaagcaaaacgccatttatcgtcacgccaccgttgtttcgcatcaaccccggtgaagagaacatgctgcgtatcgtgcgcaccggcggtagcctgccggaagaccgggaatccgtattctggctgaatgtgaagtccatccccgccaccgacgacagcataccccataacaacgttttgcaggtcgtggtgaagtcgcgcctgaagcttttttaccgtccggctgggctggaggggcaaccggagacggcataccaccgcttatccgtcacccgcagcggcaaccaactcaccgtcagcaatccgacgtcttactacgtcacgctattcaccctgaaggtggacgggcaggagattaaagaggccaatatggtgccaccgaagggcagcgtcagcttcatgctgccatcggccacggtgtccaccgtaacctggcaggctatcagtgattatggcggcgtcagccagaccgaaagtcgaaaactctga

SEQ ID NO: 178435 - DNA, 2508 bp, Klebsiella oxytoca
atgaataatccgaattcccgcctgatgatatttttgctggcactgttgttgatgatggtgcttctgctggggtatctgcacagcgctgaagcccgcgagacctttaatacccacgcactcgagcttgacagctcgggtcagccggtcgttgacttatccgcttttgccgaagcggatggtcagatgcctggcacctatcgggtgacagtgtatgtgaacggcgaacagcagggtgatgcacaggatattgcctttgtttcaggagcaaataaaaaactcaccgcgcagctaacgcctgccatgttgaaagactggggcgtgaatatcgccgccttcccgacgctcgcagcgctgccgccggaaacccccctggaagatcccggccgctatatcccgatggctaccagcgaactgcgtttcagcaaactgcagctgcatctcagtattccgcaggcggcgatgagcgcaaccgcgcgcggctgggtggatccgtcacaatgggatgagggcgtgtctgccgcactacttaactataacctcagcggcagcaatacctggcgcgacgggaaaaatggctccgataataactattacgccaacctgcagagcgggctgaacctgggcgcctggcggctgcgcaactattccacctggaattacgacgaggacaacggtagccgctgggattcggtgaacacgtatatccagcgggatatccagcgccttcaggggcagctcacgctcggcgacagctacacgccgtcggatattttcgacagcgtccagtttcgcggcgcacagctggcgtccgacgataatatgctgcctgacagcctgcgtggctttgcaccgattatccgcggtatcgcccaatcgaacgcacaggtcaccattaagcagaacggttatatcatctaccagagctacgttgcgccgggggccttcaccattagcgacctctacccgacatcgggcagcggggatcttgaggtgaccattaaggaagctggcggcagcgaacgaacctttgtccagccgttctcggcggtgccgattatgcagcgtgagggacgtctgaagtacgcccttaccgccgggaaataccgcagcggcaataatgacagcgatgagccggaattcggccaaatgacggcgatatacggcctgccgcgcgctgtcactatttatggcggcacactgtactcgcagaattatctgtccggggcggcggggctgggctttggcctgggtgaattgggttcggtttccaccgatatcaccgccgcgcataccaccctcaataacgatgaaacccacaacggccagtcgtaccggatacagtattcgaaggattttcaggcctccgacaccagtttcaccctggcggcgtaccgctactccacggaagggttttatacctttcaggaaacgaacgacctgcgtgcggaaaataacgatggctggcggctgacgtacaacaaacggcagaaactccagctcgacctcagccagagtatcggcaattacggttcgctctttgtctccggctaccagcaggattactggcaacaggatggttatgaacgcaccctgagcaccggctggaacggcaatgtgaatggtatcaactacagcgtgacgtacagctacagcgactacccggatagcacccagcctgccgatcagcagttagcgtttagcattcagataccacttaaccgctttctgccgaacgcgtgggccagctacagcgtcaacaccgcgaagcacgggaatacccgtcagcaggttgggctcaacggcacggcgctggctgataataacttcagctacggcctccagcagagctataccaaccatggagaaggctcctccggcaatatcaacgccgattataaaggcggacagggtgaaatcacgggcggctacaactatgacaaggatacacagcaggtgaactacggcctgaaagggggggttgtcgtccatccgcatggcatcacgctttcccagccgctcggtgattcactggcggtagtgagagcgcccggcgcggatgacgtgaaggtgcaaaacaataccggagtctataccgactggcgcggttatgcggtggtgccttacgtcaacgcctatcgaaaaaaccgtatcgcgctggataccagtacgctcggcgacggtgtggacatcgacaccgccgtgcaaaccgtgacgccgacccagggggctgtggtgatggcggacttcaacacccgcgtcggacggcgcgtactgatgacgctgatctatcgcggactgccggtgccgtttggcgcacaggcgaagatgaaatccggcagcagcggtatcattggcgatgacggccaggtgtacctgacgggagttccggatgaaggtgatatcacggtgaactggaacgggaagtcgcaatgtaaggtgcattaccagttaccagaaaatggcgtaaatgcgccggtaacggaaactgaacaggagtgccgggaatga

SEQ ID NO: 178436 - DNA, 1005 bp, Klebsiella oxytoca
atgaaaaaaatgatgtcatggatttatctgctggttttattagcagtatccagcggagtgaaagccgcttgtgatgcggtcggcagttttaccatcaatcctgggtcaattacggttcagagggatatggcggtcggccagcctattacagattggctctactctaattcaggcgtagcttatcagaactgtaactacgacggccaattgcaatataatattgaaaatggtgttaaaagctacaatggtcgatcttcagggctgagttacaacggagaagcggtatttgatactgcattaccaggagtcggctttatagtggaaggccgcacgcaaaaagagtcacaaggttggattacctgggcgggaataggtgctggtaaaacacaggcaccaatactctattctacccataacaagggggatcgaatagcttttagcgatcagatgcgtatccggttaattaaaacaggaaatataaaaacaggcgccctgggggggaatatcggctatttttacgctggtatcaggcagacatcaagctggaatacggaaaagctggtttctttttcgggaggccagataacctcggttgcctgtagcgtgtctactaatcccgttaatgttccgctgggtgaacataataagcgcgaatttagtggcgcaggtacgggaactggctggaaaacatttaatatcggactgaattgcgaccaaaatgctcggattaatgtgcgcattgatgctacggcagacagcgatgcaggcgtacccggcattataaaactcgacagcgatccagcaaatgccagcggtgttggcgttcagctctggtatcgcaatgaaaacagcccggtgcagtttggtcaggatcgctattactggacctcatcaacgggcggcaacgaaattattcagctgcaggcgagatattaccagacgacacagggcgtaacggccgggaaagcgaatgcaacggcgacattcacattgacctataaataa

SEQ ID NO: 178437 - DNA, 957 bp, Klebsiella oxytoca
atgaaagaaattttatgtttcctggcactggtagtgtcaccggccgcctgcgccagttgttcattttacagtggtgtttccggggaagtaacgggctatttgaactttggtaatatagttattcagcgtgatgtaccggtcggcagcatacttgcgacagcagtaacaggggcttataacaacaataaccccatcgcaggatgcacccgggaggcctggaccgcacgctgggagatgacgaaatgggggacgctgagcggatatggcagcaacgtttataagaccaatctacccggcgtcggcctacggctaagctccacggtttcgggaagaatattgcccttcgagggtcgttacccatacaacgccagcggctcatgggcgacgcttcccggtgacggtatcaaaggagagcttatcaaaatcgggaatattaccagcggcactttagctaatggcatgctggcgcgtgcttcggtggtgaacaaattttattttgccaatatcacgctgaatgggacgaataccgtcactgctgccgcttgcacggtgacggcatcaagtgtgaatgtcccactgggcgactacggcaaaggggtatttacccggcagggaacaaccactgcctggcatccattcaatatcgatcttgtgtgtgataaaagcgccagtattaatgtacagtttaatgccgcccaggacccctcaaatattgccggggttatgaagctggataacgctggcagcagcgatacggccaccggtatagggatccagctttggtacgtacccaacggaggtaggccagtacagtttggtcagcaaagtcactactacacatcaccttatggtggtcgcgaaaggctgcaaatgcaggctcgctactaccaggtggcacagaaagttactccgggtaaggctaatgccacggcaacatttacactgttatataaatag

SEQ ID NO: 178438 - DNA, 429 bp, Klebsiella oxytoca
atgcgtaactacgatttatccccgctgctgcgtcaatggatcggttttgacaaactggccaacgcgctgcaaaccgccggtgaaagccagagcttcccgccctataacatcgaaaaaagcgacgacaaccactatcgcattacccttgcgctggccggtttccgtcaggaagatttggatatccagcttgaaggcacgcgcctgacggtaaaaggcgcgccgcagcagccggaaaaagagaccaaatggctgcatcaggggctggttaaccaggcgtttagcctgagcttcacgctcgccgaaaatatggaagtctccggggcaacctttaccaacggcctgctgcatatcgatttgacccgcaacgagccggaacagatcgcaccgcagcgcatcgccatcagcgagcgccccgcgttagatagctaa

SEQ ID NO: 178439 - DNA, 501 bp, Klebsiella oxytoca
atgtttctgcgtttattttttctccctttgttactgctagcgatagcgtcattagctgaggctgacgggggcaatattcatattacgggaaatttgacggctcaatcctgcacagtagatggcgctacagattttacgctttctttgggtacggttgaccgggcggatttaccttctgtgggttcaacggctaatcaggttggactcaatatcccgctaagttgtatcagcggtacgaaagtaataatacagattgacggcaccagcgtaagtgacaataacacggtcatggtaaataccggtaccgcggagggggtcggtacgcaattactggagcccaacaataacaacaggcctgtcccactcgggagttcctggacaattatcgaaaattcacagaccagcgaagtgattacccttggcgccagattctacagaacaggcgatgtggttcccggaacagtgaatgcgacggcgacttataccctctcatatgaatga

SEQ ID NO: 178440 - DNA, 1044 bp, Klebsiella oxytoca
atgaaaaacagaacaacatgcaggccgccgttgacagggcagcgcgaggcaaacacacggttttttcgccaggcggtaatggctggatgcgcttgcacgctatcgctgaatgtctgggcttcagagtgttactcgagtgttgcctcaacgagcgttgatctgaaaacgatatcggtgtcgccggatctggccgttggacaatcgattaccggcggcgataaaacgtttgattcggttcagtttgcgtcatgtgaatcctcatttacggtagagaaatacttttatggttatctctattcgtcgttggcttcggcgggaacctataacggccgactgacttttaaaaccaatttgtccggcgttggcgttcagcttggcgccagcatgtcggatacgaaaggggcctcgggcaacggctggataaccagcggctcgtcaataaagctgttaaccgatgacagtatcggttggggggcgatgatttatatgtcgattaccccaaagcttaatttaattaaaatcgccgattcggtaagcggcggtacgctctctggaaaggttggttacggtcaggcgaacggcaaccaggggtcggcaaatatcgatattaatttcactggcacgttgtcggccagcggctgtaccctctccggcggctcggatctgagttttacgcttgatgatgtgcaaaaaagcgaactgccttcggtcgggagcacttggggagagagcagtgaaaaagatatatcgctgagctgtactgccggaacgaatgtctattttacccttagcggcacacaggaacctggcaccagtgataccagtatattaaagaataatggcaccgctaaaggactttccgtgcaggtgatggatctgcatggcggcggtaatcacccggtcaatctgaattaccgctggtcgccgattaccagctcagggacgacggcaaaaataccgctcgccgcgcgttatattcgcacgggcgacttaaccccgggctccgttgacgccagcgccacctacacgcttgattatgattaa

SEQ ID NO: 178441 - DNA, 2601 bp, Klebsiella oxytoca
atgtctcaaccatccatagacgtagcgggcaaaagcagcgcttttttattacaaccgcttgcctgcattattattttagcgctgtatggaacgcagggcgcgctggctcaggatgagttcgatatggcggcgctggagaccagtggacccaaacttaacgttgatctcagccagttttcccaacccggttcacagctaccgggtcgctaccacgtagacgtttatgtgaaccatgagcaggttgacacgcaaacgctggactttgtgcaggataaacatgggcagcttacgcctgtggtgacccccgcgctgttggcgcagtggggtattaagattggtgatatcgatacgctgcggaacaagaacagtatcaacgatctggctgcaaccgtcccggatagccagatcagactcgattacagccagatgcgtctggatctcaccataccgcaggctgacgtcaacagcgcggcgcaggattccgtcagcccgacgctgtgggatgaaggagtgccggcgctgctgctgggctatgactttaacggttcaaacacctggcgcgacgagaacgattctggaagggaagatagctattttctgaacctgcacagcggcattaacctgggcgcgtggcggctgcgaaactacagcacctggacctacagcaaatcgccggaatatcacgacaccacaagcggcgaagacgttagcagcggcgggagcagcgaaagcgactggagctccatcaacacctttttacaacgcgacgtgcaagccgtacaggggctgttaacgctgggcgatgcgaccactccttccgatgtttacgacggttttacgttccgcggcgtccagctttcttcagacgatgacatgctgcctgacagtctgcgcaactttgcgccaacggtacatggcattgcaaccagcaacgcgacggtcaccattcgccagaataatagcgtgatttaccagaagcaggtaccgccggggccgtttaagatcgacgatctctacccaaactccacaaacggcgacctgctggtaacgattaaagagtcagacggcagcgaacgcagcttcgtccagccgttctccagcgtggcaatcatgcagcgcgaagggcatcttaagtatgacttcaccggcggtaaataccgcagcaacagcgatggtcaggagccgaagttcgcccagatgacgctgatctacggcctaccgtacgatatgacgatatacggcggtacgcagctggcggatagctaccagaacgggctgttggggatgggattcaccctcggtgaactgggctccatctcctttgacggggcctattcctcggccgatttgagcaatgacgagcacaaagaagggcagtccatacgcgcccagtactcaaaaagtatgctcagcaccggctcaacgatcacgctggcggcataccgttattccactaagggctactacagctttcaggatgcggcggatctaatcgtcaatgattctcacgatgacgatctgaacgaccaggatgaatttgacttaagccataacaaacgttcccgctggcagctgtcactcagtcagtcgctaccagagggctggggatcgctttatgcgagcggctaccagcaggattactggaacgaaggtggatatgagcgaaacctgtccctcggctacgacaccagctgggatggcatgacgttgggcctgaactacaccttcagcagcatgccgggaacagaggacgaccatcagggcgcgttgaatatcagtatcccgctgagtaaatggctgccgaaagcctatgccggatacagcctcaacactaaccgccacggagacaccacccagcaggtcagcttgtacggtacggctttgaaggattcgaaccttagctatagcgtgatggaaggctacagtaaccatgaaaattccggcaataacggcacgctatccgtcgattataccggtcgcgcgggcgaagcgaacatgggttacaactacgatccggacagcaggcaggtgaactatggcgtgcagggcggagtggtggtgcacccttacggcgtcaccttttcgcagtcgctgagtgaggatatccagtcgctggcgctggtgcgctcgccgggggtcagcgatgtgaccgtggaaaacggcaccggggtcagcaccgactggcgcggttatgccatcgtaccttatctcacgccgtatcgccgcacgacggtaaggcttgataccagcaccctggccgacaatgcggaagtcgatagctccacggcgcaggtggtgccgacggaaggggcgattgtactggcggggtttaaaacgcatatcggcgcgagggtgttgatgcatctgcatcacgcgaatacggacgttcctttcggcgccaccgtcacgctggcagaggacgacagcgtcaacagcatcgttagcgacggcggttcagtgtatctgaccgggatgccgcagcagggcgacatcctggcacagtggggcaaaggaaaaaatgcgcagtgccatgcccattatcagctgccgaaagagggtgaaaaaactggcgtaattaatcttgatgcgcaatgtcagtag

SEQ ID NO: 178442 - DNA, 720 bp, Klebsiella oxytoca
atgcaacggttcatgagaaagtcagttatttacggtctgctggcggctgcgatgtgcgccgtaacatctgcgcacgcaggggtcgttatcggcggtacgagactggtttatcacggcggcgataaggaagcgtccattcaggtgatgaacagcgctaacggtcagattccctaccttattcaaagttttgtcgatgacaaaggcccgaaaggagatcgtcctggtaccaccggttcgctgccctttaccgttacgccaccgctgtttcgactggatgctggttcagaaaatacgattcgcgttgtcagaacaggggggaattttccggcagatcgggaaagcgtttactggctggatgtgaaggcgataccggcaaacaatccggcggataagggcaagaacgtgctgcgcttttcgctgaaaaaccgaatcaaacttttttatcgtcccaaaggcgttgccgatcccaccagtgaggcaatggaggcgatcggttttcacaggacgggcaacaagctgaccgtcaccaatccaaccccctggtatctgagcttctttaagctgaacgtcggtgacaaagtggtcgatacggcgtttaccatggtcgcgccgcacggttcgactgattacaccattccggcagggacaggcgggaaaatcacctggcaatatatcaatgattatggcgcaggatcgttggttctggacgggaaagggtaa

SEQ ID NO: 178443 - DNA, 543 bp, Klebsiella oxytoca
atgaaaaagcaatttgtaatgactgctgtggcagcattgttcagcgtagggatgggtgtggctcatgcggttgatggaacgatcaacttcgtcggtaccgttactgccgacagttgcaccgtggatatcaacgatcagacaaacccaaccctgaacctgggtaccgtgaacacggttgatctggcgaaagctggcgacaccggtccggcaacgaactttacgctggatctcaccgcttgcccgaatacggttaccgcagcaagcgtgacttttactggcaatgccgatggctctatgaacacggcgttcaaaaatgagtccagcgacagcggcgcggctactaatgttggcgttcagctgtacgacgcatctgcagccaaagtcagcccgtcttctgctgtcgacgttagctctttcctgacggcggacgctaccactaccgaagcacatattccattcaccgctcgtatggttgctgtggctgataccgcaactgccggtacgctggtttctcacgctgactacaccatcagctaccagtaa

SEQ ID NO: 178444 - DNA, 261 bp, Klebsiella oxytoca
atgcgcattaccataggggctatcatgcgcactacgtcgaacgttaaaaaatcagtcaatgtctcgctttcgcctgaaatcctggaagaggcgcgtaaacttaaaatcaacatttcggcggttttaacggaagctttacttgagaaatttcgtgagcacaaacgtgaagagtggttacgagacaataagaaatcgatcgatacgattaaccaatgggtagaagaaaacggttcgtttagtgattttcaaaggccgttctga

SEQ ID NO: 178445 - DNA, 318 bp, Klebsiella oxytoca
atggaacaatattgcgcttatgagaatacgggaagcggtaaaaaggttttcccttatttaatcaacctgcagcatccggtcgcgaatgtcctgaagcatatcctggttgcccctgtgatagaacaaaaccaactacctgatacccagcctccgaccaaaatttgtcccgtgattacgattgccggtcaaacttatattgtgatgacgcatatgatggcgggtttaccgcagaaagaactgggcaagcgggttgctgatttgacggcggacagggctgcgctgcgcgatgcaatcgactttctgatcaacggttattag

SEQ ID NO: 178446 - DNA, 510 bp, Klebsiella oxytoca
atgctaaagattcgtcttgcacgtccggaagatgcggctttactcaaccagatggccaatgccagctatcgccaccactttgcccacctctggcacaacgccgatgaaatggagcactacctgcagcaagagtattccatggccgcgctggcgcacagcctggccgatccgcagtgctgctggttgattgctgaggcagaggagccaattggctttgctaaatatgcctgccgccaggacatcaaccccgaaggcccaacgggtacgctattgcataaactctatctattacctgacgctaccgggcatcgctacggcgagcagatttttcgcgccgtcgagaagcgagcgaaagagaccggtgaaagctggctatggctggaagtgctcgccgcgaataccggtgcccgccgtttttatgaacgtcaggggatgcagcacgtaaaggatgtggcatttcattctgcaacccaggaaagcacactccatattctggctaaaccaatctga

SEQ ID NO: 178447 - DNA, 891 bp, Klebsiella oxytoca
atggctatggttcaacccaaatctcagaagctgcgcctgttcacgacgcacctcctgctgctgatttttatcgcggcgattatgttcccgctgctgatggtcatcgctatctctctgcgcgaagggaacttcgccaccggtagcctgatccccgaaagtatctcctgggagcactggcggctggcgctcggcttcagcgtcgaacacgctgatggtcgcgtcacgccgccccccttcccggtgctgctgtggctgtggaactccatcaaggtggcaggcattaccgccattggcatcgtcgcgctttctaccacctgcgcttacgcttttgcccgcatgcgcttcccgggtaaagcaacgctgctgaaagggatgctgattttccagatgttccccgcggtgctgtcgctggtcgcgctgtacgccctgtttgaccgtctcggccagtacgtgccgttcgtcggcctgaatacccacggcggcgtcatcttcgcctatatgggcggtatcgcgctgcacgtctggacaatcaaaggttacttcgaaaccatcgacggctcgctggaagaagcggcggcgctggacggtgcgaccccatggcaggctttccgcctcgtgctgctcccgctgtcggtaccgattctggcggtggtgtttattctgtcgttcatcgcggcgatcaccgaagtgccggtggcctccctgctgctgcgcgatgtgaacagctatacccttgcggtcggaatgcaacagtatctcaacccgcagaactatctgtggggcgactttgccgccgcggcggtgctttccgccattccgattaccgtggtgttcctgctggcccagcgctggttggttaacggcctgacggctggcggagtgaaaggttaa

SEQ ID NO: 178448 - DNA, 1290 bp, Klebsiella oxytoca
atgatgattactctgcgcaaacttccactggcggtcgccgttgcggcaggcgttatgtctgctcaggcgctggccgttgatttccacggctacgctcgttctggtatcggctggaccggcagcggcggtgagcaacagtgcttcaaagccacgggtgctcaaagcaaataccgtcttggcaacgaatgtgaaacctatgcggaactgaagctgggccaggagttgtggaaagaaggtgataagagtttttatttcgatactaacgtcgcttattccgtaaatcaggaagatgactgggaaagtacctctccggcgtttcgtgaagctaacatccagggtaaaaacctgattgactggttgccgggttctaccctgtgggccggtaagcgcttctaccagcgtcatgacgttcacatgatcgacttctactactgggatatctccggcccgggtgcgggtctggaaaacgttgacctcggcttcggtaaactctctctggcggccacgcgtaactcagaaagcggcggttcttacactttctccagcgatgacaccaagaaatttgctgctaaaaccgcaaacgacgtctttgacgtgcgtctggccggtatggaaatcaacccgggcggcgtactggagttaggcgtggattatggccgcgctaacccgcaggacgattaccgtctggttgatggcgcatcaaaagacggctggatgttcaccggtgaacatactcagtctatctggggcggcttcaacaagtttgttgttcagtatgcgaccgactcgatgacctcctggaacagcggtcactcccagggaaccagcatcgataacaacggcagcatgatccgcgttctggatcacggcgcgatggacttcaacgatgactggggcctgatgtacgttgcgatgtaccaggacgtggacctggacagcaacaacggttctacctggtacaccgtcggtgttcgtccgatgtacaaatggacgccgatcatgagcacccagctggaagtcggttacgacaacgtgaaatctcagcgcaccagcgaaaacaacaaccagtacaaaattaccctggcccagcaatggcaggcgggtaacagcgtctggtctcgcccggcaatccgtattttcgcgacctacgcaaaatgggatgagaactggggctacagcaacacctccggtctgcagactaaagacggcagcggtaacggggtttacacctccagccgcggtaacgatagcgaagtgaccttcggtgcgcagatggaagtttggtggtaa

SEQ ID NO: 178449 - DNA, 918 bp, Klebsiella oxytoca
atgaaaatgaagaaaactctcgtcgccctgtgtttatccgcaggaatgttggcatgcgcgccgggaatgagccttgccgacgtcaactttgtcccgcaaaacaccagcgcagcgcccgccatccccggcgctgccctgcagcagctcgtctggacgccagtcgatcaatctaaaacgcagaccgttgatttactcacgggcggccagcgcctggatgttgccggcatctccggcccggttgcggcctggagcgttccggcgaatattggcgaactgaccctgacgctcacgagcgaagtgaataagcaaaaacagatttttgcgccgaacgtgctgattctcgatcagaatatgacgccatccgcgttcttccccagcagctattttacctatcagcagcccggcgtaatgaccgcggatcggcttgaaggcgtcatgcgcctgaccccggcgctggggcagcagaagctttacgtgctggtctttacgacggaaaaagatttacaacaaaccacgactctgcttgatccggcgaaagcttacgctaaaggcgcgggcaatgccgtgccggatattccagacccgattgcccgccacaccaccgatggcgtgctgaagctaaaagtcaaaaccaatagcggctccagcgtgctggttggtccgctgtttggctcttccggcaatggcccggtgaccgtcggcaataccgcagcgccggttgtcgcgccggccccggctccggcggcgaaaagcgaaccgatgcttgatgacaccgaaacctatttcaacaacggcattaagcaggcggttgcgaaaggcgatatcgataaggccctgaaattgatgaacgaagctgaacgtcttggctcgaaatctgctcgttccacctttatcagcagtgtaaaaggcaaggggtga

SEQ ID NO: 178450 - DNA, 318 bp, Klebsiella oxytoca
atgtccaccatagaagagttaagcgcccagctggccggcgccggcgcgaatacggcagagtggttgcagcttatgcacgcgattgtaaatgatgaagacagcgacattcgcgacgccgggatgctcacgcttcaggcgttacaggagaaagcgcgcggctggttaagtcaggacgacctcattctgctcctgcaagggcagcgcgatattgccagcattcgcgccaacaacgaacagatcgccatgcaggcgcatctgcagtccacgctgcttcgtctgtttgatgtgaccctgctggcgctgctgggcagaatttag

SEQ ID NO: 178451 - DNA, 411 bp, Klebsiella oxytoca
atgtacttaaagcacggactttatcgattttcgctcgtcgcggcgttattcgcgctgaccgcctgcagctggatagacggctacagcagcgcggctcatcagcagctgctgatgctggaacagcttcatctgcagttcatcagcgacgcggcggcagcgccactcgaccaacgcttgctcagttacgaggatcgccagattcgcccgctattcagcctggcgttaagcgatagcgatgcgctacggcagagtaatcttcacgtactggaggaaaattatcagcggctgtaccggcgcgtcgtcccccaggagagagcgctgacgcctttcgaggccgaaattctggcgcaacagacggaaaaactttaccagcaggccatcaacggcgaacaacagcgttcagggagataa

SEQ ID NO: 178452 - DNA, 351 bp, Klebsiella oxytoca
atgccacgaaatgaaattcagcgctcagtgcttagcgagctggtgcaatggataaaaaacaatcttgaaaagaagctcaccatgcgggcgctgagcctcttttccggctattctgaatggcatctttttcgcctgtttcgtcactattttaatatgtcgccaatggcctatattcgccaacagcggatgcaattagcccttgatttattaaaggttaaaccggcttttcgcatcgttgatatttgtattatggcgggctatgaagatatcagcgcctttaaccgtacctttaaaagatactatgcgattacgcctggccagtttcgcaaaatcctgtgtatctccggatag

SEQ ID NO: 178453 - DNA, 540 bp, Klebsiella oxytoca
atgaacttcagtgccaaaacgcttgccaaaatattagccttatctgccggctgctctctggttgctctgtctcaggccgcgaataccattacttttaccggtaaggtctcagacactacctgtacagccactatcgataatggcgtttcgtcaattgagatggggacctcgtcggtagccgatctggataccaataactacggtgcggcgaagagtttttctttcacgttaaccggatgccctaagaccacagacggcggtaccaatgtggccagagtgacgtttggtggcgaagcggacacgacgaatagcgattacttcaggaaccaggcgacagactcacccgctaccggcgttgcggtggcaatttttgacaacaagggcgccctgcttaagaacaatactgaaggtgcggacgtcgatattacctccggcaccgcgaccattccttttaccgtcaaactggcgaaatctggtacgaacgctcccaccaaaggcgcggtgcagacaaccgtgacttacaacgttacctactattaa

SEQ ID NO: 178454 - DNA, 2589 bp, Klebsiella oxytoca
atgattatggaatatcaggaccaaaatacaccgccatcattcaataacgttgggcagaattttacaatcctgttaaagagtggctacgttgccattatttcctgctttgctcccattccgttacccgctatcgccggtgagtatttcaatcctcatctgctggaggttaatgaaaccggagcaacctctgtcgacctgagctatatttcccaggaaactgtcccaccgggtgaatacaaccttgatgtttatatcaacaatgaatttattgcttctgaattagtcagcttcacgcaacagaatgaagatcgtgacgcttcatcaccctgcatcagcgtcgcgcagctgaaagcgtggtcagtcaaaacggaaaattaccccgagctcacggttgcgggttcccgctgtgccagactgtccgcaatccccggttggggaacctcggtattactttcgcaacagcgcgttgattttaacgtgcctcaggtcgcgatgatgcatcatccgcggggatatgtccctgaaagccggtggcaacagggtattaccgcggggctgctcaactatagtctctccgggcaaaagaccgatccgcggcacggcggcgaagcgacgtccagccagtttgtgagcctgcagccgggtttgaacgtcgggccgtggcgtttacggaattacagtaccctcaaccataatgatgatggcaaccagtgggactcggtctacagctatatttcacgtgatatccatgccctgaaaggccagatgatcctgggccagacctatacgtcatcaagcgtgttcgacagtgttagcttcaccgggctacagctgaactcagataaagagatgctgccggatagcttgaacggctttgcgccggtcattaaaggcatcgcccgcaccaccgccgacgtgacggtttatcagaacggttacagcatttataaaacaacggtcccccctggcgcgtttgagataaacgatctttacccaaccgggagcgcgggcgatctgaatgtgacggtaaaagagtccgatggcagtgaacagagctttgtggtgccttttgcttcgctggcgattttgcagcgtgagggccagatagattacgccctgagcagcggtaaaacgcgatcggggagttccggtggcaaagaatataatttcctgcaatctaacattgcctggggggcatcgagcaacgtcacgctgtatagcggttttcagcagttggagaacaaatacagtaattttctgctgggcgccggactcaaccttggcacgatcggcgcgctctcctttgatgcatcccagtcccgggcggatataaaagagacgcccacgtcggatcgcacgtcatccagcgaggggcaatcttatcgtgtgcgctttagtaaagatattccgcagacgggaaccaacttctccgttgccgggtatcgttattcaacccatggctattattctctgcaaaattttattgataggtcgaatgcgcatagcgggtgctgttcctcaacggggcggactaaagatcgttttgacgcttcggcctctcagtctctctcagggtatggttcactctccctctcattggtcagtgaatcttattgggataattcacgcatggagtcgctgggcgtgagctacagcaatacctttggccgcatttcctatttcgttaactactcctatagccgaaatgtccagagttcaggccagaatagcgatagttctcagaccagcgataatcttatttcactcacggtgagcgtgccctttggtgcggatatctcggccagctacaatatgaacagcagccggatgggcgacacgacccatagcctgggtttaagcggttcggcttttgcggaccgttctctgaactggaatatgcaggagggttacaatgccagcgataaaaagacttccggcaacgtcaatctcaactatcagggttcaaaaggtgaagtcaccgcgggatacgggtatgacagctatagcgcccattataattactcgctacgcggtggcatgctcgcccattccaatggaataacgctgtcacgctatctgggcgaaagcgttgcgctggttgaagcgcctggcgtcagcaatattgcggtgcgcgggcagactaacgtgatgaccgattctgccggatacgctgtggtaccttttgtacgaccctaccatgaaaataatctctctcttgatgaacagcaggtctcgggagctgaaatcgataatattgccaaaacggtggtcccgacgcgtaatgcgattgtaaaagttaaatacgatacctggattggctataaggcgatgatgactctgcgttttaataataaagaaatcccttttggcgccgttattacattagatgatgaaagccggcaacatcaagaaaaacgcagcgctatcgtgggtgattccggacaggcctatctgaccgggctacctgcaaaaggccggctatttgtgaagtggggcgatagccaaaatagccaatgcaatgttaattatgatttatcagccaataaatcggttgatgatatcgttttttatgcagcggattgccgatga

SEQ ID NO: 178455 - DNA, 564 bp, Klebsiella oxytoca
atgagggtaaataatggcgggatattaacgaagtcacatggcttattgcttatcggtattggacttgcatcgatattcataaagccagcctgggcttatgacgccaatagtacggttaatttcaatgtcaccggtaagattgaagagcccgtatgcgaggtttcggttaaaccttccagcgctattaatctgggaatcgtttcttaccaaagccttaccggtcaaccgggcgcaagcagcgatgagaaggctgtttccattgcctttgataattgctcaacgggtacggtttctgtgacgctaacatttagcggtaattcatttaacagcacctatcccagtatttatgagaatgaggaaatttacggcgccaaggacgtggggctacagcttttaagcgcaggggatcggaaaagcctggggccaaacgacagctatacctatcttttcgatgaggcttctgaacatgtttttaatatggtcgccagaatgtatacgccgtatggtcgggcaacggtgggcagcgtcgcctatacggtcacgttcaacgttgcctataaatga

SEQ ID NO: 178456 - DNA, 1098 bp, Klebsiella oxytoca
atgaagaggttaattttattgctgctggcctgcttattaccggcttacagttgggcatgccaaactggcacaaaccagggggatatctctttgactaatttacccccacagatactgattaatgccggaagctactctgcgggcacgattctttatgattcaggacaactcacgcaccccaatacgtcttttacaaactgtcagggctccgtatatgcgaagttcgaatggggctccgggaatgcgggcactttagttggcgataatatctacgcgacctcaatacagggtattggtatcagagtgaaagtctggttaaacatcacgggtgaatatgactatgataaagatgattttaaagcagactacagcgtacattatatcggtgataatgacctgtatattggcgcaccgtatggccttggtgattcctgggccagcacgaattatgcgccaacctaccagattcagcttgtggcaacgggaggggctattgctaatagcagcacgctgacgctggccgatcctgttgccacagtgtcagtaaaagacgatcacggaacgatgattatttcccagctgcacgtgacgggctcgacaaaaattcagctgactccgatggggtgcacggccagttcggcatccctcagtttcccgatgggctcagtcagcaccaatgtgttcgcaagctcgagcaaggcgggttatgccgaacaaacgctgattttagcctgtgaaccgggtacaagagtcacgatggttgttaacgcgactgaaacgacgggcgatagcccggatcatagcgtgatggcgcttaccccaggggataacgtggcgaccggcgtcggggttcagttgaatacccgcggcgtggcgctatccctgaacactgcctacagggtctttccctacaaccgaacaacggtaaccaatcccggcgcggaggccagctatttgatattcaccgatcctgataatcccggcggggcgtcggcgtcgaacgccttgaagttttccgcgaactattacaaaaccggctctaaagtgacgccaggtatcgcgaatgcgagcggaacgataacctttacctaccaataa

SEQ ID NO: 178457 - DNA, 588 bp, Klebsiella oxytoca
atgcatgcattaatcgtggtttctcatcctctcaagacgtcgctgactcacagcgtagcgacggcgattgcgcaaggaattgccgaatccggcccgcagcatacggctgacatagaggatttaacgcaggaaggctttaacccggtatttgccgagccggatatcgccgcatttctgcaaaccggcgacacgccgcccgacgtgatggccgagcaggccagaattgataacgccgacgcgctggtgcttgtttttcccgtttactggtggtcgatgcctgggctgttaaagggctgggttgaccgcgtgttttcaaacggctgggcctatgaggagaccgccgacggcgatgtcgtgaagaagttgggccgcctgcgggtgcatctggtggcattaggcgcagcgagtcaacaaacgtatgacaagcacggatttaccgatgcttttaatgcgcagattgtccacgggatttttgattactgcggggcgacggtagccagttcgcagatgctgctgttgccggacctgaaaacggcggaggcgcatctggaggcgggtcgccagctgggaagaaagatgtttgcctga

SEQ ID NO: 178458 - DNA, 636 bp, Klebsiella oxytoca
atgatgaataaattacagcgtttcgaaagtctcggtgataattgtgagtttgctttctttctcagagagtcaggttatgatgaaggcagcttgtttcgttggactttaataaaaaactatcatgctcttctaaaactaatagaatctgattttgctggtttgtatgtctatgaaaacctgaccccatcctggctggatatggtgcttgatcaacagtatgatatttgttttcatactgaaatgtatagcgataataaaaatgatagctgggtctggcgttattctgaacaggaaaatgatcttatttataaaaaagaagtagagaagattaattacctgataagcaaatttaagaaaagccttgttgatgacaataaaatttttgtcgtaaaaagcaatggcaataatcttgatgatatagtattcgctttagcaaaagagtttaagaagcacggtaacagtaaaatactttacgtgaaaagtaacgtggaaagctcagctccaggtgaaatcaagaaagagactgataatctttttattggtgcaatcgatagatttgccgactatagccgggcaaatgaatactcgcgtgaaggctggcaggcaataattgataatgctgtaaaggttatgtga

SEQ ID NO: 178459 - DNA, 810 bp, Klebsiella oxytoca
atgaccagtgcagagttaaaatttgatttatttctaaaatcctatcatccatctcatcgatttgtctataaggcaaaccccggtaacgcgggtgatggcgtgattgcatcggcaacgtacgactttttcgaacgaaatgcgcttacctatgttccttacagggccgatgagcgctacagcgctgatactgatattttaatttttggtggcggaggaaacctcatagaaggactatacgctgagggccgcgattttattcaaagtaatattcacaaatttcacaaaacgatcattatgccttcgaccatcagagggtatagcgatttattcactaataatatagataagctagttgtcttttgccgtgaaaataccactttcgattatataaaatctctcagctatgagccaaataagaacgtattcattgctgatgacatggcattttatctcgaccttagccagtacctgtctcttaaacctgcctataaacaacaggcaaactgtttcagaacagattcagagtctctgacaggagaacataaagaaaacaatcatgatatttcgctcacgtggaatggcgactattgggataatgaatttctggcacgaaactctacccgctgcatgatcaactttcttgaagagtataaagttgtaaataccgacagacttcacgtggcaattttagcctccctgctggggaaagaagtcaacttctaccctaactcatactacaagaatgaagccgtttataattactcgctgttaaatcattacccaaaaacgtgctttattactaccagctaa

SEQ ID NO: 178460 - DNA, 2223 bp, Klebsiella oxytoca
atgaaaaaagttcttataatgacgccggacatagaggggcctgtccgtaacggcggcattggtactgctttcactgcccttgccactactttggcaaaaaagggttatgatgtcgatgtattgtatacatgtggtgactattcggagtcttctgcatcaacttttagcgattggtcacgtatttatagcacctttggtattaatctgctaagtaccggtctggtaaaagagattaatattgatgcgccttattttagaagaaaaagttactcaattttgctctggctgaaagaaaataatgtctacgacactattatttcttgtgaatggcaggcagatctgtattacgctttattaagtaaaaagaatggcactgattttgagaatacaaaattcattgtcaatactcatagctcaacattatgggctgatgaaggtaattaccagctcccatatgatcagaatcatcttgaactctattatatggagaaaatggttgttgagatggctgatgaagtcgttagtccttctcagtatttaattgactggatgttgagtaaacactggaacgttcctgaagaacgccacgttattttaaattgtgagccatttcaagggtttgagacgagaagtgatgttgtcgtaaaaacaaatgaaacacccgcttcaggcgttgagcttgtatttttcggccggcttgaaacccgtaaagggctcgatatcttcctgcgcgcattaagaaaactctctgacgaagacaaagagacgatctctggcgtgaccttcctcgggaagaatgtcacgctgggtaaaattgattcctttacctatatcatgaaccagaccaaaaatctgggtctggcagtcaatatcatcagcgattacgatcgtactaatgctaatgaatatataaaaagaaaaaatgtattagtcatcatcccatcgctcgttgaaaactccccgtatacagtttatgagtgtctggttaataacgttaacttcctcgcctcaaacgtcggaggaattccagaactgattccgcaagagcatcatgctgaggttctgtttaccccaacgccggttgatttgtacggtaaaatccactatcgcttaaaaaatataaatatcaagcctgggctggttgagtcacaggaaaatatccaggcagcgtggtttgccgctattgagcgaaaagataacagcgtcttcaagaaaatagatgaatcgaatcgcccgttagttagcgtgtgtatcactcatttcgatcgccaccatttgctccagcaggcacttgcctcaattaaaacgcagacgtatcaaaatattgaagtcattttagttgatgatggaagtacaaaagaagaatctcatcgatatttgaaccttatcgagaacgattttaacgctcgaggctggaaaatcatccgtagttctaataactacctgggcgcagcgcgaaatttggctgcgcgacacgcctccggtgaatatctgatgtttatggacgatgataatgtcgctaaaccttttgaggttgagacatttgtcacggcagcattaaactccggggccgatgtgttaaccaccccaagcgatctcatttttggtgaagagttcccttctccgttccgtaaaatgacgcactgctggctgccgttaggcccggatttaaatatcgccagctttagcaactgctttggcgatgctaatgcccttattcgcaaagacgctttcgacaatatcggtggctttactgaagattatggtttaggccatgaagattgggagttttttgcgaaagtctccttacaaggctataaattgcagctcgttcctgaaccactattttggtacagagtagcaaactccggaatgttgttaagcggaaataagagcaaaaataactatcgtagtttccgtccatttatggatgaaaatgtgaaatataactatgcgatggggttgattcctgcttacctcgaaaaaattcatgaacttgagagcgaggtgagccgactgcgtagcatcaatggcggccactctgtcagcaatgaactgcagcttttaaatcataagattgatggtcttatttcccagcaaagagatggctgggcccatgaccgctttaatgccctttatgaagccattcatgttcagggcgccaacagaggcagaagtctggttcgtcgggtgggcagaaaagttaaatccctgttgaaatag

SEQ ID NO: 178461 - DNA, 867 bp, Klebsiella oxytoca
atgcaaggcacgtttattggttttaataccgcatcaattaaatatgaagacaaatttttagctttaatgctcaaagtaaagctgagtaatcaactttgccagtcttactatcttcaggcccaggcgcttaccgacctcctgttagttttacaacacaggatggccatcgtattacagcgcttaaacgctgaaggtgaaagttataagagcgaactggtcgcttttaatgagcagctcatagaaaacaccccggttatagatatgccggaagtccagcagcccaattcggaaaggcgagtcatatcgattacgttaaaaccaggagatacctggtcaacgctcattctggtgctgcaaaacgagcaaattgctacgctgcgcattgatgatatgcaggttgaagcgctgctggttggagttcagcaatctcttaaaaacgccggtgataacgaactgattaaaaatttaacgtcatcactggaaagcctgatgctatatgccctggatttaacgaataacaagaatgttgattatcaacagtacatccaggatgagtggaagctcaatctgttttcccattatctgggcgtgctgtactgctgtgatacggaagcaggccgaaaaatcatctccggcgcggtgattaaaaccaacgccgcccatccgtcagagcaggagaatagcgtagtgatgcgcttaattgagaagagcccaaaactgaaagaagtgcacgcaaagcatcagccctgccagatttttagccaaattattccttctcagccgggaagaatgctgtcgctggaggagtgcctgcggcctttacatgcgttctacatggcaacacaggccaaaatcaacgcgcgctaa

SEQ ID NO: 178462 - DNA, 2124 bp, Klebsiella oxytoca
atgcataaagaactgtttaaaacgattaccgataagctaaatttttcgctccgccataaaacgccggtgatattacagtcggaggctgccgaatgcggtatcgcctgtctggcgatggtttgcggcttctacgggctcaatatcgacctgttcaacttccgccatcgctacggcagtccttctcagggcgttacgctcatgtcgttgagcaaaacggcggaacatgccgggttgaaaagccgcgcgctatccctcgacctggatgaaatcaagcagctaaagctgccctgcgtcatccactggggtttgaatcattacgtggtgctcactaaagtgcgtaaaagcagctttattgttcacgacccggcgctgggtaaacgggttattggcatccaggaaatgtccaataactttaccggcgttgcgctggagctatggccggaccaaaactttcagcaggaacaggcgaaatctcgtctacgcctgctggacctgatgcgtaatattgttgggctgaaatccgtcctgctcaagatctttgccttttcggtagtggttgaggctatcggtctgttgttacccatcggcacgcagctggttaccgaccacgtcatcatggcgcacgatcagagcctgctttcggttatctgtattggcctggttttcttcacgctcttccgtacatttattagtatgctgcgggcctggatctcattaacgttaaatacgctgaccaatattcagtggaagacaacgctgttcgatcatctggcgagcctgccgttatccttttttgagaagcgccatctgggcgatattcagtctcgtttctcctcgctggatactatccgctcaaccttcaccaatagtattgttaccggcattatcgattcgattatgaccgttggcctgctgattatgctaacgctttatggcggctggctggtttgggtcgtggtgggctttactttatgctacgtcatcatgcgttttgcgacctacagcttctaccgccgcgttgccgaagagcaggttatcaagggcgcccgttccagctcgcactttatggagtcgctctacggtatttcaaccattaaggcgttgaacttaaaagaacgccgttcgcagcactggttaaatatcaacatcgacgcctgtaatgccggcatcaaacagactcggttcgatatgatgtttggcggtattaatacctttattacttctatcgaccaggttgcggttctctggctgggggcaattatggttattgataacaatatgacccttggcatgtttatggcctttaatgcctatcgcggtcagttctcgcagcgcgcctcaagtttgatcgatctgattatgcagctgcgtatgctgtcgttacataatgagcgtctttcagagatcgtctttagcgagccggaaaaagaactgccttcacgacgcgtttttgcagaaaacacgggcgttaaactggaagtgaagaatctcagctaccagtacgatccgttctcgcagcctattttttctaatttaaatattaccgttgaaccgggcgaatccatcgcgctggtcggcccttccggcgtcggtaaaaccacgctactgaaagtcatgtgcggcctgctgtccccaaccagcggcgatgtgatagcggataacctcgatattcagaaaatcggcattaacaacttccgtcatggaacggcctgcgttctgcaggaagacagactcttttcgggttccctgatcgataatatcagcggctttgaagataacgccgatatggactttatcgttgaatgcgcacgcagatgtaatatccatgatgaaatcatgaaaatgccgatggggtacgaaaccattgtcggcgagctcggtttaggcatctctggcgggcaaaaacagcggctcttaatcgctcgcgccctctatcgaaaacccagcattctgtttatggatgaagccaccagtcatctcgatcttaaaaatgagtcggtgattaaccagtctatctctgggctaagcattacccgaatcatcgtcgcccatcggccatccaccattgcctcggccgatcgcatcattgatttatcacagctacgcacgctggcaccagcgtaa

SEQ ID NO: 178463 - DNA, 363 bp, Klebsiella oxytoca
atgaaacaactcactgtatttgaaatggaagagatttctggtggctactcctgggacttctcatcgattactggcgccttaaccagcattgtttttaatagcgcagaagctatcggggcatccattttaggtgccactgcaggcgcacttgccggttctgctatgggcggcatcttcggcggcaacggtggcggcattttgggtatcgggtcaattggccaggcagtggggatgatttacggtctgtgcgttggcggcgttggtggcgctattgctggtgccatggttggctgggatatcactctcgataaatgtatcgagatgtttgatggatttgttgatggtacgctagcctactggtaa

SEQ ID NO: 178464 - DNA, 1014 bp, Klebsiella oxytoca
atgaaatgtcttttttttattattagtttactcagcataagcttacaggcggtggctacctgctcatatagtaaaacgggtggcggtgcgattaccgttagttttaacggttctgtcatcgcggattccacattacctaacggtagcatattagcgtcggcaagacgtggaagtgtaaatcccaaaacattttcatcgtgtagttccagcgatgtttatgtcgtcagaaccgtacctgtcgtaagcccatctaatattactaaaattggtggaaaaatagtttatgagacaggtatccccggtattgggtttcagatttctgatattaccttaccatcagttaactatttttcccctgcagaaatagatcagccagaaatagccagcaatcattatttttctaaagcgtctggacaggtcatggtctggttagtgaaaaccggccccataacgaaacaaaagggaaacaaaacggcggtttattttatggctggcccgccaaatcagaccaacacgggtgcatcgaataccgctgaattattcagaatcaatgtggatttgactaacattacttttaaggaaactacctgcgaaatctcgccgcgcaatggaggtatcgtaaaactatcaaccattgatatttcggatttaaattccgtagcagtcggcagtgccgcaggcaagtccaaaaatattatcctcgatattaactgcccggattcagaaatcaataaaaaatatgtttactggtttagccctatatctgtagcatcaacaagcgtaaatggactattactaaattcattaccagacggcgctcaaaacataggtatcattcttaaaaaaaatggttctgcgataaaatttaacgatctgagtgcctaccccttcgtcagtactaagagtcagaatttaacgctcactgctgactattttaaaatcgctaaaaatgtctctgcaggcatcactggggagataaaaacagatttagaggtcatcctgcaggaggaataa

SEQ ID NO: 178465 - DNA, 2556 bp, Klebsiella oxytoca
atgtctatttcaataaaaaagatgggaggggcgctatccggaacctaccacacatttttcgttctcgttccggcgctcgctctcggtttaagcgctaatgccctggcacgtgatttttttgatcccgcttttataaaatcagtaaatcagggcgatccatcctcaataccggacctgtccctgtattcaaccaaggatgcacaggcaccaggggtgtaccgcattgacgttattttaaataatagtctgcaagaaacggccgatattcgctttgttgacaaaaaagatccggcgactgatgccttaaaactcgcgccatgtttaagcattgctaaattaaccacctatggtttacgttccgaagcatttccaacattaaaagaggatgctaacggctgtgctgatacgagcgtcatcccggatttcaccaccgattttaactttaatactcaacagctgctgatatccataccgcaggcagccctgtcgacgatagctcagggatttgtttctcccgatgagtttgatgacggtattaacgccttgctgaccaactatcagttcagttcaggcaaagactatgaagcggacaatgagtattacaatcttaacctacaatccggcctgaacattgggccgtggcgcctgcgcaaccttagtacctggaataaatcagcaggcacgaagagtgactgggattccgtctatctctatgcgcagcgaagcattgtgtcgttgaaaagcaccttagtcatgggtgaaagcacctctctctccagcatttttgacagcgtgcccttcacggggattcagctggcaaccgatacggacatgattcctgaaagcctgcgcggcttcgcgcctgttgttcgtggtattgccaggaccaacgctcgcatcgtcattaaacagaatggctatcaaatctaccaggcctttgtcgctccgggcgctttcgaaatcaccgatctctactcgaccggcggcaacggtgacctttacgtcaccgtcgaggagtccgatggttcccaacagaacttcgtcgtgccttacgcctctctgccattaatgctcagagaaggccagatggagtatgagatcacgagcggtaaatatcgcccatatgacggcaatatagatgaaaagccgtttacgcaggctacgatcggctacggtgtcttaagcaacaccactttctataccggtttgcaggcggcatccaactatcaggcgctcgctttcggggccgggcaaaaccttggcgatattggcgcggtttccgcagacgtcacgacagcctggtcccacaagaaagatgaagataaaacgtccggccaatcctggcgtatccgctatggtaaaaatattcttgagaccggcaccaatattaccgtagccggctaccgctattcgacctccgggtacaatacgctaagcgatgtgatgaacacctatagcaacagatacggcggctatactccacgctctctgcgtaacagaaccaatattaccgtcagccaaagcctgggggccgggttaggtagcctttctgtatccggtatattcgaggattactgggacagcaagcgccacaataactcgctgaatattggttacaacggcgggttccgtcgctttaactattatgccggctatagctatagccgctacagctggggaaatagtggctccggccgttatgtagaggatgaccatgtcgtttcatttaatatctctattcctttaagcgagtggttgcctaatgcttatgcgacctacaacgtcaccaacagcagcccgggctcgaccgatcagtatgtttctctgagcggggtggcgctggaaaatcataacctcgactggaacgtacagcagggctacagcaatcgggaggatgccagcggcggcgtctacggcaactatcgtggttcaacgggttcagttaacgccggctacagttatgccaaacatagccagttgattaactatggtctgagcggcggcgtattaatgcatgccgacggtattaccctgggtcaggaaatgtctgaaaccgccgtactggttaaagcacccgggctgaaaaatgtacgcctggaaaacgacgcgactatcgaaacggactcccgcggctacgcgattattccgtacgttacgccataccatcggaccaacgtaaccttagatagcacgactctggggaataatatggaattgccaaatacgacgcaaaaagtcgtgcctacccgtgcagccgtggtacgggcgaacttcgcgggtaatattggccgccgcgcattccttatccttaagagagcatcaggcgaaaacgtgccgtatggcgcaacggtaacgtcaactaccgataaaaatgcccaggccagtatcgtgtctgatggtgggatggtctacatgtccggtctaaaagataacggtgaagtctatgcccagtggggttcaaagactggccagcagtgtaaagcggcttatagtctggccagggaaatcgaaggcatcgcgcagacgactgcggtttgccaccaacagggaaagtaa

SEQ ID NO: 178466 - DNA, 147 bp, Klebsiella oxytoca
atggtaaaaaaagcgattgcagcgttctttacggttttggcactttcctctgtactgaccgcatgtaacaccacgcgcggtgtaggtcaggatatttcagaaggcggcagcgcgatttcgggcgccgcgaccaaagctcagcaatag

SEQ ID NO: 178467 - DNA, 1503 bp, Klebsiella oxytoca
atgcaccagcaaataaagaagatgagcctgattgggctgatattaatgatcttcacctcggtatttggttttgcaaacagcccctcagcgttctacctgatgggttacagcgcgatgccgttttatctcttctccgctctgtttttctttatcccttttgcgctaatgatggcggagatgggagcggcctatcgtaaggaggagggcgggatctattcatggatgaatcatagcgtcggcccgcgctttgcgtttatgggggcctttatgtggttttcatcctatgtggtctggatggtcagcacggcggctaaaatttgggtgccgttttccacattcttattcggcgcggataaaacgcaatcctgggcgctggccggactgacctccacgcaaacggtcggtattcttgccgcgttctggatgctgctggtgacctttgtcgcggtaaaaggcatgcacaaaatcgccaaaattaccgccgtcggcgggatcgcggtcatgggccttaatctggtcctgctgctggtgagcctggtgattttactgctcaacggcggccattttgcccaaccattggatttcacggcctcgcctaatccagactatcagtccggtctggcgatgctatcgttcgtggtttttgccatctttgcctacggcggaatcgaagcggttggcggtctggtggataaaaccgagcagccggaaaagaattttgccaaaggcattgttatcgcggcggtcgtcatttctgttggctattcgctggcgattgttctgtggggcgtgagcgccaactggcagcaggtattgagcaacccttccacgaacctcggtaatatcacctacgtgctgatgacccaccttggcgccaccctggctaatgcgatgcatctgccgcccgccgtcgccgccctgagcggattatggtttgccagaatcaccggactcgccatgttcctcgcttataccggcgctttctttaccctgagctactcgccgttaaaggcgattattcagggcacgccaaaagcgctctggcctttagcaatgacgcgaattaacgctaacggtatgccggcgaacgccatgtggtggcagtgcctgctggtgagcgtgtttattctgctggtttcctttgggggcgataccgcgtcggcgttttataacaaactgacgctgatggcgaatgtctctatgacgctgccgtatctgtttttaacgctggcatttcctttttttaaggcgaagcaggatctcgatcgcccctttgtgatttttaaacaccgcggctcgacgctgctggcgaccgccgttgtggtactggtggtggcatttgccaatatctttaccgtgattgagccggtgatggaagcgggtgactggagcagcgcgctgtggatggtcggcggaccggctttcttttcgctgctggcgctggggatctatgagaattaccgccggcgtacggcggtgcagctgatggtcgaggagagctaa

SEQ ID NO: 178468 - DNA, 1869 bp, Klebsiella oxytoca
atgattaaaaaagcttcgctgatgacggcgctctccgtcacggcattttccggctgggcgcaggacagcaattcagatacgttagtggtcacagcaaaccgttttcaacagccggtcaatacggttcttgcgccgaccgatgtggttacccgggaagatatcgatcgctggcaggcgaaagatttaaacgatgtgatgcgccgattgcctggcgtggacgtcgcgcaaaatggtggcatgggtcaatcctcctctctgtttatccgtggtactgaagccaaacaagttctggtgctggttgacggcgttcccatggcccgaccgggcattacaaataaccccgatctgaaccagatccctttgtcgctggtgcagcgcgtcgaatatatccgcggcccgcgttcagcgatttatggttccggggcaatgggcggcgtgattaacgtcattacgcattccgataaagaacaatccaaaattaccgctggggtaggatcgaaaggctaccaacaatatgacggtaccctgcgccatcgctttggcgatacggtggcgacgattgcgggttcttatgagggtaataaaggctttaacgttcagcccgattcaacctgggatcacgacggcgatcgcgacggttttcgtaataaaacgttttggggcagcctcgagcataaatttaacgagaatgttgacggtttcttccgcggacacagctacaccaacaactctgattacgatctgggaagcccgccgtatagcccggcctacagcgccgatgaaagccagctctataaccagagctgggatgcggggctgaactttaattccggaatttattcctcccagctcatcgccagctatcagaagataaaggactacaactacagcagtatttatggccgttataatgatgggacgacgctcgacaggatgacgcagcgtaacctgcagtggggcaataacgttattgtcggccatggctctgtcagcgctggggtggactggcagcagcagcggttaacttcatcagatacggcgatgtcggatacctacaaacgtgacaatacgggactgtacctgacgggccagcagcaagttggcgacgtgaccctcgaagcgtccggacgtgaagaccacgatgagcagtttggctggcacggtacctggcagactaccgcaggctgggagtttgtcgaaaattatcgcctgactctcggctacggtaccggcttcctcgcgccttctttagggcaacagtttggctccactcgatttggtatcaacgcgaatcctaatctgaaacctgaagagtcgaaacagtgggaagctgggctggaagggctcaccggtcccgtggactggcgcttgtccgcgtaccattacaaaattactaacctgattacctattattccgatcctgttacctatgacggggaatacgacaatatcaatgccgcgacgattaaaggcgtggaatggacgggaagtatcgataccggtattttcagccatcgcgtaacgttgcagtatgtcgatccgcgcaacgatgataacggtgaagtgctggcccgtcgttctaaacgacaggcaaagtatcagctggactggtccatgtttgatgtcgatatggatgtgtcctggcagtattatgggaagcgttacgataacaacacctcccagtacaacaatacgcaaagaattttgccgagctacagcacggtagacgtttctgcatcgtatccgatcaccgatcgcctgacagttcgtggtaaaatagctaacctgttcgataaagattacgagacagcttatggctaccaaactgcaggacgagaatactacttgtctggcagctacaccttctga

SEQ ID NO: 178469 - DNA, 864 bp, Klebsiella oxytoca
atggatagcgacattaatcaggccattgattcttttattaaaggcccggcggtaatcggcaaagtccacttttccacagaatccagaccggcttctgagaaagcgctaagcgtcgattttccgcgcctcgaaatcatgcttgcggggcagcttcgcgatccggcgattaaggccgaccaggcgcagctgacgccgcacgatgtgctgtacgtccccgcaggcggatggaatgacccgcagtggctgatgccctccacgctgttaactgtcttatttggtaagcagcagctggaattcgttctacgccactgggacggcagcgcgcttaacgtgctggataaacagcaggttcctcgccgcggcccccgggttggatcgtttctgctgcaggcgctgaatgaaatgcagatgcagccgcaggaacagcatacggcccgctgtattgtcaccagcctgctcagccactgtgccgatctgctgggcagccaggtacaaacgtcatcgcgcagccaggcgctttttgaagcgattcgtaaacatattgatgcccattttgccgacccgttaacccgcgagtcggtggcgcaggcgttttatctctcaccaaactatctttcccatctgttccagaaatgcgggccaatgggctttaacgaatacctgaatcacatccgtctggagcaggccagaatgctgctaaaaggccacgatatgaaagtgaaagatatcgcccacgcctgtggtttcgccgacagcaactacttctgccgcctgtttcgcaaaaacaccgagcgctcgccgtcggagtatcgccgtcagtatcacagccagctgacggaaaaaacggcttcgctaaaaaactag

SEQ ID NO: 178470 - DNA, 750 bp, Klebsiella oxytoca
atgagcatttacgccattttgcaacaggacaaaaaagtcgtcgtcaatgacctcgccgaaaagttcggcgtcaccaaaatgaccatccgtcgcgatctctctttctttgaaaaacaaggtattgtaaaaacaacctacggtggagcctacttaacccgcggtgccagcgtcgagcccggctttcagctgcaatcgatacaaatggccgatgataagcacctgattggccagaaagccgccgagcaggttgaagatggcgacacgattattatcgactgcggcaccacgccgctggcgctcgctcattttattttcgataagaaaatcatggtgataaccaactccattccggtggttaatctcctgaaaggaagaaaaaatatcaagttgatcgtcgcgcccggtgaatatgaagacgccagccagggaatggtctctttcagtaccgccgacttctttcgtcatatccacgccgacaaagtcttcctcagcactcagggcgtcaacgatcttggagagctgacggttcctgaaatgaccgatgcccacgtcaaacaagcgctgatgcgcgccgggcggcaaaaaatcctgctggcggacagcagtaaatttggtcaaacgttccttgcaggccatgcccgcctggcagaccttgacctcgttatcagccagaccggcctctcccccgatatcctctctctgatgcaaacgcaaaacgtaccgctgctgctggcggatagtcacctctga

SEQ ID NO: 178471 - DNA, 906 bp, Klebsiella oxytoca
atgacaaattcacgtttacacactctggatattcgcctgctgcgctactttgcggtggtggcggaggaaaataacatcagccgggccgcgcagcggctatttatttcgcagccgccgctgagccgtcatattcgccatctggaaacgcagctgggggtaacgctattcttgcggcataccaaaggtctgatccttaccgacgagggaagacgggtgctggatatcattcggcctctgctggcgcttcaggatcgcaccctggcggcgttgagccagctctctgcgcccgcgcagcagcctctgcgtctggggttgaccaccgcctttgagcaaggcgttttcgccgccgcggaatccgctctgggtgagtacacctgcgcattgcacatcactcgtcagtcatcaccggcgttggcccaactggtgcgaaagggcaagctcgatgcggcgctggtggcgctgccgctgaataccgaggggcttcacctgcatccgttgccgtatggcgagccgcttatcgcggcgctacccgcatcctggccggaggccgccagggcggagctgacgttaagcgcactcaatcatcggccgctgttctggtttaaacgcgagcgtaatcccgatttttttgactatacgcgacgtatttttgaccgggcaggctatgtgcccacctacgtggaggagcctgccgagcatgatgttctgctggcgcggattgcgcgcggagaaggcctgatcctcctgccggcctctttttccgcgattcagcggcagggggtcgtcttttgtcctttgcaggatgccagccagcagcttccgcttaggctgggaatggtgacgctgcccgcaaatgagagggttcgggaaagggtaacagcagtcgttgaaaaatcattgccttag

SEQ ID NO: 178472 - DNA, 483 bp, Klebsiella oxytoca
atgttcgttgtgggtgccagtgctttgtttttggggctcggtgctgtgatgtcctactttataacgtccagtatgcttgagaccaagcaggaggtaaaaacagccatgcttcaggttgttaatgaatcctccccgaaaaatatcagtgagtttgttctggaggccagaccagcgccgccggaaagcctctatcatgcccgcgaaacagcaaaagagctgaatgcaatggcaatggaacagagaaacggattaatttctaaatttctggaaacgacaaactggctctccttgagcccgatgatcactctaattgcctttatccttggcgtgggattgacgcttgcgatagctctcatgaaagcgctgttcagggaggaggagtcagaagaaaaaaataacacccttactcagatagcgacccctgtcagcaagttaattgaatatcttgttgattatttgcagagcaaattcaaaggaaaatga

SEQ ID NO: 178473 - DNA, 486 bp, Klebsiella oxytoca
atggatgttaacgcagtgaatgctgtgcttaattcccattgggatggtcgcttgcctgtgcgaccagatatgatagcccatcaaatgggaattcaagtgatgccgttagtgcctgatggtaacaatgccaaccagtcgggctctgctgaaattgttaacggccgttatgtgatttcttacaatcctcaagattcacacaatagaatcaggtttacgctggctcatgagttgggccaccatgttttgggtcatacccaacatggacggatgttcagggagtacactaacccggactggaacagcggaaactacattgaggagagagatgcaaacagtttcgcagctgaattgcttatgccaagagaagctatctctatgattattaatagagataaaatttattcaattccggtattggcgagtcaattcggtgtgtctgaggaagccatgtactggcgagttaagaacctgggatacatgagctga

SEQ ID NO: 178474 - DNA, 1671 bp, Klebsiella oxytoca
atgaagccgaccgtagcgctacacatagggagcacacccgcacacgtggccgattaccgcctgttgcttgagctgggcggatgcggccgcgggtttatcactgctgaatgcgacgtagattgcaccggccagctcgtgcgcctcaatctcggcgttaacgatactgtctatcgctggtttgtgggttacgttgagcgctgcggcccggcagagaagggatataaacggctttttgtgcgcgagctggttggcgtgctggcaaaaacgtggccggtatcgctgcagcacccgacgctgcgcgacgtctgcgcggccatcacggcgcagactgatatcgcgttcgcgctaccggacgcaaattatatcgatacaaaaattccccactttaaagccgccggcagtgggtacgcgttactcgatagcctgggcgccgcgttttcgatagctgattactgctggtaccaactcgccgacggtaccgtctacgctggcagctatgccgattcacgattcgcaggcgcgccggtggatattcccgaggattttatcaaagctggcagcagcggcagcgctatacagctggccattattccggctatcaggcccggggttatcgttaacggccgcagaattcaccaggtcgagattgatggcgccgatatgttcctgcgctggcaaccgctcaccgagagcggccggccggcgtgggactcgccagaaaagcgccagattgaccgggcctaccctgagctcgccgccggtctgcacctgccgcgccgcgcccgggtcaccggcccgacggacgtcgccgcactgggagaccaggccgacccgttccggcctcgttatgcggttaatctgcagctgctcgatgctgacggaaacgacgccaaggcgccggagctcatcgcggtaccgttgccggtgccgttcgctggcgctgagggcggtctctatcagttcccgggcgagggtacgctcgtcgaggtggcattcagcgacggccggccagaccggccatttatccgacagacactgcaggatgaccagccgctgccggcaatcaagcccggtgagcagctgcagcagcagcgtgctggcgtgagccagcgcatcaccaccgccggcagctggcagcgtgaaaccgaccagtctatcgaggagagcagcagctcgcgcagcgtgatcagcgaccacgagacccgcgagactgtaacgcgcagcgtgctgataaaatcgaccgactcgacgaccgtgctcgggttggtcagcctgatggccggtgccgtgctgcagctggctgatggcgattttagtgtcggcgccgcaggcaaatactcattgcgcagcgctgagctgcagcaggatattgccggcgacgtggtactcaatgcggccgggcgactgcaggagcgcatcgccggcattcgttccagtgttgcggcagcgcagcagatacagggcgagacggtcacaatcggcgacggtaaggtcaatctcctggactgcctgaccgacacactcgatattgtgcacgagctggccagcctgacggctgcgcacacgcatagtaataccggcacgccaacaaatgccggcgccatcgagagcaacgcgcagcgcccggtcgcactggcagcaaaatacggcccgctcatcggcgacaactaa

SEQ ID NO: 178475 - DNA, 552 bp, Klebsiella oxytoca
atggctgatattgagctcgcgcttagtggacaggcgataaacctcaaagaccttgaggtcacattgtcgatgaaaatcgcagataaagaccagagcggccaggcatcgagcgcggccagctcagagcagggcgtcaaagcaaaagaattcagggttaccggcctgattgattacggcaatgaggcccatctcgcggagattttcgcccttgccgaggcaaaagacgccggcggcaaaagcgtaaaatatcgcgtaaatcacaatcttgccagggcggttaaattccgtgaggcggtattttctggcgaagtcagcgccccaaaagaaagcgatctgatggcctatcgagtcacgttcacgttgaaagaatacgtgagcactgcagaaaaaagggcgcaagcgcaggctggcggtgcgacgcaggcgcaagtgcagaccgcacaagggaccagtgcggcgaccgatacaccggccgagctgggctggtttgaaaaggtactgcagcgggttgaccgtgctatcggcccctacgacagcgagggcgacaaatga

SEQ ID NO: 178476 - DNA, 684 bp, Klebsiella oxytoca
atgtggcagaaaaagacactcaccccggccgctgcggacgttatctgctcaacgattgcaatcagcccgtggacgcccggcgccggtcatcgtgaggattccgggctatacctgagcccggataacgccgtcgcggtcgccgcatcgcggctggctggcgcgccgactgcgctcgatgttaccgcgctattgtttacagcgccgacggtggccgcattcgccgatgtgctatcgactgcggctgcagttttccccctgcagcagattaacgaggtataccgccgggcaaataccgcgatatctctcgctgagtctcgcatgcagataccggcccgggctggcggtctgccggctgcggcgccgttgtcggtatccaccatgcgcgcggccgctgcggccggctcaattgtcagcgccggcagctgcgccccgggagatatagccgccgcgctgcaggcgttcgggcagcagcgtgccagcctgctggcggcggcacagcagcagctgcagcagatagcggctggaagtgtcgacgtatggaccgtctccacggtcaaaaacaccgccggcgccgtcagtgaaatgcgcgattctgtaccaaactccgaccacgttttcgcgctgtgcgtagtatttgccggcgctgatttggccgcattgcgagggatgttgaaagatggctga

SEQ ID NO: 178477 - DNA, 1482 bp, Klebsiella oxytoca
atgtctcagagtgtaatcaccaacgcattttccccctggctggcggcacgccttgccgaaaacaaaccggcgaggcctgacaggatggtttttgccttgatcgaggggcaggatgaaaatgcagagataaacccggatgagcagctgccagcaaaaggactcattacgcacaccgccgatatcgttcactttggcacgctcaatgagcgggcctttgtatgctcggtggtgctggatacaactgtgggaaactggcattacaactggatcggcctggttgacagtaaatcagacaccctgttgatgattgtccacacggctgaacagcaaaaaatcaagaccgttgccgggatccagggcaatacactatcacgcaatctcatgatggagttttccggggctgcggcggcatctcaaattacggtaacagcggaaacgtggcagatcgactatagcgcacgactgcgcagcatggacgaatcgcgccggctggcgtgcgttgactattacggcccggcagcgttcgacggtgacgggttcgccgtatcggttgccggcggcgtggtcaccgtggcgcccgggcttggctatgtcggcgggttgcgcgttttactggcgcaggccactacggtcttagcggcaaacacgacggtttgggtcgatgcagtctggtccggcacgaccgtcggcacctggtcgcatacgtttacgattcgtaccggcgcaagccttgaggactacgtcgacacggcgggttatcagcattatgtggccaggatagccactattgccggcggtgtcgtgaccgaccggcgcttgccgtttccgctgcagcgcatcgagcaggagctcaatgacctggacgtctacgacaaaagtgaggccgacgagcgattcctgcaggttgcgaataacctcgcagatttagacgacgtgaagaaagcccgggaatcgctcgatgtgaacagcaaaggcgaagccgacgagcgattcctgcaggctaaaaataatctctctgatatagaggacaaggcaaaggcccgcgaaaatcttggttttaatattccagacgggcccgtatttcgcgcaattatcgacgcggttttttgggtcggacggtcggttatttcggatagcgaccccgggacgcgttacacctggcagacgtggcgtgatctgagcgcagattatgacgggcgtgtgttgcgtatcagcgatgtagccatgaacacaggcggcagcaattcggtaaaagttgaaggtgataaccttcctccacactggcaccgctccggcgacaggtcgccgggtacggtgtgggaccctaacaccacgcacggcaccgataatcagaaaaacgggccgcttgccctgactgaggggacctatattgatgcggatggccggacggagtccacgaataaacccttagatgtgacaaatgaatatgtcaccgtcagagtatggcgccgtactgcatag

SEQ ID NO: 178478 - DNA, 228 bp, Klebsiella oxytoca
atgaaaacattcaatcaaatgaaaagcctgatcggattttgccagaccgatgaatttttcctggaatacctgcaaaagcttcagggcgcgggggttattgatgtgggtgatggtgatattgacgctgaaaataaaaggctgagtgatgatttttatacgcggctggctgacgtttacggcgtaagttcagatgatgaaccctcgccagcggtaacaattcaggagtag

SEQ ID NO: 178479 - DNA, 3039 bp, Klebsiella oxytoca
atggctgagattaaattcccgaacatcaccgaaaccctgccggtgtggatgaacaaaggggagccgctgacgctggcgcacgcatcgcgcacgtggtggcaacgtgtcgccagctggctggcgtttccgctggcgcagattgacgtcgacacctgcgacgagcaactgctcgccctgctggcctatcagcgcgatatcgaacgctttgagggtgaatctctcgacctgctgcgcctgcgggtcaaatacgcgtttgttaacgcccgggacgctggcagcatagccggatttgcccggatttttgaacggctggaaattggccagatccagcagctcgagcgccagctgcagtatgagtgggacgtgattttgattcgtatcaacgacgctcagctcgcacgcgataacacgcttatgatgaaaattatcaggcagtacggtcgcacctgcaggcgctattttttcgatgttcttaacgaaaagtcggcttatatccacggaggatgctttgataatgacgcgcaatattggtctgcgcgggcaattgttcgcccgacgagtgtgacagccacgccagcaaggctttcactggctcccggcgattccgggatcgtgattgttgaggttttcccggaagacgcggaagaccgcagtttttcagtgtattgctctgataacagcaagatttcaatagtggttaaaggcagtcaactggttgtaactggcaaagcgcgcggtgatgcaacaatcacgattgtgaccaatgacggcaatttaacggcgatggttaatgtctctgtggtggcggttcttaaattcgttaaccacatcgacagcgcaaccagaccaatattttttgctcatatggatgaagatttcaccattgattacggtgacggcattgacagtcgagagtaccgctttgagccggccaacgcttcttggggatgggttatctcgacccgtgaactggaagaggggcaggaatacaccataacggttaaaaacacggaaaccgccagtttccagcgcactgtgggtaacgtttcagtgacgttgaaccccgtgcaggaaatcattcttttgacgggagaaagggacaatcttgtttctttcgcgagtggcgcaactggcctttacaaggtccatgcaggggcttttgacgatctgccaaatatccagaaatgtacctccattttccggggctgctcgtcgctgactgaactaccagaaggtttattcgcgcggattactggtgtcacagatttttcagcggcgttttatggctgcacggcaatggctgctattcctgatgggctgttcagcgaattatctcaggtgacgctgttcacctcagtgtttgagaactgcacgcggctgctcagtgctggcaaaaacacattccagggctgtgctgctgcgacgcatttcaccagtgcgttttcgggatgcacatcccttatcgatacaggtacgggtatttttgacggatgtgtcagtgggaataacttcggttataccttcgatggatgtcgtgcgctgggaacattgtcagcagatttattcagcgatgtgcctggtggcgtctttacagcgattttcaggagctgcacggcgctgacgcagctaccgccgcgcctgttccgcaactgcctggaagctacgcatttcggcggggcattcagtggatgcacgcaactgctttctgtgcctgatgaattctttaaggatttacccctggttaaccattttggaaccgttttttccggctgttcttcactggtaaaagcgggaaaagctgtgttttctggctgtgcgcttgcgcaaacattttcctccgctttttactattgccgtgctctggaagaagtgggcgatgatatttttgaggggtgtgtcagtgcaactacctttgccagcgtcttcaatagttgcacagcattaacggcgctaccgtcgtttgtggactgtaataaggcaacgagctttgaccgggctttctatgcctgttcttctctgacggccgtcagagcagaggcctttgcaggtaaatcactggtcacgacgttctattatgcattcacccaatgtacatctttgaaaagcatcggcgccggggcgttccgtggctgtagttctctgactaacctgacctatacatttatgggctgcacggcgctggtatcgctggccggggatatgtttgcaggatgcagcaaagtgacgaatgtcaccggtctgtttaaccagtgctcaggccttgccgtactgcctgaaaagctgttcagcgatctgaactctctgatggcgatggggagcaccttccaggactgcaccgcgctggccgtgttgccatccgatctctttgcgggttgtatcaacctgacttccctgacgctgacgttctccggctgtactgcgctggcggtattgcctgctgatttactgaaacataacaccctgctgctcagtgctggttctacgttctacggctgcacggcactggtgaacattccgccgtcgctgtttgcatcgtgtccgcttatctcagcatttggcgcaacgttccagaataccggcgtagttgaaataccggaaaacctgttcagcggcaaccctctggtgactgcctacggccagaccttcaggggatgtaaaaagctgcgctcagtgcctgccggtgtttttgtcgccagtatcaacgccacgacttttaccaatgtgtttgccgagtgtgtcgcactcgaagaggtcggggccggtctgctgaataccgtaccagcgacaacaatcggctacctgtttgacggctgcccgcaactgaaaaccaacgtcagcacgatattcaatctcagcagttattcgacgattgtcaccacgacggccacattcaggggatgctctgccattacgggcaaaggcctggagtttatgggcaaagtgccaaatgtcacagcgcattattacgcgttctacaactgcacaagcctggacgatttcgcagatttacccggtaactggataacgaataaattatga

SEQ ID NO: 178480 - DNA, 1182 bp, Klebsiella oxytoca
atgacgacaagaaaacccgaccccgattatgaggcaattctcgccgagcagggcatgccggtgaccgaggagcaggttcgcaacgagtttaacgagattgttaaagatgccggcctcatcacaaacacgtcgagaatgtcaccattctggcggctcataacggcgattattacgcggccggttatctggctcaaaaatgccctggtcgaaaccgtgatgcgcaatgcctggctggccaccgccggcggcgtctttctcgatctgttcgcctgggcggttaatctcgagcgtaaagacgcgagcgctgccgagggggttattcggttcgctaaatctgatacgcagcgcgaggttaccgtgccggcgggaacgataatccagaccgagagaattaacggcaaaattcaccaggtcattaccaccggcgatcggactatcgccgccggcgtggccagtgcattgctgccggtggtggccgttgaggagggcgccggcgctaacctcgccccgggctattaccgcattctgccggtggccgttgacggtatcgtgagcgcgcagaacgaggaggactggctaacggtcccgggcgccgatatcgaggccgacgacgacctgcgcgaccgcacccgcaaccagtttaatctggtggggcaatatcatatcgacgcggtttatcgcgggatgattgccggcattgccgggttaacaactgaccggatttattttgagcatgacgcaccgcgcggacccggtaccgctaacgtttatctgctgctcgatgccggcgtcgcgagtacgccatttatccagacggtgaacaactatgtcatgacgcagggcaaccacggccacggcgacgacgtgttatgcatcgccatgccggagacccggtatgatatccgggccacggtgtatctttacgcgtcctctttgcttaatgacgacgagcaggcggagctgctgcgcaacgttacaaacatgattcgctgtgcgttccgcgaaaacagcgactatcaggtcgagaaaacgtggccttataaccgcttttcaatgtcccgtctcggtgaggagattcaccagtcatttgctgacgttgagtcggtggtgttctcgaccggcgatattctcagcgacctgaacgtgccccggctgggctctctggtggtggtctatggctga

SEQ ID NO: 178481 - DNA, 336 bp, Klebsiella oxytoca
atgaatgacgaaaaacagctttatttcgacctgaaaatcaccgccggcaatttcaccctggactatgccggcgagcccgggctatgcaacaaccgaaacagcattgcgcaggacgttgttcacatgattatcgagtcggagcttagtaaaaatttagtcgctgagcgcagcccgacgctgcgttacgacattgcgcagcagctcgagcagctggtcgaaacggacgagcgcctcgtgccggggacggccacgattgaggagacgggcgccggcacctggctgataactgcagacacatgggaatttgggccgctggccagcgagatgacactatga

SEQ ID NO: 178482 - DNA, 2007 bp, Klebsiella oxytoca
atgaaagaattaacatttgccctgaatctaaaaaataatctgagcagcccgctaggcaaggcgcaggcgtcggttgagtcgttttcggtcggcgccggcgcggcgattaaacgcctcgcaggtggtgcggcggggatgtgggcgaccacaaaatcactgaccggcctgctgcggccggcaagtaacgtgcaatcggcgctcgatgagctgtcaacgcgtaacgttagcgaagatgcgttaaaaaaaatctcactgcaggcggcgcaattcagttctgattacggcgtcgcggcaaccgattttatcggctcggtgacgacaatccgctcggcgctggccggactgaccgacgacgagctgccgcgcacagcgttggccgttaatacgctggccgtcgcgtcaaaaagcagcggcgaggctgcagcgcaatatatttcgagtctggcgagccatttcgcaggcgaggccagtcgcataggcaatgtggcattcgctgagaatctggcatcaaaaaccgcctggcttgtccagaacaccgggcaggatatggcgcagatacagcagctactgcaggggactaaaggcaccggcacgggctacggcgtcggcatggatgagcagctcgcggtgctgggtaacctcggcaacgccgtgggtagtggtgccggttcgatttacgaggcctttctcaaaaatgcccgcagcggcgcacaggcgctcggcgttagttttaccgacgcacagggccggctgctggcgttcccggacattctcgacaagctgcaggctaaatatggcgattccgtggccggcaatatccagctgcaggaaaagctcaacaaggcgtttggcaaaggcgcgctggcactggttaaaacatgggggtcggccgacaagctgcgaaaacagctccaagccctgcagggcacgcaggggctcgctggcgccacgagcatggccgacaaaatggccgatatctgggcgcgcctgagccaggtcggcaatcggataaaaaacgcgttcggcagcgcattgctgcctgtgtttgagccgctgataaacaaggtcattgcactgcaggcgcagttagcgcgctggctggaaatgttcccgaatatcacccgctggctcggttacgttgtgattggtctgtcggccatgacggctatcgcgtcgctgctcgcgctgtggtccggggtaaaactgctcggcgatctgctggggttaaagacggcgctcgggctactcaatgtcacgctatggccgacccgtatcggcctgctggcgctggccattcaggccaaggcgctggccgtttgggccggcgtcagcaaagtggcgatcgtcgcgtggaatatcgtgctcagtgccggtgctatcgcaatgaaagcctatgcagtggccaccggcgccgccggggcggcgatggcttttctgacgagccccatcacgttaatcatcggcgcgctggcgctggtcgcagccggcgtctggtatgtgatccgcaactgggacacgctcagcgctgccgtaatgaataccgaagcatttcaggcactggttacggtgtttgagtgggtcgggggtgttatcggtgacgtgtgggacggtatccgggcgggatgggatgcggttgtcgattatttttctgtgcgttcgccggtcgaggtttttcgggattttgccggggtgattcggggtgtttttagcagcctgtgggattacctgaaatcgtcatttggtagcgtctacaactggatagcggaaaaactcaataaaattccgggcgtcaatatcgaccttaaaggcggcggtgagacacccggaccggcagcaccggccggcatgacgccgccggcagcgatcggggcggggggcgttggcagagccgtggccgctgccggcaaggtcgataacagccggcatgtggggacggtgaatgtctacccgcagaatcaggagactttcgactcactgctcgaatcaagggagctcgccgccggatga

SEQ ID NO: 178483 - DNA, 270 bp, Klebsiella oxytoca
atgagtgagcagaaaacaatcaccctgaccgttaacggcaccgacctgatttttgaaccgaaccgcgtggcgtacaaccagttattaaactcactggaagtcaaaaacaaaaccggcgccgtgcgcgattacctgctgaaaatcgtcagcccggaaagccgcaacgctctgctggagctgctcgacgcaaaccccagcgccggcatgcagctggcgccggctatcaatgacacattcgcgccggcgctggaaatcgaaataaaaaaatag

SEQ ID NO: 178484 - DNA, 156 bp, Klebsiella oxytoca
atggccgagtgcccggaaaccctgccgcgtctcaccggtaatacaggcgcccactttgaccaggtgctgcgcccgctgcgcagcatgtacaccacctgcgccgcgaggcataaccagctcgtgcgcgagattaaacagagagagagcatcaaatga

SEQ ID NO: 178485 - DNA, 393 bp, Klebsiella oxytoca
atgaaactgtcgcagattttcagcctgtggccagccctcatgattgggctgttcgtcggtatgttggccagcgcactgcaggttaatgccgttatcagcagcgggctacgtgaagcgcaggcaatgtccactactgagcgcaccaatctgattaacgatatttcgaccgcgtcggctgaaaaggtcgccggcaggctggaggagctgcacagcaatgaaatcaccgtcgaaaaacatttcacaacggaaattattaaaccggtatttaccagcatttgcgctactgatgagtatgtccggttgttcaacgaatccagcaccgcggctgagcgagccctatcaggtgatattgatggccgagtgcccggaaaccctgccgcgtctcaccggtaa

SEQ ID NO: 178486 - DNA, 537 bp, Klebsiella oxytoca
atgactaaagatgaaattatcgacgaaatcatcaagcgtgaggccggctacgtgaatcacccggcagaccgcggcgggccgactaactggggtattaccgcaaaaaccgcgcttgcgcacggttaccacgatgtaaaagcgctgacacgtgagcaggcccgggtgatttatgaggcggattactggtacgggccacgatttgaccaggtggccgcagtagacgcagctatcgctgatgagctgtgcgataccggcgtcaacatggggccggccgtggccagtaagtttctgcagcgctggctgtctgcgctcaacctgcagggcaagctttatcccgaccttgacgccgacgggcgcatcggtccgcggactatcactgcactgcaggcatttttaaaacatcgcggctccgacgggcgcaccgtgatgctgctcggcctgaattccagccagggcgcccggtatctcgaacttgccgaaagccggctagctaacaaggcatttctctttggctggatgcttaaccgcgtggggtga

SEQ ID NO: 178487 - DNA, 297 bp, Klebsiella oxytoca
ttgctgttgttgttcggtgttggcgctgcggttgaactggcgcgcgttctgaatagcgacgagcaaatcacaatgcggctgattgtcagccgcatgctggccggcgcggtgactgcggtccttgcgctactggccaaatttaaacacccggatatcgaagacctcgcggtcgtcgggctgggggcggcggctgcggtggtggggtataccgcgctacagcctgcactcaaaaaactgcttaaagcgctgtcgcgcgtcaatctgagcgacgacagcgggagaaaggacgatgactaa

SEQ ID NO: 178488 - DNA, 456 bp, Klebsiella oxytoca
atgacatcacgcatcggggggatggattacgacgtgagtttcggtaccgaggaggtgcacgtcgaaagctgcacgcttgatattaccgataacacggcagtcgccaaaaataaggggcgtccggctggccacgtgaacggcgattgcacggccgagggtgaaatcgaggtcgatgagaaaaattttaacaaactgaacgttgcggccggcgcagccggtggctggcgacggctcaggcccggcgacatgttgttttatgcaaacaccggcgacgaggtctcaaaagtggaggcgttcggctgcaagctgattctcacgtcaattatcaatatcgaccctaacggggccgataaatcgacgaaaaaaatcaagtttctggtgaccggcgaggagtttatcaaaatcaacggcgtgccggtgctgagcgaggacgacgtgagcggcctcgcggggtaa

SEQ ID NO: 178489 - DNA, 1155 bp, Klebsiella oxytoca
atgacatggccaaccgtagatattaatcagattaaccagtatcagggtgcaatcactgaaatcgagcgcacgatgctgatcgtcggcgcagctggcgccgatgctgacgacaaaaacccgttaacggtcgttaacgcgcagaccgatctcgacagcgagctcgggcacgtctcgccggtgctgctggagcaggtccgggccgcacaggtaaatggcgggcagggctggggcgcctatgtgctggccatcgacccggccaccgctatgccagcggcgtggccggcggctatcgggttggcgctgtccgacgtgagcgtcgagggggtgcttgtttgcagcgatgtagacgacgcgaccactggccggaaattaatcaacgacctgcaggcgctgcgggcgtcgcttatcagctcactggggcgtcgtgtgtggttcatcgtcaccgtagccggcgcggctgcaaaaaaacaaacctgggcagattaccgcacctggctcaatacgctgcagaaggacgtcgccgcaaatgcggtgatgctggtcccgtcattgtggatgaatgaggccggagcgctcgcgggccggctatgtaatgccgccgtaaccgttgctgatagtccgatgcgcgtcgctaccggcgagttgctcgggcttggtattgattccagcgataagccggtcgatgccgactgcgtagaaatttctcttgcttacctgcaggcattccacgatctgcgctatagcgtgccggcatggcatccagactacgagggcgtttactggtccgacggcctgctgctcgaggttaagggtggagattacagcgtcatagagcacctgcgcgtactcgataaagccgctcgccgggtccggctgcgggccattccgaagattgccgaccgggggctcaataacaccgaagccagcatcgagcgccataaaacctattttgcggcgccgctgcgtgagatgtcgcgctcggtacagattggcattacgacatttccgggcgatatcgagcctccacaagagggggatatcacgatcacttggctaacccgcgagcatgtggtcatcggtgtgtcagcgaagccatatacctgcccgaaaaaaatcaccatcaatattgcgctcgatctgagcctggaggattag

SEQ ID NO: 178490 - DNA, 696 bp, Klebsiella oxytoca
atgaatatttcgctaacgttgaacacgcagcagtttaaagaaatgcgccgacagattgacgcgctcaacctgccgccgcgaaaacaggagcggctgctgtggcgcattctgcaacgtggcgttatgcctgccgcgcgagctcaccagcgccggcaggagagcgccgacggggtgaaatggcccgggcgggcccgcgggggcaaaaaaaagatgctgcgtcagctgccaaaaatgatggccatccggcagatgccggcgaaatcgtcggcgctgatttatctcagaggcagcaaacgcgtgccgccgggcgtggtgggggcagcgcagcagggtgggcagaccgtgacggtaacggccagccaggcgaaagcacagaaaaaaactgaaggcatggccacgctcaagcaggcgcgacgcctgcgtcagctgggttatatgcagtatccggtgaccgacccgcgggtcgcaaaattagacgagatcctcgtcagtctgacccgggataaggccgggctgattattcgcaacatggaagggcgggaggcaaaaaagacctggaaaaacacattaccggcgcgtgagtttttggcggtgagtgacgatgaatttaacaaaatcctcgcgcgtcagctgcaggctgtgaattacggcctcggcgtgcgggcgcaggacgtcaaggggaaggtaaagcgatga

SEQ ID NO: 178491 - DNA, 516 bp, Klebsiella oxytoca
atgaaaacgcagctcgatgcactgttcggatttgttaccagcaatctgccggcacgcctgcaggatacgtcgggctttgatagctggatggaaaatatcgaactcaccgtcgacgaaaaaaacgtcggcaagctggcgccggaggatggcgggggaatgcagaaacgcatcgcgattcgacgttatgacggcgttctcgcatgggagcgctggccatatcgccaaatcgaccccgatgtgctgttcgccctggtgggggcgtggcttggggagcacgccgacgacctgcgcgagcgactaaacctcggcagtccgatgcctgacgttgaaatccgagataacgagagcgcgatcgtcgctatttcggtgccgctggccgatgagctcattttggtgccggaccccgacggcattatcccgctgcgcggcctgcgttacagcctcgccggtgcgcaaatacgaccggcggaaacgttcgggattgcagcgcagccgaaacgggagattgagcgatga

SEQ ID NO: 178492 - DNA, 453 bp, Klebsiella oxytoca
gtgttacgaccgggcaacaacggctatcaggccgcgacccttcaaaatactgaattctggccggatctcgagctcgaggattttcagcgtcagcgctcgataccgccggatattaatcacgagacggtcgccggcgccctgctcactgcagtgagtgaaatcaacgccagcctgctggcatttgtcagcaaacagcagcgtgcagggtattcgacggctgcagctgtacccggggcaaaaattgaaggggtgaacgagctcaccgcactgtatatccgggcggtacacgcccgggcaaaggccgacctgatgggcgaatttgcggcaatcagccggcaaaaagaaaacaccaatcaggatgcgccgcagacaaaggcgtcgctacttgccgaggctgcggtcgctatacgtcgaattaaagggcttaagcgcgtgggggttcacctgatatga

SEQ ID NO: 178493 - DNA, 741 bp, Klebsiella oxytoca
atgggatttaacgcgctcagtttccgccggcaaatgctcaaccacgcagagaaaaaccggcccggccgcagtgacgcggccccgactcatgaggtcagcgatagcctgcatttgcagctgctggcgctcgaccgtgacctgcagcggttacgcgacttgccgcagataaaacagcgcgtcgatctcaaacgcgacgagctgctgccaaagtggacgccctatgttgagcagtacctgagcgccggcgaggtctacccctataccgttttcggctggtgcgttatctggctgtttgacgtgggcgacctcgaacgggcactcgactgggccgacatcgccatcgcgcaggaccagccgaccccggagcgcctgcggtcccgcttcccggcattcgttgccgaccagattctcgcttgggcagagctgcaggccgagtccggccacgccatcgagccgtatttttcgcgggtatttaaacacgtgcgtgaggactggcgactgcacgaaaagcacacggccaaattttataaattcgccggcgagctgctgctgcgtgaccagaccgggacgccggcgccgagtgttatcactgaccgcgaacggctcgcgaaatcgctcgagctactgctcgttgccgatcggctctggccgaaaattggcgttaaatcacgaattaatcgcgtcgaggcacgcctgcgccagctcgagaaagagcagcagccggctgacagcgacgcatag

SEQ ID NO: 178494 - DNA, 1107 bp, Klebsiella oxytoca
atgaccgttaatattaatcgcatgtacgagttaacgtcggcctactgccggcacgtcgcgcaggcaaccggcggcgatttatcaaaattaccgctgaccaataccggcgttggcctgttttccattagtccgccgcaggaaacggcgctgcgtctggcattaatggaagccaactggtttttgccgttgatccacgtgcgcgaaactgcgcagattcgcgggcaggtgattgacgtcggtaatccgggtttattcactggccgtaagcagggccgatataccaaggacgtcggcgtcagtggtaacacctaccagctgtataaaactgacagctgcgcccgcctgccatgggaaatgctcgccgactggatacattcaggtacgacagacgaggagtttatcgccctcgtcgctgagttcactatccgctcatacgctaacgatatcgtgcgcatcgggtttaacggcacgcatgtggcgccggtgactgacgaagacaactacccgaacggcgaggacgttaacatcggctggcaccagatagcgaaaaatttcgacacgctgcacgccaacccggccacgcctgacgaagaccgcatcccgggctttactccccgcgtgctcaatcccggacctattacgctggggccgactggcgacgttaagaccctcgacgcgctggcctcgcttctgatttctacgaccattcctgctcagttccagagcgaccccagcatcgttttgttggtcgggcatgacctcgtcgccgccgagcagttccgactgttccaggaggccggcaaaccgacggaaaacatcgccgcgcaaatgctggcaaacaccgtcgccggccgtcgcgttcacgttgcgccgttcctgccaggtaaacgtattgccgccaccacgctgcaaaacctgcaggtgctgacgcagcggggtacgcagcagcgccgtgctgagcacgtgcaggaccgcgaggggttcgaaaatgcctggtggcgtatgcagggctatgcccttggtcacccgatgatgtatggcgcgttcgatgacgacgtgatcgaaattgaggacgaggacgtcatcaagggcgccctcggtggctga

SEQ ID NO: 178495 - DNA, 897 bp, Klebsiella oxytoca
atggcacgctctcatttaatgactgactggatatgtattgccacggaaggagaaacggtcgacggccgtaatttagaggcgcaatggcttattgatatggcggagacctacgacgccgacggtatttatacagcattgctatggccggagcatcagagatggcccggcagctgcggcgaggtgctggcgcttaaatatgagcgagtcgacgggctggtgaaactgtatggccgattgagtccagaaatggaattgctgtacgcgaaccagcgcggacagctgctgttttgcagcatcgaaccgaccccgacgctcaattttcgcggcagcggcaagccctatctcgaggggctgggagtgactaatcagccagcaagcgtcggccttgatcgtatgcgctttaacgctaaagaaaccggcgccatttacggcgcattcgagccgctggtatttcgcgacgtggtagaaattgacgaggacgatatgagcaataaaagcacatcacccaaaaaaacgttattccgtagcctgtttaatattcctgacccggaaagtaaaaaaccggaagttaaaccggtggaaaaacctaaaaagagcatgtttggcaagagtatgaaattttcggaagagcaaatcgaatcactggtcgaagtggtggaagagctggtcgaagaaaacgaaacgcttaccgaaacgctggaggaaattaaagaaaagctcgatgaggtcgccgagaaagtcgacgcggtagagggcgaagtgagcagcgatgaatataaaaacatgcgtagtcaaattaaagatgttaacgccaaattcgctaagctcgacaacgttaccacaaacttgccagacaataaccccggcgataaaggccccaaaaaatacgctttctga

SEQ ID NO: 178496 - DNA, 663 bp, Klebsiella oxytoca
atgctcaacgaggtccaccattttgaggaccaggtcatttttagatttgacgctgtaatgaatggccacggcctgccggcgggcaaactcctgaaccatttcaaacaccggcccgccgatgcccgtcacatcgacgccgatgtgcgttatccggtaccgttcgaaatattcctttatccgctcaacttgccatttccagttaaatccgtgccacgtgtcgacgcgcagcacgcggaatggctcgccgtcggcctgcggaggtgccacgatgacaaaacaggctgtatcaccactgcgggccgggtcatagccggcccatacttcgtgctggccaaatggccggattgcgtcggggtcgtgatcctgccatgtgctgacactggcgaggcagcgctcgacctgggcgaaactgaacacggcgtcgccggcgtcgacaaactcgcacatataaagctgtttgaatgcgctggcgctgttctcctcctggatttcctcgatattgataagtaccagagtcgggtcgcctgccgcggccgcggcgacttccatatcccggaccgcctcctcaacggtcgtgataagtcgccagtgattatcggggcacatgaccccggcctgcatatcggtgaacgatggaaacgccacgttttcgcgtttagctga

SEQ ID NO: 178497 - DNA, 1098 bp, Klebsiella oxytoca
atgagcaggaaacagcgctacaaaaagcggccgcagacgcagccggccgcgccggcaaagtccggccgaaaattcagtattgtgaccaccgacacaccaatgccggtacttacgcagggcacgcaataccacgaaatatggttcgacgaggccgcgaactactggcgccagccgatagaccggctcgcgctggcgcagctggccaacatgtgcgcggcgcacggctcgatactctacgcccgcgggaatatggtgctgtccgactatctgggcggcggtctcagcctaatggagctaaggcaggcggcgtcggactggtttatgtttggcgatgtagcgctgctcaaagtgcgcaacggctggcgcgacgtggtcgacctggtaccgctgccgggtatgtatgtgcgccggcgtagagatggcgattttgcggtcctgcagaaagggccggcgctgatttatccggctcgtgatgtgctgttttcgcgccagtacgatccgcagcagcaggtttatggcttgccggattatatcggcggcatgcacagcgcgttactcaataccgaggcgacgatatttcgccggcgctactaccacaacggcgcccacactggcgggattgtctacaccaccgacccgaatctcacggatgagatggaggacgacattgcagaaaaaatcgagcaatcgaaaggggttggcaattttaaaatgatgtatatcaacatcgccgacggcggcgagaaaggggtccagtttatccccattggcgacgccggcgttaaagacgagttcagcaatattaaaaatatcagcgcgcaggacgtgctcacggctcaccggttcccggccgggctcgccgggattattccgcagaataccgccggcctgccgaacccggaaacggcgcgcgaaacttaccgccttgatgaggttatcccggtgcagcggatgctcgccagcatggtagatcaagatgatgaaatcccgccgcggttgaaactgaaatttaacggccttgatggccataatccgccaaaaactgagcggccccagaatgaggttgtaattacacctggtgaatcgggggctttatga

SEQ ID NO: 178498 - DNA, 267 bp, Klebsiella oxytoca
atggccgttattattgttacctgcagcgcgtgcggcgcccggatgcataaccgcaaaaccaactggcagaagcgcggcgaatttgcgacatgttattacacgtgcacaaacgtggaatgcagccgaacctcggcgtggagcatgagccgtgagcatgacatcacccccagcggactggataacagcggactgctgcaggggattgtcgagcgactcaaacccgaggagcggcagctgctgctcgagctgctgcagcctgcaggctga

SEQ ID NO: 178499 - DNA, 819 bp, Klebsiella oxytoca
atgaactcagccatagttgaatatcttgataagcttgataatcagtggaaagagatagatagactttctgagttggctaaaaaaaatcagcacgacactgagttatataactcattatgcagagcagccacggttttatgcgtatctcacctggaaggtttttataaggatgctgttaagtatttcatctcagatttaaatagcttaaaattcaagtatttgcccaaggcgatgaagcgagtattctgtcaggggtttgttggatttgataactctaaagaggcgaatgaaaaagtagaacggttgatcgctgaattcgaatcccatgataaattttctttaaatgaaagattttttcttccagaaaaaaataaaaaccccaaaccttcagtcctagagacagtttgtagttcactagggacaaaggatctttttaactctttggatggaactattttcgataacattttctcaatgacacccaaggaaatttccagaagtgtttacttgctcaacaagaaagttaaaaagaaaatgtcaaatttcccatgcaatgttgatggttatattttcaaaaaaataacagaacagaaaccctcacatcagaatggtgaaaaatcgaaaagaaggacgttatgggaggattttttagatgacctaaatactaaaaggcatgacatcgcgcatgggaataatttcgataacaattcaagttatgactggataatcatatcgaaagataaatgtcgaatattacaacttgtatgcatattaatgattgccactaactcttatattgagccaaaattagaaatatag

SEQ ID NO: 178500 - DNA, 1071 bp, Klebsiella oxytoca
atgtcattcaagattgaattaagtgaattgcaaaaaaaagcaaaagaaagaaccgtgaaaactcagaatattgaatatgacttagaaacattagtcaaaaaaatagataggaaagtaataaagttagatcctgactatcaaagaaagcatcgttggggcgatgatgcatcttctaaacttattgaaagtctaatattaaatatacccattccttacgtttacatctctttagatattgacgtagacgatgaaattgatgatgatgggcagtatcgatattcagtaattgacggccagcagagattaactgcgatttataatttcttaaagaatcaatatccacttgtcgaccttgaagttttagataatttaaatggtgcgtactacaaagatctacctccattcctcataagaagattagaggaaagaactttaaaatgcttaagaattgattcaactttagatcaacaagttaaatacgatatatttgaaaggttaaatactggggcattaaaactagaatctcaagagcttagaaatgccatttatagaggcccatttaaggatttaataaaagaactttcaatgcgtcctgattttatttcaacttgtggcttaagtgaatcaaaaaagaaaaaaatggaagaccaagagttgatattgcgtttttttgccattaattacaatgacggatataataaatataagaaaggattcaaagaattcttaaataccacaatgcaggaatttaaccagctaggtgatgctgatttaaaaaaaatgaaggacacatttattagaaccttcacaaaaataaaagaatcaaatattaaatttcctttttcaaaatggaaaattgaagaagatggcagtttaaaactttcatcaaaattcaatgcttcggtttatgattctgtttgtcatattttcatgaaaacaaataaaaaaataaaagacgatgacttaagaaatatgtttttatcacaagattattttgatgcttgtacgggaagtgtcaatgatatatctaaaataaaaactcgcatggaaaaagctgaagaggtggcataa

SEQ ID NO: 178501 - DNA, 2592 bp, Klebsiella oxytoca
atggccggtaaaccacacggcacgcgcggccgctatgagccgacgccaccaccaccataccccggcgggccagacccggccggggtttatcgttggccgcagccgggacggctaccgccaccgatagcaccggcgacgatatctcaggtcgttaaacagtaccggcgcggtcgtatgccaccggcgctggagttggtaccgccggcgcagccgccggtcgcgcaattcattgagctataccgccgcgagcagcagcgtgctgagctggccactatgccggcagatgaggctcgcgccgcattcctgcgccggctgctcgatgccgccgaggaccgctactggaaaaacgagatcgccatcggtgacgcactgctcgctcgtgagctcgagcggcacgacccggcgctggtcactctggccaatctcaacacccggccaaaatttatcagacagccgctgctgtatcgcctgcagttaatacgtgagcagggcgacccggagcgcacgagtatatttttatctgagcacatcgagactgtactcgcccgcctcgacgccgttataaaacggcaattaaccattccctaccggcaatttgctggccgcgagcgtctcgacgacctcctgcgcctgccgcagctcggccgacgctcagttaaaacgctggccacgatgctggcggcgcatatggatgacatttttgtccgattgtatgctgcggtcggtggtgaaccgacgccgctcgagctgctgcagctctataacaagataggccgcgaggcgttaaaggtttctgttacgccaccatattgggatgcgctgagcatggaacgccgtaagcgcggcactttcccgatagacaaaatccccggggcgctctctcggctgatttgtgcagcgtggtgggaaggtaaactctggcacttgcgcagcatctggcgcgaggagcagctgcgcgccgtttgcctggttaaccgtattgcatcggagttcgtcagccatgacgcactaatcgagcgccgggagcagcgccgcaaaaatctggattacatcagcgcacacgagctcgttaacgatgagggcgtcactcttagtatggaggacgtctactacgccagcgcctctaatccagttatcaggcgcatcgaaatgatggccacggttaaagggctttcgctcgttgccgagcagcgcggcgactgcgcggtgtactgcacaatcaccaccccgtcgaaatatcacgccaccacctcggacggcagacctaatccgaaatggtcgggcgccaccgtgcgcgagagcagcgactatctggtcgatatgttcgccagcgtgcgcaagagcctgcatcgcaaggggttgcgctggtatggcgtgcgcgtcgccgaaccgcaccacgacggtaccgtgcactggcacctggtcatatttatgcgcaagcgcgaccgccggcgcattacggccgagctgcggaaatttgcgatcagggaggaccgcgccgagctcggaaataatacaaaaccccgctttgactgcggcctcattgaccctcgcaagggctcgccggtgagttatatcgccgcatatataggcaaaaatctggatgatgggccgctgcgcgggaaaaaagacgccagcggcaagcccatgaaaagcgacgaggccgaccggccgatcgcggacaccgtcgagaatgccgtcgcctggtcgtcattgcaccgcgtgcgacaattccaatttttcggcatcccgagccggcaggcgtaccgtgagctcaggctgctagccactcaattgcagcgcaccctcaaacccaaacgaggcgcgccactgctggctaaccctgagcttgacgccgtacttgctgcggccgacatcggctgcatcgccacgtacattacaaaacagggcggcgtgatgacgccccgggatcgtcatttggtgcgtactgcctacaccctcgccgaccagctcaacgactacggcgagcagggcgtacggatttttggtgtctggtcgccgaaatatggccgcgactcacgtatttgcacgcacgcagataactggcgcctgcagcggaaaaaagcgcagccggccgatgccggcagcggtccgggttttgacgttgacccttcccggggcggtccttccgccccttggacccgtggcaataactgtccctctggcgaaaaaataatcacgaaaaatgcggaattcgaaccgataaccgacgaacaaatccgcaatccggcacttttgacgcggccgcaacggtacgcattacggcgacggttgcgtgccgatatgggaaaaccacgtaaaccaccgcaacgggtgccaccgccattcccggaaagcgctgattttgtccgtgatgcgctcggtgcgatgggtgtcacgatcgatgatagccaaattgccgctattttgcgcggcgcggcgctcaggctggacagtgacgtcgtgcagctgcgctgcggtgcgctcgatgttcgaccagagcgacagtattgtcgtacctgctgtcgggaaattaacgcacaaaacccggttatatctaccggctgcgctgtttgtgaagacagcgcttag

SEQ ID NO: 178502 - DNA, 303 bp, Klebsiella oxytoca
atgaatgagacgctcagcactgtaatctcgctcgcgttggggtttgctctggccctattgctgattaacgcgctgtttcttgtatacgccgcggtgcggcttgcgtggtatcactatcggctcaacaagctgcggcgggctggctatatgctgtttatgcgccagccgtcactattcgaggttttgctcaggttccgcacttgggatatttaccgcctggtcgacttcccgccgcgttatgttgagttcgggcggcgctgtggcaaaaacgcagccgcggagcgctggcgcaatggccggtaa

SEQ ID NO: 178503 - DNA, 303 bp, Klebsiella oxytoca
atgagagtaaaagagttcggagcgccgacggcggagcaggtcgccatcgggcagaaacatttaaaacacattcgggagtcatttgattttctctcagacagattcacgcattacgtgatttattttaattcgctgtcgtcaaggtatcgcgggttaatttattttaccgccggtattaagcgcgatcggcattgcattaattttcgcgatctaacgagtgccgagcaggaagcggtaatgaaagcaatggacgaacttgtcagccttattaactcatttcgccatttagtcagtaaacattaa

SEQ ID NO: 178504 - DNA, 240 bp, Klebsiella oxytoca
atgaaaattatttatgctcagcagtttaataaagcgcttgaggactatcattttaatagtgagttttcaggcgataacacaatgccgtttaaagtcctgtctatggccgcgcatcatttatatggctggtttttctgtaccggagacacgcaagccgccgcggaaatggtgccgctacttaatcagctgcgccgcaatgaagtgccgcggccattcaatctcgagcaatgcgaggtttga

SEQ ID NO: 178505 - DNA, 276 bp, Klebsiella oxytoca
gtgaaccaagacgcattactcgttacaggactgcatccagtccatgcggtaaccatgagccagttcgctggccttatcggtaaacctgagagcgcaatccaggaaatggttaagcagcacaagctaccggtggttgagctgcgtgacccaaagaaacccaattcccgcgcggaaaaatgggtttatctgccggagtttaaccgcgcaatgcatgaggcttaccaaaaccgccccaaagagcaacgcgacgcatggctgctctggctgggtctctaa

SEQ ID NO: 178506 - DNA, 276 bp, Klebsiella oxytoca
atgaatcttggtaaaaaactgcgagccatccgaaaggctgaagggctgacccaggctaaattttgcgaaatcagtgggatagcattaggaacagtgaagaactatgaaggagggcatcaggatcccggcataacggtggtaatgcaggtcacaaacacaccacagtttgaaaaatacacactctggctaatgaccgataaaacggcgccagaggctgggcaagtcgagccggccattgtgcacactggtcaaaacgcaacagaatcagcccgttaa

SEQ ID NO: 178507 - DNA, 975 bp, Klebsiella oxytoca
atgagcattaagaaactcgacgacggacgctatgaactggatatgagaccgcggggcagtaacggaacgagactgcgccggatatttgacaggaaagccgatgcggtggcgtttgagcgttatacgctcgcaaactcattcggcaaagaagggacgggaaaacaggaccggcgagcgcttagtgagctgctcggcgactggtggttataccacggacagaatcacaaaaacggtgagacggaacgccggcagctgcggaaaaccattgcaggcatcggggatattccagccaacaaactgactaagcgcatgttaatggagtatcgcagcaagcgcttggccgatgggattagcgcagcgacgatcaatcgcgatgtttatcggctgtccggcatgtttagcatgctgatacggctcgaagagtaccggggcgataacccggctcacggtttaccgccattgattgaaaaaaatcccgggatgacgtttctcgacaacaacgagatcgcggccctgctcagtacgctaaccggcgattatcgactcattgccctggtatgcctgagcactggcggcaggtggggcgaggtcagcacgctgcggccggcgcaaatggtcaacggccggatcacgtttcttgaaacaaagaattacaagccgcgagttatcccgatatccgatgcgctcgaggatgaggtcagaacaaaggcaaccggtaagctgtttaaagtcgactatgagcgattttgtaaactgctgcggcaggtcaagcccgacctacctcgaggacaagccactcacgtgctgcggcatacctttgccagtcatttcatgatgcgtggggggaatattattgcactgcagaagattctcgggcatgccagcattcagcagacaatgtcctacgcgcatcttgcgccggattacctgcagcatgctgttttactcaacccattaggcgggggtatcggctaa

SEQ ID NO: 178508 - DNA, 1005 bp, Klebsiella oxytoca
atgagcaaaataatgatgtctgaagagatgaaaagcgccccggccgcgccgtcgccgctgcgccgcttgctgtgctgggaagggtttctgctggcggtaaccctggcggtattcgtggttaacgccctggcgtcaccctacttccttaatatctggaacctgtcggacgccacgtttaactttaccgaaaaagcgatcatcgtgctgccgatggcgatgctgattatcgccagagagatcgacctttcggtagcctcgacgatggcgctgagctcaacggcgatgggcttctgcgcggcggcgggtatggatacgccgctgctggtggccgtcgggctgggcgtggggctgttgtgcggcctgttcaacggtatcctggtgacgcgctttaacctgtcgtcgattgtgatcaccatcggcaccatgagcctgtatcgcggaatagcctacattctgctgggcgacaaggcgctcaatcactacccggacagcttcgcctggttcggccagggctacgtgtggggggcgctctcttttgagttcgcgctgtttatcctcctcgccgccgcctttaccttcctgctgcataaaaccaactttggccgccggacctacgccatcggcaataacccgaccggagcctggttctccggaatcaacgtcaagcgccacaatctggtgctgttcgcgctggtcgggctgatggccgggctggcggcggtcctgctgacctcgaggctcggcagcacccgcccgacgctggcgatgggctgggagctggcggtcgtcacgatggcggtgctcggcggcgtcaatattctcggcggctccggcagcatggtgggggtgattatcgccgccttcctgatggggctggtgacgtttggcctgagcctgctcaacgtgccggggatcgtgatgtcgatcatcatcggcgcgatgctgatcgtggtgatctcgctgccgattattacccggcggatgatgcagcgaagacgaatttaa

SEQ ID NO: 178509 - DNA, 1689 bp, Klebsiella oxytoca
atgtccctgtcatttaatattaaacaaggtcagcgcattgatttgtggctgaaagcgtccgaaccggcggcgcaacccctgttttctattcgcgtgaacggtcaggttgtatttaagattcaggaggcgccgcgctacttccagtattttacctggacctcgtttcaggacggcgttgccaccctggagtggctgccggaatatagcgagatatcgctttgttacacctggcatccggattcactgcgcgcgcgcggcgttacctttatcgcgacagccgggcaggatttgcgcctgatgagcggtcaggatattgctgacgagtatctgcgggagccgctgcgtccggcattgcatttctcgccccgtaccggctggatgaacgaccctaacgggctgcactacaagaacggcgagtggcatttgttttaccagtatcatccgcactccagccaatggggccccatgcactggaatcatgcggtgagccgcgatctgtatcactggcggcattatccggttttcctccagccagagcagaatctttcggcgctgggcgcgacgggcggcgcgttttccggcagcgcgtatattgataaacaaggaaaaacccgcttctggtataccgaacggctcccggcttacgatctgtatcgcggttaccgggaagtgcagaaaatggccgttgcgcacgacgactacgataagccggaatgggtaaaaaccgtcttaaccgacctgcctgcgggcgtggactgcgatttccgcgatccaaaagtgtggtacgaagaggccgatgccactttttatatgatcctcggcgcgtcggtaaacggcgatccggcgatgctgctctttcactctgcggatagtgaacgctggacgttccatcatgtgctgtatgtcgctcccggctattttcgcgaaaacggcggtcgctgcgtcgaatgcccggatttcttctgcctggatggcgtatgggtattaattatcggcgtcgttggctacacggagccgacaaccgggcggcataatttgctttttgcccagaccggtactttccggaacggctatttcacgccgtccgagcagccgctacagactttagatttcggtacggatttctacgccctgcaaacctggggcgaggacgaccgaagaatcggctttgcctggttatataactgggcgacgcagaaaccggtggattccgcttactcgggggaaatgtcgctcccgcgtcgctttcatctcaatacgcagcagcggctatgcatgatgccggagctgccgccggaatcattggtcgtcagccgccatgcgctggatgacggtgatatctgggttaatgagaaaggctgtaaagccggcattgtaacctttatgcctgccggtggtttccgtttgacgttaacgggcgataacggccagcaaatcatcctcgaacaggagggtaaaaatctgacgctatatgaaaaaggccgggacgatgggcgttaccgcgcgccggtggccggcgtcagcgacgtcaccctgtgttttgatgccgggattgttgaggtcttcgcaaatcagggcagcgtatgcggtacgcgacgctattactcatgcagtcagctcacccggatccagctctccggcgcgccggcacagcttacgcaatatcgctcgacgtattcgcaggaataa

SEQ ID NO: 178510 - DNA, 1011 bp, Klebsiella oxytoca
atggcatccattaaagacgtagcgaaaagagctggggtctcgacggcgaccgtgtcgcgagtgctcaacaatcatcccagcgtcgtgccggaaacgcggcaggcggtgcgtgatgcgatggattatctctgctatgtccccagcaagagttcgtttcagcttagcgggaaatgttcagggctgattggtgtggttttgcctaatctggtgaatcctcacttctgcgaactgttggcgacggtggaagaagaggcccggtatatcggcaaatcggtgatcgttaaaacgcatcagaatcagccgcagcaggataaacatattattcagaccttagtggggatgggcattgacagcttgctatgggtgccgacagaggctgaagctgaactttcagaatggttaagcattacccggatcccggtcgccgttgtcacccaggtgtcccggttcttcaattccgtatcgattaaccaggatcggggggcggaaagtattgcggaacattttattcatacgggccatctttcatttggctttgttgcccaggaaggggtggatagccgcaaggtctcgtcgtacagcaaaaaaatagcgagtcacggtttaaagcttgctagagataattcgttctggatagccaaaggcgagggtgaaaagatatcaggccatattagtattcttgatgacattatcgagaaactcagcgagccgacgcgaacctgtacatgtctgttagtgtataacgatattgcggcaaactatattatcgatgggctaaaagaaaagggcatctccgtacctgaagatattgcaattgccagctttgataataccctgctggcgcaaactaaaaaaatcaccagcgttgcacagccggtaaatgaaattgctcacctcgcgtttcagatggtgaaacatcaacagcagccggacagtattgaaatgcacgaaattgtctcgcggttaattattcgtgagagcagcgtaaaaattaatattacttccctgtaa

SEQ ID NO: 178511 - DNA, 582 bp, Klebsiella oxytoca
atgagttctattttagatgtggccgtaatgtccccgaatcgctatttctgtctggggctaagtagcctgcaagaacaaaagtcactgaccgccattcggctgcacttttgtcatgatctgaaaagcttaaaaacgctaatggagagcattgcgctctccggcgtgctaatggaaacgtttggtgaaggagaaaacatctacgatgcgtttgtttttggcgattatctaaaaaggcaggccagagacatcgccgtgtttgttttccgctcattctggagcagcctttccgatttgccgcactatgcgcgctatcatgtttcctcaactgaagatgaaatatggcaatattttacactgatactgaagggctaccattgtaataattatatctcccgctgggaggccctgctgacccataaagagtatcaagttatcaggatgctgtgctgcggaaagcagtatcatcacatagggaaatcactgggtattacgattaaaaccgtgagcacgcataaaatcaaagcgctgaaaaaactcggcgcgcccagcatgtcatctttaattctacaatttaaacgctaa

SEQ ID NO: 178512 - DNA, 273 bp, Klebsiella oxytoca
atgaatgcgaaagcgatgggttgtatggctgtctgtttcctgctgacgggctgcggcagcgtcatgggaagaacctctttggcggagggcgaaacgtggtatccaggggttaaaacggatatcgcggtgatccgcggtgacagcgagtatgattataattatcttcagggaacattatggaccctggatacgccgctgtcgtttattggtgatacgctgatgctgccgattgattattttcacggcccgtggtcaattcactccggaaaataa

SEQ ID NO: 178513 - DNA, 858 bp, Klebsiella oxytoca
atggctaaggtggttttgtttccggagatctcttcttcgctggaatggttaaaagggcatggtgatacaattcttcagtatggctggaacgtgattgccgcttgtattctcttttttatcggccgggttgtctcaaccttattatctaaaggtatcgagaaaatacttctgcggcgcagggtagatattacggttgtccatttctttgccgccctggtgcgctatatcacgctggcgtttgcggccatcgccgcgcttggccgtttaggtatagaaacgtcctcaattattgcggtcatcggcgcggcggggctggcggtggggcttgcgctgcagggatcgctatcaaactttgccgctggcgtactgttagtcacgctacgtcctttccgggccggaaacctggtgcagatcggcgccattaccggagtggtggaaaccgtacatatattttccaccaccttactcaccgcggataataaagacgtggtgatcccgaacggcaaaattatcgccgacagtatcgttaactattcgcgccatcccttccggcgtatcgatttgatgattagcgtcggctacgatagccgaattgcggaagtgaagcgcgttattctggcggtcatcgatgctgacaaacgcatcgatcggcagcgtgataccaccgttcgtctggccgaacttggcgcctcgtcacttaattttaccgtgcgcgtgtgggtgaaaaacacccactactgggatacctattacgatctgctggagaatattaaagaggcgctggacgaacatcatattgcgattccttatccgcagatggatattcgcgtggccggcacggtaccgacgttatcctga

SEQ ID NO: 178514 - DNA, 291 bp, Klebsiella oxytoca
atggacgcacgtaaatgcactgccgcagcggctttacttctcgcctgcacttcttctttttgctacgccggccataccggaaaagtccgcttcattggtacggttgtggagtcgggatgctggaacaagcccggccaaaatgaattattctgttatcgcgataagaccgtttctcattattccgcggcgcacgtcagcagcgtttcgctggatgtcagtaatgccgtggtgcaaaaaacatttcttgataaacaaaagcagctggaacagttaacgattaattactattaa

SEQ ID NO: 178515 - DNA, 1725 bp, Klebsiella oxytoca
atgcacgcagaactcaggggagcgccggaaacggcggcctcccgctggctccttatgatgctggcgctgatcctgcttggcgtcatgcatattgtcctgcccagcaccggcggcagcggcgccgatttaccggaaccgctgctggtctggggcgtgctgctggtcacgatggtcggctgcgcctggtttttgcggcatcagaggctgcgcagcagcccgttcctgcgcggcatggcgctggcggcgttactgctgacgctgcccctgctctggagcccctccgtcgactggcggctggacgccttcccgcgcctggcgggcctgtgggcgggcgtggcgttttattatctgctgctgaactgtcggctcacgccgcgtcagcagcagaccgtactgtggctgatcgtcgccgccactctgattcaggcggtttatgcgctggtggggatcggccatccggcgtggctgccgctgccggcgcaggcggcacagcgccagtccggtcagttcgcgatcggcgtttttctgcaacgcaacgtcaccggctcctttcttgccaccggcgccgcggtgctgctgtggttgaccgccgacggccgctttgtctgccgcagcgtcacgagggagagatatcgtcagtgggcaagcgcgctcgggctcgggttgctttacgctacgctgactctgctgaagtcccgcaccgggtggctgggcggtatcgtctgctggctgatgatggtggcgattttttgtttctcgccgttacgccgctccgccgcgcgcggggcccgctggcgtgtcgtactggcgccggtggccggcgtgctgctggggcttgccttgctatcggtctcgttactcaacgccctgcatgaacatgacggctcgaatcttgagcgggtttttattctgcagcagacctggaacatgatactgcagcatccgatcgtcggctggggctacgggggatacgcctggtcctttgcccatttcgtggccgatagcgtcccgccgttgtcccgtcgggtcccggggttaacctatccgcataatgacctgctgttctggtgggtcgagggcggagcggtcgccctgctcgggctgctggtgctgggcgttagcggattctggctactgctgcgccgccccggcgtacggcagctggcgctgctggcttgcctgatgcccattttgctgcacacgcagctggagtatccgctgtatcaatcgccggtacactggttgttcgttcttatcctggttaacctggccgatcgctgtccgtccggcgaacaggcgccgctgcccgcattcaccgcgccctccacgcggccggtaccctgcgcgctgatgatcctggcctgctacggcgcgctgctcaccggttgcgccttctggcaggggcactacctgaccgcttttcagcagtcgccgcagcgttttgccagccgcgtactgcggctgcatgacatcggcatcggtagcgaaaggctgcgtaaagatcgggcgctcagctatatcattcgctatcagtcgagcgctaacgtcgaggacctggaggctttcaaccagatcggcaggcgctggattgcggtgtggaacgacgccgatatgtacaacaatcttattaacgtcgagcggtatcttgggcaacagaaaaacgcccgggctttgcgcgaggaggcccggcggctctatcctgaggaccggcgtttttcatcgtag

SEQ ID NO: 178516 - DNA, 696 bp, Klebsiella oxytoca
atgttgagaaaaatcgctgtactgctggcgctcagcgccttatcccttcaggcgcaggcgggcgtggtcatcgggggaacccgctttatttataatgagggtaagccatcgatatcgttccgggtgatcaatcaatcgccctcgcgctacttgattctgagcaaaatcgtcgccgatggtgacccgcacgcggcggtgccttttgtggcgacgcccccggtctttgcgctaaacggccacaaagaaaatgaaattcgcgtgatgtacaccagcggccagctgccggcggaccgcgaaagtctgttttgggtcacggtggccaatatccctcaggccgacagtcagcagcagaataccctgcagattgcggtgcgcagccgcatgaagctgttctatcgcccgaaaggcgtacaaggggattcacagcaggcttatcgccagctgacctggcggcgccagggtaaaacggtaacggtgcagaatccgacgccgttttacgtcacgctgctgaatatgcaggccaacggccagagtatcgccggggccgggatggtcgcgccgctttccagccgctcggtggcgtggtgtccggcgcagggcggctgcgcgctgcagtggcagacccttaacgactatggtcgggccatgccggccatgcgtatttcgcccgatgcgcaggccaggaaggggcaataa

SEQ ID NO: 178517 - DNA, 516 bp, Klebsiella oxytoca
atgaaaaagacgatcctgctgttatcgctatccggcttgtcctgctcagcgctggcccacgacggcaccgtaaacattaccggcacgatccagggaaacacctgcaccgtgaccaccgataccgcgaaccagcaggtgaccctgggcgacattgcggcgaaacagtttaccgcggccggcagcgcctcccagccgatagcgttcaccatcgggctggaaaactgcggcagcgcggcgtcggcggtctcattaacctttaccggcgaggcggatacgaccaacagcgccctgctggcgttaaccagccaggcgggcagcgccgcgggcgtcggggtggcgatcttagacagccagcgtacgctggtgccgctgaacagcgccagcaggcaatatacgctcgacccgcagcaaaccagccagaacctcaccttttacggtgagatggtagcgacgagcagcccggttaccgccggcagcgttgacgccacgaccacctttagcctgacctatcagtag

SEQ ID NO: 178518 - DNA, 543 bp, Klebsiella oxytoca
atgaaagcggcaaaaacactctttcccctgttgctggcgctcgcgggcgttcatagcgctatcgccgatgatattaatactggccaggttgagctggatatgaccggtacaatcgtcgcggaaagctgcgatatcgacaccgccagccagaaccagactatccatatcggcgatttcagcgccgggatatttcaaagcgtcggcgatacctcggagtggaagcagtttgatatcaaattaaataactgcacctcggcgatcagccagtcgacggtggcctttagcggcacgtcggacggcagcgacccatcgctgttagccctctccgatacctccggcggcggcggaatggccagcggcgtggcgattgagctgctggacagcagtatgaacgcgattgcgattaacagtaccgataacgggtacccgattacccagggcaataacgatctgacgtttcgcctgcgctataaagctaccgcggtgccggttacgcccggcaacgcctcttcggtactctattttgatgtgagctatcaataa

SEQ ID NO: 178519 - DNA, 612 bp, Klebsiella oxytoca
atgccgtgtaacgaggttagatcagatttcaacaccggtgataatattagagttacgttcagaatagatcggaaatttgttggggtgatgagttttccccatgtaaaaatatttgatttatggtacaccgtcggcagtgattttataaaaggtgcacccgtagcctcagcctatattgatggtcaaatatcggtgccccaaacctgctccgttaacgccgggcaaatcgtgaccgtcgattttggctcctttatgtcgggcgaatttaaaaataagggccagatgcccgccggctacacgccaaaaacgatttcggtaccgattaaatgtaacggcatagaggctaatgctaatttgacggtccgcttccaggcggatgcttcggcggatgaaccggcggcgattaaaaccagcaacagcgatgtcggggtgcagatcaccgatagcagcggcaaggtgattgagccgaacagcggtctgatcccgttccagctggacgacaacctgcaggcgacggtgactttccacgccgcgccgattagcaccaccggaaacgccccggcagaggggaccttttcggcgacggcctatattcgcgttgacttcgcctga

SEQ ID NO: 178520 - DNA, 2631 bp, Klebsiella oxytoca
atgacgttaaaaataaaatatatcaccctcgcggtgatgcaggttctatttgcccggcgtcgggtataccgtattattttgccggcaaccttatcggcattaccgttatccgcgctggcggataactattttaaccccgcattcttatcggacgaccctaacgcggtggccgatctttcgcattttgaaaagggcgatagccaggccccgggtaaatatcacgttgatatttatctgaataagcagctggtctccacggaagacgtaaactttaaagcggcaaaaggcggccaggatgataccgggctggcgccgtgctttaccaccgcgcgtctggaacagatgggggtcaataccaaagccttcccgggcctggcgaagctggcgccggagcagtgcgtgccctttgccgccataccggaatcctccaccgagttcgactttgagcatcagcagctgaacatcagcgtgccgcaggcggcgctgaagcagagcgcgcgcgggtatatccccccggaagagtgggaccaggggatcaacgcgctgctgctgaactatgacttcaccggcggcaacagcgggggtgataccaaagaagacagctactatctcaacctgcaaagcggcctgaacctcggcgcctggcgcctgcgcgactactccacctggaactacaccagcggcgagggtgaaacggagaataagtgggagcatatcagcacctacgtcgagcgtacgattgcgccgctgaaggcggagcttacgctcggggaaagctacaccccgtcggacgttttcgacagcctcggctttcgcggcgtccagattgcctccgacgacaacatgctgccggacagcctgaagggctttgcgccgacggtccgcggtatcgcgaagagcaacgccagggtcaccatcaagcagaacggctacgttatctaccagacctacgtctcgccgggcgcctttgccatcaacgatctctacccgacctcgtcgagcggcgacctgcaggtgacggtaaaagagagcgacggtagcgaaaatacctttaccgtgccgtactccgcggtgccgctgctgcagcgcgaagggcggcttaaatacgccctgaccgccggtaaataccgcagcaccaacgatgatcaggatgaggtcaattttgcccagggaacggcaatctacggcttgccgcatggcttcacgctgtacggcggttcgcaggtcagcaacgactaccacgccttcgcgcttggcgccgggctgaacatgggggatttcggcgcgatctccgccgatatcacccaggccaacagcaccctcgccgacggtagccagcacgacggccagtcggtgcgcttcctctacgccaaggcgctgaacaatctcggcaccaacttccagctgctgggctaccgctactcgacggaggggttctacaccctcgacgagacgacgtataaaagcatgagcggctataccggcgacaatgagtggaaagatgaggatcacgacggtaagcaggataagccggtgtggaccgattactacgatctctactacaccaaaaaaggcaaagcgcagcttaatatttcgcagcaggtcggcaaaatcggctcgatttttgtcaccggctccgaacagacctactggcacaccgatgagaaagatcgcatgttgcaggtgggttataacggcagctggaacggcatctcctatagcctgacgtggaactatgacaagtcgccgggggaagatgaggcggaccagatctacgcctttaatatttcgctgccgattggccagtggctctccagcaaccatagcgcggatatctaccgttcggccaacaccaccaatatgagctttggcaccaccaccgatcagcacggtaagaccaccgggaccaccggcatcaacggtacgctgctggcggataacaacctgagctataacgtgcaggagagcgacggcaaccacggcaccagcaacagcggcaacgccaacatgagctatcagggcacctacggtaacctgcaggccggctacaactacagcgacggctatcaccaggtgaactacggggtcagcggcggcgtggtggttcaccgcaacggcgttacccttagccagccgctcggcgacaccaacattctggtgaaagcgccgggggcggccggggtcgagctggaaaacgccaccggggtgaaaaccgactggcgcggctacgcggtgatcccgtacgccaccacctatcgccagaaccgcgtggcgctgaataccaactccatgggacagaacgtcgatattgaagacgcggtcaccaacgtggtgccgacccagggggcgctggtgcgcgccgaatttaacgcccacgtcggggtgcgcgcgctgatgaccctgatgcataacggcaagccggtgccgttcggcgccacggtcagccagaaggcgggcaacagcaccatcgtcggcgacgacggtcaggcctacctcgccgggctgccgctgaacggcatgctggaagtgcagtggggcgagagcgccggacagcactgcgtggtgaaatatcaacttccggagagcgcgaagcagcagccggtgaataaattaagtgaaaggtgtcagtaa

SEQ ID NO: 178521 - DNA, 738 bp, Klebsiella oxytoca
atgtccgttatttctttttcccgcctgtctctggttgcgctggcgttagccggtgccggtctggccgcgcccgcggcgcaggcgcaaaccgaaacccaggcgcacgccgcggcgaacggcggggtatcattaggttccacccgcgtcatctatccgcagggcaataatcaggtctcactggcggtgaataataccgacccgaaggccacctttttaattcagtcatgggtggaaaacgccagcgaaagcaaaagcagcgattttgtcatcaccccgccgctgtttgtgatgaagccgcagaaagaaaatacgctgcgcattatgtacgtcgggccgaataatctgccggcggatcgcgaaagcctctactgggtgaacgttaaagcgattccctcggcggcaaaagacaccaaagggaaaaataccctgcagattgcggtgctgagccggattaaactttttgtccgcccgaaaaatctgccgatggcctcgattgatgcgccggcgaagctgcgcttccacgaaagcggtaataccctgacggtgaaaaaccccacgccctattatatgacgctggtacagatacacgccggtaccgcaacgttaccgacgacaatggtggcgccgatgtcgcaggcggatttaaaactgccggcgaacgcgcagggaaatatcaccttccagaccattaatgattacggggcaaactcgcccgaacagaaagccataatagaataa

SEQ ID NO: 178522 - DNA, 558 bp, Klebsiella oxytoca
atgaatttcactacacaacggctgaaggcgttttccctcgcgggggcgtttttgtttcccgctctggcacaggcgggcaaccaccacgtggtaacggtaaagggcggcgacgttgagtttcagggcgccgtggtcaatgccgcctgcgcggtggatgccggtagcgaggatttaaccgttgagatggggcaggtgcgctccaatgaatttcatgggctgggaagctggacagatccgcaggcgtttaccattacgctgaaggattgcgataccacggtgagccagcaagttagcgtggcctttcgcggcctgacggatggcaaagatccgggggtactggcggtgaccgacggtgcgcagagcgcgcagggcgtcgggttaggcatttttgataatcagggaaatcaaattatcccgaacacgcagccgatgaattttaccgctattcaggacaatacgaccgtactcaattttgtcgccaaatatcgcgcgacctcgagaaccgtcgtggcaggggatgcaaacgcacaaacctggttcacgttaacctatttgtaa

SEQ ID NO: 178523 - DNA, 567 bp, Klebsiella oxytoca
atgaaaaaagcatttatggtaaaaagcgtcgttctggcaatggttatggctggcggtatttcttctgcgatggctgctttaccgaccagcgggtcttcttccaccgttcagggcggcaccgttgagtttaaaggctctgttgtcgatgcagcctgtgcggtaaccgcagacaccagcaaccagattgtgaacatgggtcaggttcgtctggctgccctcaccggtaaagactccgttgctaaccagaaaaccccgttcagcatcaagctggctgactgcgataccaccgtcgcttctcaggcatctgtgaccttcgacggcaacgcggcggcgggcgaagctggcgtgctggacaacacctctggcgcgggtagcgcggcaggcgtcggcatccagatttatgacaaagacggctctgcgctggatctgggtaccgcgtctcaggcagttacgctgatcgacggcgacaacactctgaacttctccgctgactactaccagactgcggataccgcgactgccggtagcgtggacactactgccacgttcaacgtgacttaccagtaa

SEQ ID NO: 178524 - DNA, 696 bp, Klebsiella oxytoca
atgtttattattgatgaagattttgaccgtggtgccttacgctcctttgcgtttggccgtaatacccggcctttgttggcgatccagcgtattatgcaggcgctgctgccggttagcacgccgtttgagctgcagcctgacgagcgatttgaattttgcgatactgaaaataacgcgaatatattactcctgcttgaggggaccggcgtggtttgccatagtgaaaataatatggcgataaccacgctattttccccctcggtactggggctgattgatggatatagtaccttttacgacgtagaggccaggccgaagcactttttctctgcggaaacatcttgctctggtcaattggttccgcttgctaagtttgtggagattatggacgagcaaaatctctggcatgatatcgcccggattctggcccatcggttattggtaatggccatccgcgagaaggagtttattggcgtggaatcattcatcatgatccggacgttgatcctggaactcggctcctatcctgaggaatatcgcgagcagattaacgtgctcaattttatccagcggcgcaccaatctttcccgcagcggaatactgtacgtcctgtctgaactgcgcaagggggagtacatcagcgtccatcgaggcgtgctgaagggaattaataaacgaattcctatcgatttttaa

SEQ ID NO: 178525 - DNA, 1260 bp, Klebsiella oxytoca
atgtataactcactactgcctgtttcttcacggcacgctttatttttctgtttatttctttcaacattcgagctgttaacttatgtcgccagcgatgtagtaatgccgggaatgctaacggttattaaagatttaaatgctcaaccgcattacgtaccgtggtcacttaatgcctatttacttggcggcgtcagctttcagtggcttattggaccggcgtcggatagatttggccgcaggcctttattactcatcggctgtgcgcttttttctgtttcctgcctggccacgccatgggtagacaatatccaggtttttactctcctgcggtttattcagggaataggtttggggtttgtggtggtggtgagctatccggccctgcaggaagcattcaacgaatcggatgcgatccgcttaattgccctgtttgccaatatcgcgctgctgtcgccgctgtttggccctttggtcggtagcgttgtgcttgcatacctgtcatggcgcacgctttttattgctatcgcgctgatggcggcgctcacctggttcggtttgctacgctggatgccggagacgatcggcgtcgtacgccaggatggcagtaaaattgaatgtcagccgctcgaggtaaaaaccctcgcgcgcgcttatggcgatttgcttacgaacccacgctgtatatccggcagcgttgcgcttggcctcgtcgggctgccgctgatggcgtggatcgcgctctccccgctgctgctggtgcatcatctaaaaatgagcatgctggagtacgcgctatggcaattacctatttttggtgcgttgattgcggggaatatcgtccttaacgttaccgctgaaaaatttaagccggagcagttattatacttttcactctctcccgtatttatcggcattatgctggcgctggtcatgacgctaatatggcaaaatattattgcgctgattatcggcatggctatttatgcttttggcctgggcatttgcaacgccactctgtatcgcctcacgctattttcaagcgagcatggaaaaggttcagtatcggcaatgataggcatgatttccgtcgctatttttagcctcgggggggcgttaatggccggattgggcgccggcgacagtctcagcgcatatattatcgcggccactattccgatgctggcagcattattcattatcgttaatatattcacccggcagaagaggagtaaaactaaaataacagcttcaggccattaa

SEQ ID NO: 178526 - DNA, 1128 bp, Klebsiella oxytoca
atggacactttatcctgcgtcgatgccctctgcgcactcgacagcccttatcatgaagatagcgattcacaacggctctttgatgaagccatgcgtgaaatcgttgcatttcatgttatgaatacgccgggctaccgccagtggctggcccgccacaatattccggcagatgcggccaatatagactcgtggtcgcagctgccgccgatctttgccgactatttcaaacagaatctgccgatcggccgctccggtgaggatgcgcttgaactcacctcttccggtaccagcgggcagaaaagtcgaatgcgctatgatgcgcgcagtatcggagccgcccagggaatggtcgatcgcattttccgccattatggctgggaaacgcccgatgcgccctgcaactacctgctcctcagctacgaacccgccgatatcatcacgcttggcacctcttttaccgaccagttcttgtgtaaatacgcgccggtcaaacgcgccgtttacgcgctgcgtcacaccgggagcgggcatgagttcgaccctttcggcgtgattcgcgctttacaggagtttgctgaagaggggttaccggtacgaatcctgggtttcccggcatttatgtggttcatacttgaacggatgcgagaaatgcagctaccgccgctccagcttcatcatcaatcgctggcctttttcggcggcggctggaaaacgcatgccgaccgtgaaatccctaaatccgcgttctatgcgcggctgacccaacagctcgggatccccgatagccgatgccgcgacggctatggttccgtggagcactgcgtgccctacattgaatgcgcgcatcaccatttccatattcccgtttattcccgcgcctggatccgcgataccgcctctctggcggtgaaagattatgggcagcgcggttttatacagtttgtgtcgccttatatcacctcctgccctgcgcacagcgtggtcatgagcgatcttgcacaattgcaccgcgccgaagagtgcggatgcggtgtgacaaccgattggtttgagctgctgggccgggccagccatagcaaagcacgtagctgcgcactggcggcgtcagaactgattaagggaaattaa

SEQ ID NO: 178527 - DNA, 2412 bp, Klebsiella oxytoca
atgtatttcattcagggaaaaaactattcctcgctcacgccagaagaggccatcgccatgttgacgagcgggctggatagcgcgctgggccaaccgccgcgtccggaaaccgtgcttgcctgcgccgggcgttttatcgaacagctaaaagaccacgctttccttccccaactgggcccggcttatcgggaagaggtgagaaagttttgccaacctgacgcgctgcgccaaaagctcgagcatgagctgggggataaccccttttccgtgcgccgcattaactaccgtgaaccgcagtttgaaggctggcgtcctttgggcgtcgtggtgcatgtcaccccagccaatgcggaactgcttcccttcttcgcaataatagagagcctgctggtcgggaatattaactggctgcgcccaagcgccagcgaacaaggaatgaccatcgatctgctacgggcgtttatccactgcgatttaacggaccagctggctaacttcgtcgccgtggttcccgtcgaaaccacgcgcctttccctactgcttacccacgccgatggtatatcggcctggggtggcgataccgccctcgaggcgattcgtcaacagctccctggcgggtgtcgctggatcccatggggacataaaatcagctttgcctggctacaaccggatgccgttaatgaagaaagccttctcgcgctggcggatgacgtttgctgttttgaccagcaggcctgttccagcccgcaaatcgtttttgttgatagcgatgattcggcggtattgcaggatattggcgaaagactggcggaggccatgcggcgccgtcacgcacggtggcaaccgttaatgcccgatgaaaaggcggcggcggatatcacccgcgccgtcgccttcgcgcagctggacgccgtatttgccggggctgacaacgctctgctggcaggagatggctggcgcatcattcagcaacacacctcggccataacgccttcaccgctgttccgaaccgtcctgctgcggccgctaccgcaaaataaagtgatgcaaacgctgcgcccctggcgaacccacctgcaaacctgcgggctggttgtcgccgatcgggacagaatccccctcagccaactgctgctggcagccggcgtcaatcgaattacccccgtcggtaaaatgcatgacggctatcacggcgaaccgcatgacggcgtttacgccttaagccagctggctcgccgcgtcaccgtgacgctggatgccgatgtcctgccgcagcaggccacgctcgatccgaacccgccgccgccgccgatgctgacggcgcagcagccgattatggataaaacggcattcttacagcacgcgatgcggcccagcgcccagcttttctttcgcagcggcggcagcagcggcgtgcctaaactcgccgggtttacctatcgcgactatcgccgccagatgcaggccgccgccgcaggcatgttcgccgccgggctagatcccgcccacgacaaagtgctcaatctgatgtacgcgggcaatctctacggtggtttactcagctttttcaccctactggaaatgcttgaagtgacccatcttcccatgggcggcccccatgatgatgactatcacgagatcgcccggaccattgtgaatcagggcgttaccacgctcattggtatgccaagcacgctgtatcagctctttacgcgagaagaggccattctgcgcgactacggcggtattcagaaactgctgctgggcggcgaacatatgggcgtcgcccagcgtgactatattcacggtttcggggtgaaaaccattcgctcggcgctgtatggttcggttgatgccgggccgctgggacatgcctgtacgcattgcccggatggcgtgtttcacctgatgacggatattcaatggctggagattgtcgacccgctcgacgatcggcccgtcgcgcccggcgatgccggccgcctgctctttacctcgacggcccgcgaaggtcagaaggtgattcgttatgacatcggcgatatgggccgttggctgccgggcgaatgcccctgcggcgcccccagcccccgctttgagcttttaggccgccacggcagcctggtgcgtatcggcacgatgtttattcaaccccagcggctggcaacgctcgccgatgcccctgttcaattgattcttcaacataacccgcgcagcgggctcgaatgcatcaacatcttcaccgacggcaatattgatactgtcaaacagcgggtctgcaccgaccctgagctcaaaatggcattggacgcccatttgctggagttagccgtgaccagccgcccgttcagcgaatttgaacggcatccgcaaagcggcaagacgccgctggtcattgataaacgccgttga

SEQ ID NO: 178528 - DNA, 1335 bp, Klebsiella oxytoca
atgacaacagcaaagatgatgggtcactttgatccgcaatccacccaaacggaagaagtagccgtaagcccaccgggtctcgaacagcttgtcgagagggttcgctgccgctcgcctttctatgccgaacactatcgccatctcgccacccgcggctggcagttgaaggacctgccgcttattaatcccgaacgctactgggaggggagccagggcctgaaaaactggcccgtcctcaccgggccggtggaggacggtattgtctttaagaccggcggtaccaccggcggcggcaagctgtcggttttttcccgccaggagtggcgtgcgttcgtcaccagttttggccgcagcctctccagccagctcaagccaggcgcgcgcgtggcaaatttatttttcgccggtgatttgtacgcgagcttcttatttatccacggcgcgctttcgcacatgtcgataccggtatgcgagtaccctttcaccggatcgcttgaaccgcacaccctcaccgaacagatcgtccagcacgatatcaacgtactggtgggcgtcccggcgatgctgctgcaatatgcggcagagctcgctggaaaaaaccgccgtctgcccggtatcgaaaccatcctttacggcagcgagagtctttttactgaacagctacagctgctgaaatcagcctttcccaacgcccgtattgcttctatcggctgcgcctgcgtggacgccgggcttatcggactcagcacgccggattgcctggcggacgagcatcgggtctttgaacccgaaactatcgtggaaattattgatgaagcgacgggcgagccgatcgacgaaatcaatcgttccggaatgctggtggtcaccagccttacgcgcacgctgatgccgctgattcgctatccggtaggcgatttggccgcctggcgtgaacctccgggaagcaaacatcgcaagtttattttgcagggacgcagtagcctcgggcaccgcttgcgggtaggttacgcctcgctatttcctgatgaaatagcggcccttattacggaagagatggggcatcagcagtggcagctgatgctggagcacgccgataaccgggatcgtttgagcttacgtatcgccttttccggtacccggcagcaggccgacaggctctgcggtcaattactcgccagggatcacgctctcgcagaactacaggctgccggccagctgtgcgttcaggttcactggtgcagccaggcggaacttatccgcaatacccgaacaggtaagctgcagcgggtgatcgacaaacgcgcctacctcgcgcaggaggcggtgaaatga

SEQ ID NO: 178529 - DNA, 918 bp, Klebsiella oxytoca
atgattgaaatcagagcgttccagcgacaagacggcgaaggcatcagcgccttatttcgcacggtttatggcgatcgctatgtctatcctgatatctatatgcccagcctgattggctggcgcaacgcccgggacgaatggcacagcgcgatagccgaacagaatggcatcatcatcgggcatgccgccttatggcggcaccacgcggataagcagacggccgaactggccatgttcgcggtgcaccccgccttcagaaaccggggcgtagccacccaactgggggaatatttgcgtcttgccgcaagcaggcttggcctgggcacgctaaccatcaaaatggtatccagccatccacactcgcagcgcctggcgcagaggctgggcttttactcaacggggttgctcagagattacgtcccctccccctttcaatccggcctgcgtgaaagcattatcctcggcgtattacccttgcagccacgccccgtcccgctcaccgcggatgatagccgtgatgatggttggataaacttgctaaaggaaaaatttggcgcggcgcagatcccgcccgccagggaaacttgtgcagcccccgttgaaattgccctttgtgatgatcgggtggacgtcacgatgaatatatcaacgcaacagatggtcgacgagatttcccgactgccggcccgtaaactgatttatatccgggcgcgcgtggatggcgcgctgatgtcgctacgacccaggctgcggcgagcaggttttaccgatatggggctggagccagcggccggaggagagtggttctggctgctgcagcgcggctatcatccccggcagctcgacctctcctgccctatcgctattgccctgcagaaaacggccgatggcgatatcaatcataacgctcgctcctga

SEQ ID NO: 178530 - DNA, 270 bp, Klebsiella oxytoca
atgtttgaatctttgaaaacgctgtggaaaaaagagaatcaacccccgcaggattatgacgaacagtctcgccagctggcgggggaaattgccaggctggaaggcgagttacggggcaacccggctaatggcgaagtgcagaaagcattaatgctgatatataaccgggcgctgtcggtctatgccaaaagtcatacgcatcgcgaggaaatcgatgcgctttttatgcgcattgatgagttacgtaacattattcgccataatatatag

SEQ ID NO: 178531 - DNA, 2604 bp, Klebsiella oxytoca
atggcgctgtcggcaaaagaaaaattattccagaaaatagtcacccactatgcacggaaacccgcaggattcacggctcaggactgtgcggactttatgcaggttaaccgcagcgttatcagccattacctcaacaggctgtgcgatgacggttacctgcgtaaagaaaacacccgtccggtgcgcttctatgtgcagcaaaacggcggggaaaagactcagctatctcgcatagtgtcgaaaaagcacgacgcctttcagccgctgattggcgcacacgggagcctggccgacgccgtcgcgctgtgccgctcggcggtggactatcccggtgacggtttgcctgtcctgctctccggggagagcggcgtcggcaaaagccatctggcgacgctgatttatcagtacgccctcgagcgcggggttatcgcagcggacaaacccttcgttgagcttaactgcgccgattacgccaacaatccggagctgctttcagcaacccttttcggctatacccgcggcgctttcaccggcgctgaccgcgagaaacgcggcgcctttgatgacgccgatggcggatttctgtttctcgatgaagtgcatcgtctctcggcagagaaccaggaaaagctgtttctgtttatggataaagggtatttctaccgtcttggcgataaccgtacgcgccatccggcgtcgctgcgctttatcttcgccactacggaaaatatcgataccgtcctgcttaacaccttccgtcgccgcatcccggtgcgcgtcacgctgcccaactatatttcgcgcccgctgaccgagcgcgtcgctcaggtcagccactttttgcagcaggaagctcgcagcctgcgtcgggatatccatctcgataatcagctgatgcatcagctggtcacctccccggtgcgcggcaatattggcgagttaaaaaatcagattaaagtgatgtgcgccagcgcctggagcgagaatcgtgaggctgacgtcatcacgctacgcggccccgcgtccggcggcgaaataatccgtattgccgccagcgcgcatgaagatacgctgaatgtcagccagctgctgcccaaagcgatgcgcgatgaggtgatttttcgcgacttttgccacagcggtaacgtgctgttgctgaatcgcaaagtagaacagctgctgactaccgtcagcggcgcggtctccgccgagtcgctgtacagcggctatatctggcagaacaccgttcacgcgctggaggagctggagagcctgaccggcgtctcctgtcacccggagatccgcaaggcggtctggctctgcctgagctatgcgctgcatgctccggaggaagcgctcgacccaggcgaactgcaaaccatttccgattatgtttccgctaaggcacgactgctggccgaagagtgcctcgctttgctgagcaaacatgtcacccggcagccgctccccctgcttcagccgctgctaagctgcgcttttcacaccctcgctggcgaagacgatccgattcagggcattatcgtgtcccacggtcgcgccacggcgtcgagcatcgccgggatcgccaatcagctgaccggcggctactactttaaagccttcgacatggcgaacgcgacgtccaccagagagatcatcgacctgctgattgcccacgtttcccgccttaaacaaggcgcggggctgattattctggtggatatggggtcgctaaaagagatctacgaagagattaaactccacctgcacggcgaactgttggttatcaacaacgtcagtacggccatggcgctggatattgcggccaaaattcaggataagctgtcaatggaggcgattattgagagcgccaaaggcgcgtatgaggtggaaacgcgctactacgcgggcgtgttgccgggcaataaaatcattatctcctgtatctccggcgaagggatctcccgcaagctgaaggatatcgttcagcgcttcctggcacaggaggagatcgacattattacgatggagtatgacgacctgaagtggaaaatcgcccacgccgacccggcactgaacggcacgcggttgatcattaccaccaccgatctggaagccgggtatattccgctacttagcgtagagcagctgattaaagaaaagacgcgggtgttaaaacgcgactacttcaacgggctgctgatggaaggcggcctggagcccatgattgatgaagtggtcaagctgtttaccgtcgaaggcgtcgccagtcgccttaacttcctcaatccggtggtgattattgatgaagtcgaagcggtcattaagcagtatgaagccttctacaaaatccattttgaaagctatctgcgcatcaatctgtttatgcatatcgccttgatgatcgagcgggtaatggtcaacaacggcgtgcgccaccgggaagaggcggagctgacgctggcgcagcaggcgtttgtcgccgtccacgacacctttttccaggccctgaaccgcaaatacaatatcaccttgccgcttaccgaagtgctgatgatttatgaaatcatggagccgtggatcgcctttgaccccgaccattaa

SEQ ID NO: 178532 - DNA, 804 bp, Klebsiella oxytoca
atgttaacttccgcaattcttgttgctgtcattatgtttctggtgaaaaccgccgaccatacgctgggtcaaccgctgattgaacgcccgctcatctgcggcgccctggtggggctggcgctgggagacctgcaacagggcattattatcggcgccacgctggagctgattttccttggcaccatcaccatcggcggctcggttcctgccgaccttgcggtggggtcagtactggcaaccgcttttacgattctgacccacgctgagccgccggtggccgttgcgctggcgctgcctatcagcctgctggcggtctttgtttatcaggtgctgaagctggtctataccgctctggttgaaaaatacgatgcgctactggaacaggggcgtgaccgtgcggcgctgggtttgacgctcggtatgaccttcttttacggcatccccttcgccctgatcgccttttttggcgtgctcttcggcaccgaggtcatccgcagcctggtcgagagcattccgggtacggtcatgcgcggcatgacggcggttggcggcattcttccggcgcttgggttcgccattctgctgaaggcgctgtggaaccgtaacatcgccgccttcttctttatcggtttcgcgatggcggcctatctgcaattgccgattatggggattgcgattattgcagcctcggtagcggtctatctgtgctttaacgaattcaatcagcttaaagcgaataaacaaacggcaacggcggccgcgtccgcctcagttgacgataaggatgggttcttcaatgactga

SEQ ID NO: 178533 - DNA, 699 bp, Klebsiella oxytoca
atgaaaacattacgcacgctattgatcggcatcccgctgtcctgttttacgctaaatacgcttgccgcggcaacctgggttgataatcgctacgcgcatactacggcttctgagaaaaatcagtataaaataggtctgggtcatatatttgataatggcgccggtgttctggcctccgccatgtacgacctcggacaagattttaatcaaatgaaaagctcctttcaggagtttgaaggctggtatccgatcccgcttaatgaaaaatggacgctgacgccgggcggattaaccgatattgatagtaaaggaacgaagctggcgccttatatcagcctcgattataaaatcagtaaatctttaagttttagcagccgctaccgctataaccatatgacccataaagatcgcgattacaacggctatatggattacaacgacagccatcagttcgacctgtatcttaattaccaggcgactgagaaactgtggcttcagttcaacccggagttcttcgtcaacacaaacgacttcaatgcctctaacgggcagaaaactcactgggaaccaagcattgtggcgcgctaccgcgtcgataaacactggcttccctatgcggaagtggcctggctcgatcaggatcagaatcacgacgatcaggtgcgattccgcctcggcattcgctattacttcgattaa

SEQ ID NO: 178534 - DNA, 1512 bp, Klebsiella oxytoca
atgccgctgttctatcaaaaccccgtgattcatgccgattacgccgatcccgatgtcattcgcacaggcgatgatttctggatggtggcttccagtttccatcaattgcccggcttaccgcttcttcactctcgcgatctcatccactggcaaatcgttaaccatattgttaaacgcctgccttcgcctgaatacgacagcgttcagccgggaaaggggatttgggcgccctccattcgtttccatgggggcctgttctgggttttctacagtttgcccgacgagggtatttttgtttcccacgcccgggatccgcgaggcgagtggagcgaaccctattgcctgaacgcttcccccggctggatagacccttgtccgttctgggacgatgatggacgagcctggctgattcacgctttcgctttcagccgcagcggggtgaaaaacaagctgcagatttttgaaatggcgccggatgcatcccggctgttggataacggccggatcgttgttgacggaacgccctcgcatcccactctggaaggccccaaattatataagcgcaacggcgaatactggatattcgctccggccggaggcgtcaagcgaggctggcaaacggtcatgcgcgccccgacgctatctggtccatggcaaagtcgcgatgttctgcatcagggagattcaccgataaatggccctcatcagggggcgtgggttgaactggagaacggtgaaaactggtttttccactttcaggataaaggcgtgtacggccgcatagtgcatcttcagccgctaagctggcgggctgacggctggccgcaaattgggcaacgccttgacgatcacggtaaggggcagcccgtaagcctgcatcgcttacccgcgctgcctcttgctctatgttgtttgcagaccagcgacgatttcccgtgcggccagcccggccttcaatggcaatggcaggcaaacccccagcgccgctggctaatgccgcatgcgcaagggctacgcttgcgctgcgcgccgaccgcttccgatatcagcctgtatcgtttacctcaattgctgctacaaaaatttcccgctgaacgttttcacgtgcagacagcggttcatccgatgttttctcaggatggcgatgaagcgggaatcgcgatttacggccaacgctttgccgcactgcgcgtgaggtattgcgcgccgactcttcagctatcgctgtgccacggatggatagacgatcgcggtgaaacgcatcaagaatccatcgaacttgaggcgatcgtcggttgcaacgagattgcgctggggttccgggtggactacgacgggatagtccgctttcgttatcggcttacgcagcgtgaatggcagcaggtgacgccgtcgttttccgccggtgcgggaaaatggatcggcgcgcgtatgggcatttacgcgcgtggcgcgcatgaaaacgccggcggcagtgccgttttctctccgtttatcgtgcgtttgcagtaa

SEQ ID NO: 178535 - DNA, 438 bp, Klebsiella oxytoca
atggaagagaggctattttccgcctgtcagttcaccagcgactgcctgagctggcgcagcgccgttcatctcgcctgccgcccgcttgaggagcagggaaaaatcaccgggggctatgccagggctattatcagcgccacggagcaggatggcccctggtatatattgagcccggcgtttgcgctaccgcacgcgcgtccggaagccggcgtgctgagcagaaacagcgcgctttcgctgctttgctgtagcgaggccgttgattttccggagcatcccggcattcggctgatagtcgtactggcggcggccgatagtgaacagcatatccagactatccagcggttagtctgctggctggatgagggggaaagacttcagcgatacagcacggtgcaaaaccgggcacagtttattgcgcttcttgcgtcgcattaa

SEQ ID NO: 178536 - DNA, 2256 bp, Klebsiella oxytoca
atgcgtttaccacaacttgccggctgtgtgattatcggtattctgccgctggtctggctgccagtactgcccgggcggtgggttatctgggggctcatggccctggcgctactcattgcgcaatgtcgacgcagacctgcgcaatatgcggcattgataacgctgttttttgtctggggagccctcagcgcaggcgaggtactgtggccgacggagaggttaacggacaggaatcgccaggttgacgttgagctaaccgcaacggacgggcagacaacgcatcaggggaagattatccgtctggatgggcgacggctgtttcctgcgccagggattagcctctacggcagctacctgccagaaacgccctgcgcaggtcaggtttgggcaatgacgctgcgcgcgcgtccggtacacggacagctcaacgatggcgggtttgatagccagcgtcatgcattgtcgcagcatcgtccgttaaccggacgctttatcaccgctgacgttcgggtgcggacctgtagtttgcgggcgcgttatcttgcttcgctgaatcaaacgctgaacgcgttgccgtggcaatcggtgatgctagggttaggcatgggggagcgtctggcgataccgcgcgagataaagaccctgatgcaggaaaccgggacatcgcacctgatggcgatttctggcttacatatcgcgctaggggcttcattgggctggttgctgctcagaggtgtgcagttttttctcccgtgccgctggcttggctggcgggcgccgctgctcgttggcctggcgagcgcgattttttacgccgggctgaccggcatgcagccacccgcgttgcgcacctgcgtcgcgctggccgccggctgcgcgctgcggctatccggaaaacgctggtcgccatggcagctatgggtctgctgcattggcgcaatactgtttgccgatccgctggcggtgttgtccgaaagcctctggctttccgcgtttgccgttgcggcgcttatcttctggtatcagctggcgccgatgccgggcggcaaaaggagcgggctactgcgtcaaagccttgcgttatgtcatctgcagatcggtttaatgtttttacttgctcctctacagatcgcactttttcacggcatcagcctgacgtccgtgctggccaacttgattgccgtgccgctggtgacctttgtcgttgtcccgctaattctgaccgcgatgtttttacacctctgcgcgccgtttatcattgagatggcggtctggcagtcggcggaccgtgttctggccgcgctattctggttcttacgacagctaccgcccggctggctggcgctggatgcgcgctggcttgggataagcttgctgccgtggctggcgttaatcgtctggcgttttcatgcgtggcgcacgttgcccgcgttttgtttagcatttcttgggctattgagctggcccttctggcggagtacggttgctaacgaatggcgagtcaccatgctggatgtcgggcaggggctggcaatggtgattgaacgcgagggcgcggcgcttctctatgataccggcctggcctggcccgagggagacagcggtcagcagatcattattccctggctacgctggcatcatttgcagcttgaaggcgtcgttctcagccacgagcatctcgatcaccgcggcgggctaaattcggtgttaaaggcgtggcccctgatatgggtgcgaagccctttaggctgggcgggtcatttagcctgccagcgcggagaaacctggcagtggcggggtttaacctttcgcgcgctctggccgctgcccggagcgacagcgcaggggaataatcgctcgtgcgtggtgcgtattgatgacggtaaacatagtattctgctgaccggggatatcgaaacgcccgcggaacgggcgatgattagccgctactggcaacatcttacgtctacacttatccaggtcccccaccacggcagtaatacctcgtcgggaatcgccctgctgcggagcgttggcggagaagctgcgctggcttccgcttcgcgctataacgcatggcgcatgccatcaaccaaagtgattcagcgctaccgaaaacagagctatcagtggttcgacacgccgcatcaggggcaaattacggtggttttttctccggatagctggcaaatccatggcttacgggatcaagttttaccgcgatggtatcatcagtggtttggcgggaaggcgtag

SEQ ID NO: 178537 - DNA, 624 bp, Klebsiella oxytoca
atgaagaaacttatatgtcttaggatccatcagtttcgggcatgtttgtctccattaggaaaaataagctgtcggcccttatttggtggctatagcctggcgatagataataccgtgtttgccatgatggctgagggagagatctatcttcgggtttgcgagcagagcgcggagtaccgcgtggcgcataaaaacccgctgttgaagatgcagaagaatggtcgtctggtcgcgctgaagtattatcatattgatgaggaactttggcgggatagcaaaatgctttttcatttatcggcgctgtcattacagagcgcgcgtcatgaaaaacatcggcagcgacattccggaagattaaaaaatttgccaaatatcagttttcatatggaactacagctgattaattcaggcattacggatgaattaatgctgcgtaagattggggccaaagaagcctggttgaggttacgaaaaataaataaagcgctaacggtgaatattctttattccttacagggggctattgaaggcgtccacgcggccacgctcccgacgcagcagcgtcaggagcttgagaagtgggcaacggaacagatgcgggagagtgagagctattcaggttga

SEQ ID NO: 178538 - DNA, 2136 bp, Klebsiella oxytoca
atgctcacccccctgctacgccgctatacatggaacagtgcctggttatataacatcaggatatttatcgcactctgcggcacgaccgcatttccctggtggcttggcgaagtaaaactcacgattcctctaacactcggggtggtggcagcggcgctgaccgaccttgatgaccgcctgacaggacgtctgcgtaatctggccattaccctcgtgtgcttttttattgcttcagcctcagtggaactcctttttccctggccgtggttatttgcggcgggattaaccgtttcaacaatcggttttattttgctcggcggcctgggccaacgctatgccaccatcgcctttggtgctttgttaatcgccatctataccatgctgggcgttacgctttacagccactggtatcttcagccgctgtttttgctggctggcgcggtgtggtacaacttacttaccctctccggacatctgattttccctatccgtcctcttcaggacaatctggcacgcagctacgagcagttagctcactatctggagcttaaatcacgcctgttcgatccggatattgaagatgaaagccaggctccgctgtatgacctggcgatagccaatggccagcttgtggccacgctgaatcagacgaaagtttccctgctgactcgcctgcgcggcgatcgcgggcagcgcggaacgcgtcgcactttgcagtattacttcgtggcgcaggacatccacgaacgcgcaagctcatcgcatattcaataccaaacgctgcgcgatcattttcgctacagtgacgtgatgttccgcttccagcgtatgctgtcaatgcaggcgcaggcctgccagaaactgtctcgtgccatcctgctacgcgaaccctaccttcatgacactcactttgagcgcgcttttatgcatcttgacgccgcgctcgatcgcgtaaaagccagcggcgcgccggcagaacagattaaggcgttgggatttttgcttaataacttacgcgccattgacgcccagctggcgacaattgaatccgtccagacgactgtacagtccagtcacaacacggaaaaccttttagccgacgaccaacccggcagtttcagcgatatctggctgcgcctgcgcagtaatatgaccccagagtcagctctgtttcgccatgcggttcgaatgtcattagtcctgtgcgcaggttatgcatttatccagttaaccggactgaaccacggttactggatattgctgaccagcctgttcgtatgccagccaaactataacgccactcgtcaccggctggcgttaaggataatcggtacgctcatcggcgtagcgataggcctgccggtgctgcttctcgtcccttccgtcgaaggccagctgcttttaattgtcctgaccggcgtgctgttcttcgcgttccgtaatgtacagtacgcccatgcgaccatgttcattacccttctggttttgctgtgctttaacctcctgggggaaggttttgaagtcgccctaccgcgtatatttgatacgctgatcggctgcgctatcgcctgggccgcagtcagctttatttggccagactggaaattccgcaacctgccccgagtacttgaacaagcaatcaatgccaactgccgatatttagacgccatactcgagcaatatcatcaggggcgcgacaaccgtcttgcctatcgtattgcgcgaagagcggcgcacagcagggacggtgagctggcatccgttgtatcaaacttatcaacggaacccagagcgggctcgcaaatgcgggaaaccgcttttcggttgttatgcctgaaccacacttttaccagctatatctccgccctgggcgcacacagggaaaagctgacaacgccagatatcctggcgctgctggacgatgccgtttgttatgttgatgacgcgctgcaccactcaccggccgatgaacagcgggtacagcaagctctaacaagcctgcaaacccggatacagcatcttgaacctcgtgccgatagcaaagagccgttagtgcttcaacaaatcgggctgctactggcgctgctgccagagatttgccggctacagcgacaggttgagattcaacctgaatag

SEQ ID NO: 178539 - DNA, 543 bp, Klebsiella oxytoca
atgtttttaagtttaaccgccagcgaccgggtgctccagcgtaaaaaacgctacaatggccgtgccttattatccaccgtattaagcagagggtttatgcgtaccgttctgaatattttaaactttatccttggcggattcgccaccacgctcggctggcttctggcgacgctggtcagcattgtgctgatctttaccctgcctctcacccgctcctgctgggagataacaaaactctctctttttccctatgggaatgaggccgttcatgtcgacgaactcgatcctcagggaaagaatagcctgctaaacgcgggtgggacactattgaatattttatggtttattttctttggctggtggctgtgcctgatgcatatcttttgtggtatcgcccaatgcctgactatcattggcatcccggttggtatcgccaattttaaaatcgccgctattgctttatggccagtaggccgacgagtcgtctccgtcgagaccgctcgcgccgcgcgtgaagccaatgcgcgtcgccgctttcagtaa

SEQ ID NO: 178540 - DNA, 2034 bp, Klebsiella oxytoca
ttgggcaagcgtatggctcagcatccttatgacagggtgcaacttcttaatgccggagtaaaggtttccggtgatagccatgaatatcttatacctttcaatcagttattatcaattcattgcaagcgtgggctggtttggggggagctggagtttaccctaccgggcgagaaagttgtgcgtttgcacggtaccgaatggagtgaaacccagcgtttttaccatcatctgaacacgctctggcagcagtggagcgcggaaatgagcgatattgccgctgatgtacttcgccagcagctggcggaagtggcgcgttccagcgcggaaggtaaatggttgacgcgtcagcaggtaagcgatattcagcgcaaaatacgccatgcgctgagcggattaccagtgccgacagtccgtcttgatgcttttgataactgccgcgagctatggcggcaatgccagagttggttgagtaatacggaaaaagccaggctcgagcataaccaaacttttacggaatccatgctggagcaataccgcggattttttgccgcagtggaatcatcgccgttgaatccggctcaggcacgcgcagtcgtaaacggcgagcgttcgttattagttctggcgggtgccggaagcggtaaaacttccgtgttagtggcgcgcgcaggctggttattgacccgtggcgaggcggcggctgagcaaattctgctactggcgtttggtcggcaagccgcgcaggagatggatgagcgcatccgcgagcgcctgggcactgaagagatctctgcgcgtacttttcactcccttgccctgcacattatccagcagggcagtaaaaaagccccgacgatcagcaagctggagagcgacagcgctgcacggcaaaaacttttagtacagagctggcagcagcagtgccaggagaaaaaagcgcaggcgaaaggctggcgattgtggctggaggaggaaatggggtggcagatccctgaaggggatttctggcaggacaaaaagctgcaacgtcgtgttgccagccgccttgaccgctgggttagcttgatgcgtatgcatggcggctcgcaggctgagatgattgccggggcccctgaagaggtacgcgacctttttggcaagcgcgttaagctgatggcccctctgctaaaagcgtggaaaacggcgttaaaagatgaaaacgccgtcgatttctccggcctgattcatcaggcgatcaatattctggataaagggcggttcgtcagcccgtggaagcatattctggtggatgagtttcaggatatctccccgcagcgggcatccctactcgccgcgttacgtcggcaaaacacgcagacgacgctgtttgccgttggcgatgactggcaggccatctaccgtttcagcggtgctcagctctctttaacaacggcctttaatcactattttggcgaaggggattgctgtgcgctggatacgacgtaccgatttaatagccggataggcgagatagccaacgggtttatccagcaaaatccgcaccagttaacgaaaccactaaacagcctggtcgcaggggacaaaaaagcggtgacgttattggcggaggacaaactcgacgatctgcttgataaaatgagcggctatgtcaaacgagagcagcggattttattgctagcgcgctatcatcatttgaagccggcggcgctggagaaagccgccacgcgctggccgcatctgcagctcgattttatgactattcatgccagcaaaggacaacaagctgattacgtcataattcttggccttcaggagggggatgatgcgtttcctgcaccggcgcgtgagtcgattatggagcaggcgctcttaccgcagccggaggattttcccgatgccgaagagaggcgtttgctgtatgtcgccatcacccgcgcccgcctgcgcgtatggctgttgtttaataaagagcaaccttcgccgtttgttgaaatgctagaggcgctggatgtgccggtagcaagaaagccatga

SEQ ID NO: 178541 - DNA, 474 bp, Klebsiella oxytoca
atgtggaatgaaatgatggaactaacaacacgtaccttgccagcacgcaagcatattgcgctggttgctcacgatcactgtaaagatatgctgatgaagtgggtcgagcgccaccagccattgctggcgcaacacacgctctcggcgacaggaacgaccggaaatctggtgtcacgcgcaaccgggctggaggtgcatgcgatgctgagtggtcccatgggcggcgaccagcaggtgggtgcgctgatttcagaaggtaaaatcgatgtattgatttttttctgggatccgctaaatgccgtgccgcatgacccggatgttaaagcgttattacgtttggcgacggtatggaatattcccgtcgccaccaatgtctcaaccgccgactttattatccagtccccgcacttcagcgaccccgttgatatcctgatccctgattatcagcgctaccttgcagagcgtctgaaataa

SEQ ID NO: 178542 - DNA, 414 bp, Klebsiella oxytoca
atgaaagaaaacgatatcgcaggtattttgacctcgacacggactatcgccctggtgggggcaagtgacaaacctgaccgcccaagctatcgggtgatgaagtatcttctggagcaggggtatcacgtcattcccgtttctcctaaggttgcgggtaccacgctgctggggcaaaaagggtatgccacgcttgctgacgtgccggaaaaagtggatatggtcgatgttttccgtaactcagaagcggcctggggcgtcgcccaggaggcagtggctatcggtgcgaaaacgctatggctacagctgggggtaatcaatgaacaggcggctgttctcgcccgagacgccggtctaaacgtggtgatggatcgctgtccggcgatagagatcccgcgattaggattagcccgttaa

SEQ ID NO: 178543 - DNA, 231 bp, Klebsiella oxytoca
atgctgacagtgattcagactccgacagtgatacggatgctgacagcgatagcgactctgattcagacagtgattctgattcagatagtgattccgattctgacagtgattccgactcggattcagattcagatagtgattcggatgctgacagcgacgcggatagtgattctgatgctgacagtgattccgatactgataccgagctacctaccgcggcacagaacatag

SEQ ID NO: 178544 - DNA, 639 bp, Klebsiella oxytoca
atgggatccttcagccagggcgtcaggagtaaagctccagcgtccgtcctcatccgcaatcgcggtgcccagtacggtatcaccgtcataaattgtgatcgtggcgcccgcttctgccgtaccgctcaatgttggtgtatcatcatccgtcacgctaccgctgttcagtgtacccgtgtcttctcctgcattatcagttacctgcagatcgctaaccgggttcactatagtgtctaccgtcagttcaaacgccggcgaacgttcgctgacgttcccggctttgtccgttaccgtagtgctcaggctgtgggcgccttcctccagactagctggcgtgaagctccagcgtccatcctcgccggcaaccactgtgcccagcacggtgtcgccgtcatagatcgtcaccgtggatcccgcttccgccgtgccgttcagggtgggcgtcgcatcgttagtcagatccccgctctgcagctggccggtgtgctctgcaacattgtcggttacctgcggaatgctggctgccggcgcagtggtatcgatggtcagttcaaacgccggcgaacgctcgctgacgttgccggctttgtccgtcaccgtcgcgctcaggctatgggaaccctcgctcagctccggtaa

SEQ ID NO: 178545 - DNA, 354 bp, Klebsiella oxytoca
atgattcatttaattattgaagatcgggaaaatgcgccgaactatattccgcttatccaccgccatcttcctcatctcgcgatgagcgctatcaaacagaacctgaacgcttccggttacgtcacctcatttgatgaaaacaaaatctgcgatgacattctggaagagcagaatcctattggaaattttcttaatctcatcaaagtattaaagaatcgaggcgcgcagcttaaattcctcgagcaaacgggagatgaaccgggagaagaattacccttgagccaggtcctgaactatgttgaaagaggtctcgacattgcccgtcggatagagcgagaaggcggtcagaactga

SEQ ID NO: 178546 - DNA, 951 bp, Klebsiella oxytoca
atggacgcaccctcgattttttcccgcaagaaagtggcttatgcctgcgcaaccctctgctgtctgctgtggggaagctcctatccggcgattaaaagcggctatgaactgtttcagattgccactgatgatgtgccgtctaaaatcgtctttgctggctatcgctttctgtttgccggcgcgctgctgctgctcttcgcgctggtgcagcgtaagccgattgcccgcttgaatccccgtcagtgcgggcaactggcgatacttggcgtcacgcaaacctctatccagtacgttttcttctacgttggcctggcgtttaccaccggcgtgaagggatcgattatgaacgccaccggtaccttcttcagcgttctgctggcgcactttatctatcagaatgacaggctgagctacaacaaagccatcggctgtattgtcggctttgccggcgtaatgctggtgaatgttaatcgttcattgagcgattttagctttgtctggcagggtgacggctttgtggtgctggcggcgtttatcctgtcggcggcgacgctgtacgggaagcgcatttcgcagacggttgacccgacggtgatgaccggctggcagctggcgtttggcggcctggtactggtcggcggcggctatctgaccggcggcacccttgaggttcacagcgccgctgctgcgctggttctggcttatttgacgctgctctcttccatcgcctttgcgctatggagcgtgctgctcaagcataaccgggtgagcatgattgcgccgttcaactttgtggtcccggtcgccggcaccgtactgtcggccatcttcctcggcgagaatattcttgaactgaaatatgcggttgcgctggcgctggtgtgcgccgggatctggtgggtgaataagccggggacaacatccgggaaatcgccacagcaggccgggtaa

SEQ ID NO: 178547 - DNA, 873 bp, Klebsiella oxytoca
atggaactggatatcaatgagctactgaacttctcgccattgatgaagacctttaccttcaacgcctgggtcgtcgccggctttacccccatcacccgcggctcaaagctggactactacataaaccgcccgcaggggatgaaaggttacatcatcaatctgacgcttcgcggccaggcgcgcgcgaaagcgggagacggctcccttctgtgtcgtgaaaacgatctgctgctcttcccgcccggcgttccgcaccattacggacgggacgaacacagcgaatactgggatcatttatggatctacttcatcccccggccctactggatagactggctaaaatgggatcaaacgacccacggcattggtaaaaccacggtcaacgatcctgagcagctgcagtgtctgcgcgatctgttctatgaagttatccgccaccactccgcttccgccccgctgtcggaggcgctggcgatgaatgcgctggagcgcctgatcctgaactgctttcagcgacagccgatcagcaaccgccacgcccacgacccgcggattaacgcggtgtgcgactatcttaacgaacatattgcccaggagatgaagatcgagaccctggcggcgatggtttttctctccccttcgcggctggcgcatttgttcaaaaatgagctggggcaaacggtttacgcctggcgcgaggcgcagcgcatcaaccgcgcgaggtggctgatccagagcacctccctgccgcttaacaaaatcgccctgtcggtaggttacggagacccggtctatttcacgcgcattttccgtaaacataacggcattcccccgggcgagtaccgtaaacgctatgcggaaatgaagggatag

SEQ ID NO: 178548 - DNA, 2010 bp, Klebsiella oxytoca
atgtctgatttattttatggcgtggcctattacgatgaatatatgccggaagatcggctggcgaaagatatcgccttaatgcaggaaacgggcattaacgtggtgcggattgccgaatcgacctggagtacgctggagccccgggagggcgaatataacttctaccatatcgaccgggtgctgaatgccatgcataaagcggggatcgcggtgattatcggcacgccaacctacgccgtcccggcctggctggcggcgaagcacccggatattctggtcactaccgtcaacgggcagcaaaaatatggcccgcgccagattatggatatcgtcaacccgacctttcgccgctatgccgaaaagattatccgtacgctaatggcgcacgtgcagcaccatccggcgattattggctggcagctggataacgaaaccaagcattacgataatatcggccgccatatgcaggagggttttgtacgcagcctgcaggaaaaataccccgaccttgaccagttgaataacgattttggtctggactactggagcaaccgcatcgatagctggcaggattttccgccggtcgaaaacactatcaacgccagcctcgcctgcgcgttctcccgctaccagcgccagcaggtgacggagtatctcgcctggcaggcggagatcgtgcgcgaatatgcccagccgcatcagttcgtcacccacaacttcgattttgaatggcgcggctactcctacggcgtgcagccgcgagttgaccattttgcggcggcgcagacgctggatattgccggagtcgatatctatcacccgagccagaaacacctgaccgggcgagaaatcgcgtttggcggcgccattacgcgttcgctaaagcagggtaagaattacttcgtgctggaaacccaggcgcagggctttgcccagtggacaccttatccgggccagctgcgcctgcaggcttttagccacgtggcatcgggggcggcaatggtctcttactggcactggcattcgattcataacgcgttcgagacctactggaaggggctgttaagccacgacttctcacgcaacgcgacctggcaggaggccaccactatcggggctgacttttcccgcctgtcgccgcagctggcggagctgaaggcagaaaacgacgtcgcgctgctgataagcaatgaggcgatggacgcccttaaccagttccgtcccggcgacgcgcagggcaatatttataacgatattttccgccgtttccacgatgcgctgtacgaccacaatatcagcctcgatattatccacgacgttaacgaggaaaccgcgcgctaccgcgcgctgatcgtacccggactctacgccgccgatgatggcctgctgacgcgcatcaaccgctatatcgagcagggcggcagagcgctgatcggctttaaatcaggctttagcgatgaaaacgtgaaggtgcgcagcggcgcgcagccgggaattttgcgcgagagctgcggcgtgagctacagtcaattcaccctgccggaagaaaccacggtaagcgcctgcagcgctgacattgattgccgtcaagacaatcaggccgagctgtggatggagctgctgacgccggacgccggtacccgtacgctactgcgctatcagcatccggcatggggcgactatgccgccgccaccgaggcggattacgctcagggtcgggcgatttacgttggcttcctgccgcagaaaacgctgattagccagctgttcgatcggctgaccgcaggactggatctgcgttcacgtacatcggcctaccgctatccgctggtggtcaaaaagatgcgcaaccgcgacggcaacagcatccacttcctgttcaactactccggcgaaccgcaggcgtttatcagcgagacatcgggcaacgcgctgttgagcggggaaaaagttagctgcggccagccgttgcgcctcaaagcatgggaatttactatcatcgaaagttaa

SEQ ID NO: 178549 - DNA, 1233 bp, Klebsiella oxytoca
atgatagaatcaaataaaaactactatataagctgtctgttcttcctgttcttctttattggctggggatgctgctatccttatttatcattgtggttaacggaaaccatcggcattaattacactgacgtcggtctggtttattcctttaccgcgattattgccgtttgcgttcaaccactattcggttttatatccgacaggctggtctatcgtaaaaacctgatgtggctgctggccatcattattaccctctttgccccctactggatctacgtctttgcgccattattaaaagttaacgtttttctcggggcgctggcgggcggcatctatattggcatggcctacggcgcaggctgcggtatttgcgaagcttacattgataaagtcagccgtgcttccggttttgagtttggtcgcgccagaatgtttggcggcattggcgcggctatcggcaccttcgcggcaggcaagctctacgggatcgaccagaacatgattttctggctggccagcggtgccggcgtatgcctgctggtcattgtctggaaaatgcagattagcgcgaataaacaaggcgcgatacacagtagtaaagcctcgccggtcaccctgagcgacgccacctcgctgctgaaaatgaagaaattctggttcttcgcgatctacacgatcggcgtcggcgcggtatatgaaacctacgaccagcagttcgccatctattacagccacttctttgagagcaaagcgcgcggcgcggaagtcttcggctatttaaccacaggtcagattttccttgatgcggtggtgatgtttttcgccccatggttcgtgaataaaatcggcccgaaaaatgctctgctgtactgcggaatgattatgagtctgcgcattatcggctcggcctgggctatgggtccggtgtccattagcctgattaaactgctgcacggttttgaaagctcggtattactcgtcgccgcgctgaaatatattacggccaacttcaacccgctgctttcggccacggtttatttaatcggcttccagttttcgaaaagctttagctctattttcctttctaccggcatcggtcatatgtaccagagcatgggctttaccagcagctatatcgtgctcggcggtatcgccctgtgctttaccctgatttcatttattacgctggacaaagcgcgcacttttgccccgcagccggcgcccgcgcattaa

SEQ ID NO: 178550 - DNA, 3777 bp, Klebsiella oxytoca
atgagtttatggaagaagataagcctcggcgtactgatttttctgctgctgctgctggggacggtaggattcctggtggggacgacgaccggcctgcatctggttatcaaagccgccgatcgctgggtcccggggctggaaatcggtaaagccaccggcggctggcgcgatctgacgctggagaacgtgcgctttgagcagccgggcgtggcggtcaccgccggccagttccatctgggcgttaagctacgctgcctgtgggacagcagcctgtgcgtcaacgatatctctctgcgcgatatctatgtggcgatcgataccagcaagatgccgccagcggcgccggttgaagaagaagagagcgggccgctgaatctctccacgccttatcccgtcaccctgagccgggtggcgctgcataacgtcaacgtaaaaattgacgataccgccgtctcggtgcgcgacttttccacggggcttaactggcaggagaaaaacctcaccctgacgccgacctcgctgcaggggttgctcatcgcgctgccgaaggtggcgaaggtggctcaggagcaggttgtcgagccgaaaattgacaacccgcggccggaagaaaagccgctcggcgagacgatgaaagagctgttctcgaaaccggtgctgccggaaatgactgacgtccatctgccgttgaatcttaatattcaggcgttccgcggcgagcagctgcgtctcaccggcgataccgatataaccatctacaatctgctgcttaaagtcagcagcatcgatgggcagatgaagctggacgcgctggacgtggactccgaccaggggaaagtcacggcttccggtaacgcgcagctgcaggataactggccggtcgatatcaccctcaacggtacgctgaatattgaccccctgaagggcgagaaagtgcagctaaaagtgggcggcgaagtgcgtaaaaagctcacggtcggcgtcgatctgaatggtccagtcgcgatgacgctgcgcgccgaaacgcagctggctgaggccggcctgccgctggatatggaggtgaaaagcaagcagctctactggccgtttaccggcgagaaagcgtatcaggctgacgatcttctgctgaaatttaacggcaagatgaccgactacaccctggcctttagcaccgcggtgaaagggcagtcgctgccgccagcgaagattaacctgaacgcgaagggcaacgagcagcaggtgaatctcgataagctcaccatcgccgccctcgaagggaaaaccgaactgaaggcgctgctcgactggcagcaggcgatcagctggcgcggcgaactgacgcttgacggtatcaataccgctaaagaggtcccggactggccgtcgaagctcaacggtctgattaagacccagggcagcctgtacggcggcagctggcagatgtcggtgccggagctgaaaattaccggtaacgtgaagcaaaacaaagtcgatgtaagcggatcgctgcagggcaacagctatatgcagtggaaaatccccggcctgcatctggctttaggccctaacagcgccgacgtgaaaggcgagctgggggtcaaagaccttaacctcgacgccaccattgacgcgccgcatctcgataacgccctgccgggcctgggcgggacggcgaaagggctggtgaaggttcgcggcaccgtcgacgcgccgcagctgctggcggatatcaccgcccgggcgctgcgctggcaggagctgtcggtggctcaggtgaacgtgaagggcgatgtgaaatccaccgaccagattggcggtaaccttgacgtacgcgtagaccgtattagccagccgggcgtgaatatcagcctggtgcagctcaatgcgaagggcaatgagaagcagcacgacctgcagctgcgggtgcagggcgatccggtctccgggcagctctcgctggcggggagctttgaccgcaaagcggagcgctggaaaggcacgttgagcaatacccgtttccagacaccggtggggccggtggcgctgacgcgtgatatcgcgctggattaccgcaaccttgagcagaaaatcagcatcgggccgcactgctggactaacccgaacgccgagctgtgcgtaccgcagaccatcgacgccggcgcgagcgggcgcgcggtggtgaacctcaaccgtttcgatctcgcgatgctcaagccctttatgccggaagcgacacaggccagcggcgtgtttagcggtaatgccgatgtgagctgggacaccaccaaagaggggctgccgcagggtaaggtcaccctgagcgggcgtaacgtgaaggtgacgcagacggtcaacgacgcgccgctgccggtggctttcgataccctgaacctcacggccgatctgcacaataaccgcgcccagctgggctggctgattcgcctgaccaacaatggccagctggacggacaggtgcaggtcaccgatccccagggccgacgcaatctgggcggtaacgtcaatatcagcaacttctcgctggcgatgatcaaccctatcttctcgcgcggtgaaaaggcggaagggagactgaacgcgcgtctgacgctgggcggtaacgtccagagcccgcagcttttcggtcagatgcagctgaacggcgtggatattgacggtaactttatgccgtttgatatgcagccgagccagctggcgatgaattttaccggtacccgttcgaccctgcaggggacggtgaacactcgccagggacagattgcgctcagcggcaacgccgactggacgcagattgacaactggcgcgcgcagattgcggcgaagggcagccgggtgcggataaccgtgccgccgatggtgcgcctggatgtgtcgccggacgtggtctttaccgccacgccaagcctgtttaacctggatggcagcgttgacgtaccctgggcgcgtatcgtcgtcaacgaagtgccggaaagcgccgttggggtctcatctgacgaagtgatgctggataaaaatctgcagccgattaagcagcagagcgccggtatccctatcaacagcaatctgacgattcacgtgggcaacaacgttcgtctcgacgcctttggtctgaaagcgcgtctgaccggcgatttgaaagtggcgcaggacaaacaggggctggggctcaacgggcagatcaacatcccggaagggcgtttccatgcctacggccaggatctgatcgtgcgtaaaggcgagctgctgttctctggtccgccggatcagccgctgctgaatatcgaagccattcgtaatccggacgccaccgaggacgacgttatcgccggcgttcgcgtgaccggctcggccgatcagccgaaagcggagattttctccgatccggcgatgtcgcagcaggaagcgctctcttacctgctacgcgggcagggtttaggcagcggacagagcgatagcgcagccatgacttcaatgcttattggtatgggggttgcacaaagtggtcaggttgtgggtaaaatcggcgagacgtttggcgtaagcaatctggcgctggataccgagggagtgggcgactcctcccaggtggtggtcagcggctatgtactgccgggtctgcaggtaaaatatggggtagggatctttgactccctggcgacgttgacgttacgctatcgcctgatgcctaagctatatatggaagctgtgtctggcgtagaccaggctctcgatttgctctatcagtttgagttttag

SEQ ID NO: 178551 - DNA, 1209 bp, Klebsiella oxytoca
atgaaaaaaacattagctttaacagcaatcgctatgcttgtttctgggcctgtagtcgcgaaaacatgggtgctgacaagcgctgaaagcggtatggataaaggaaactggcagataaccagcgaccagctgaagataaaagatcataacttcagcattgagcaaaaagtccttcacggcgggaaacaggaaggcagcaaaatcctcgtgatccacagcaaagacggcctgacgattaccttgagcccgactcgcggcatgaatctgctgaaaatcgaaggttttggttcacggatgggctgggactcaccggtaaaagaggtggtcaacccggcctttattaacctcgaaagccgcaacgggctgggctggctggaaggcttcaatgaaatgatggtgcgctgcggctatgaatggaccggccacccggtaaccgcagacgggcagatttataccctgcacggtaaagtcggcaacacgccggcttcacaggtggaagtggaagtcgcggacaccgcgccgtatgaaattcgcgttcgcgggctggtgaaggagagcacgtttaagaaagcggatctgcagaccatgaccgagctgcgctatgtacccggcagcaacagcttcagcctgcacgatgtcttaaccaaccatgctgactatccgcatgactatcagattatctatcacagcaactttggcaagccgatcctcgaagagggggcccgctttatggcgccgatcgccagcatcagcccgttcaatgactacgccaaagccggcttaaaaacctggcaaacctacgccggtccaaccaaagatttcgatgaaatggtgtttaacatgcagccgctggcggacgaaaatcatcaaacgctggccgccgtggtcaacaaagccggcgacaaaggggcatcgattcagtttgatacccgccagctgccggtgctgacgctgtggaaaaacaccgataccgagaaacagggttacgtgaccggtattgagccgggtaccagctacgcctatccggtaaccatcgagcgcgagcaaaaacgcgttaagcagcttcagcccggggcaagcacccagtttgatctgacctatacgctgctgcacagcagcgagcaggttgccgacgtggagaagaaaatcgcggccattcagggcgataccaaagtggcggaaaacgaaacgcctatcgcgaaggagtag

SEQ ID NO: 178552 - DNA, 1356 bp, Klebsiella oxytoca
atgtctcgtacttcatttattgaacgctatgtcatgcccgccgcgctgaaaatcggcggtcagaagcatgtcctgtcggtacgcgacggcattattctcaatatgccgtttatgctgattggttcgtttttcctgatattcgcctacctgccgattcccggctacggtgagatgatgaccagcgtgtttggcgatgcctggcgcgataagatgctgtacccggtcaaagcgacctatgacatcatggcgctgctctccgcgttcggcattgcctaccggctggcggaaaaatatcgcaccctggacccgctcagcgccggggcgatgtcgctggtggcgtttgtgatgacgatcccccaggtgacgctctttacgccggcagacggttcggcggcgcagcttgtcaaaggcgtgctgccggtggggatgattggcagccaggggctgtttgtggcgattgtgatttcgctgctttccacggagatctaccgcctggtggccagccgtaatctggtgatccgcatgccggagggcgtaccgcccgcggtggcgaaatcttttctcgccctgatccccggcttctgcgtgctggccgtggtgctggcgctgcgcctgatcgttgaagcttcgccgttcggcgatatcaatagcatgattaccacccttatcggtattcccatgtcgcacgtcggcggttcgctgccggggatgattatctcggtgatcctgattggtatcctgtggaccctggggctgcacggcgacaccattgtgctggtgtttattcgcccggtctggctgtcgaatatgtcggaaaacctggaagcgtttcagaatgggctgccgatcccgcatatcatcacccagcagttttatgacctgtggattgcgcccggcggtaccggagcgctgttagggctggtgatttttatgctgctgcgcagccgtagccagcagatgaaacagctggggaaaattgccgcgccgggagcgctgttcaatatcagcgagccgatggtattcggcattccgctggtgatgaacccgtacttcttcctgccgtttattttgacgccggtcctgctggtgattgtctcgtataccgcgatggccaccgggctggtgatgaagccggcggggattgcgctgccgtttaccacgcctatttttatgagcggctatctggcgacgggagggcatatttccggcgcggtgctgcaggtggtgaacctggcgatctcgctggtgatctactatccgttcttccgggcatgggatcgcctgaaggcgaaagaagagcaggcgtccgcgcagccggaagccagcgcgacgctgtctgcggccgatcgtatttaa

SEQ ID NO: 178553 - DNA, 453 bp, Klebsiella oxytoca
atggcaaaaaatcgttttaccgcagaacatatcgccgacattcttcagcagtctaaaagcgggatacctggcaaggtattgtgcgaaaaatatcaactcagcccctgtacgctccgacgctggcaagagcagcacgccgaaggcgttcgccgcgagttacagcacctggagtcgacggctgccaacgtcttcttgtgcttcttcattgcaaccctgacgctcgcgatgatgttctctaaacccatcgccgcctgcgtgatgcccttgtttttatggtattgcgttagctacatccgccgctttcgcaaaatatcggcaaaacatattcgggaagaaaatatctttctctcccgcgccggacgcggagcgagaaatgcattttatcaattcagttgggccttcattgcgctttctgtccttagcgtgggctatttcattgtgcgtctggcctga

SEQ ID NO: 178554 - DNA, 1476 bp, Klebsiella oxytoca
atgaaagtgaaaaaaatatcgttatatacagcaacattattatttacctcctcagcattggcgcacggctatgtggaatcgccgccaagtcgggcgtaccaatgtcatttagggaaaaacaccgactgcggttcggtgcagtgggaaccgcaaagcgtcgagcaagcgagcggttttcctgaaggggcaatgccgcctgatggtaaactggccagcgcgggtaaaagcaacttctcgcagctggatagccagagcccgactcgctgggcgaaaaccacgataaagagcggtaaaaataatttcgtctggcaccattctgcgccgcatagaacgactaactggcgttattacattaccaaacagaactgggatcaaaataagccgctgacgcgcagcgattttgaaactaagccattttgtcaaatcgacggaaatggcgcgacgccggctgtacaggtcacgcactcctgtaatgtacccgatcgcaccggctatcaggttatttatgccgtctgggaaattgccgatacggcaaatagtttttatcaggccattgacgttgatttcggcggcgccagcgatgaaacggagaatgaatccctctggacaacgcagctcgccggccagcttagcgggaaagatctccatgcgggagataaagtcattgcccatttctttaacgcgagcggtgaagttcattcgctacaaacggaattgaccatcgccagcgaagcgcaaggaaaaagcagccagtggtcttacgatctggctgaagctattaataccgcgcaccagggcaagctgcgcgccggggtaaaagggagtgatggcaacattacccccctccacggcgttaaccaggtgtatgtgccaaaagacagcaccgttcaaagcgttacgctgacctacgccgagtcgcagtcagacgatatcgtggaagaatccctgagcgtcgccaacgttaacgcaaccaaaatcgccagcgggaaagcgacggtgacgttcaacgccacggccaggggcaaaatgcatctcaccgccaccgtcaacgaccatgcgggcacgcagaaagggagcattcagcagacgatagataatcgctccctgacggtatctattccgctgaccaacgttcaggcaggccatcatatgctgcgctactctgccagcaatgcgcagggcgccaccctcagccagggggtcattgacctgatgctggaagagagtacggttcagccggatccgaccccgacgcctgcgcctgcgcctgcgggaaactacgactataccttcccggataacctgaaaagctataaggcgggaacgaaagtcatgcagcctaaaaacggcaaagtgtaccaatgtcgcccgttcccctacagcggctactgcgtgcagtggagccagtacgccactcagttcgaaccgggcacaggttctgactgggccatggcatggacggaagtcacccactaa

SEQ ID NO: 178555 - DNA, 1677 bp, Klebsiella oxytoca
atggcgcttacagatctcgcaatccggcatgccaggccgcttggcaagtcatacaggctctctgactgtcacggtctttacattcaggttaaccccagcggatctaagctgtggtatctgaaatttcgctttggaaacaaagagaaccgtatggcattaggcccttatccgcttatttctctcgcactggcaagggagaagcaagcagatataagaaggcttattttagaaggcattaatccggcggaaaaacgcagagaggaaaagcggggtggagagcccctttatacgttcgagtccgtggcgcgcgaatgggtctccagcaacgtgaactggtcggcagaacataagaagcgggtgttgcgttatttcgagctttacgtctttcccacgaacggcagctgcgacattaccaaaatgaaggtcaaagacctgctggtacccatcaaagaggtggagaaagcgggcaaactggatgtcgcttctcgtctccagcaacgtaccgcctgcgtgatgcgctacgccgtccagaacggcattatcgatcataaccctgcatcagatttaactggcgcggtctccacgcccaaagtacgtcaccatccagcgctggatttgaatcttatccctgatttcctggaaagagtcgacgatttcaaaggacgtaagctgactcaactggcggtaaagctggcgctgttgctgtttattcgctccagcgaactgcgctttgcccgctgggatgaaattgacctgcataacgccatgtggaccatccccgctgagcgtgagccgatccccggcgttaagttctctgcgcgcggtgcgaagatgcgttctcctcacctggtccctctatcacatcaggccatcgaactgctgcacgaggtgcggcagcattgccgaccgggcactgaactggtattccccggcgatcataactaccgcaaaccgatgagcgaaaacaccatcaacaaagcgctgcgggtgatgggctacgacacccagaaagacgtctgcggccacggttttcgcaccatggcctgtagcgcgctggtggagtcaggcctgtggtcaagcgacgcggtagagcgccagatgagccatcaggagcgcaagcgcgtgcgggcggcgtatatccacaaggcgcagcatctcgaagaacgtcgggagatgatgcagtggtgggcggattatctggatgcaaatcggttcaggcatgttgtgccgtatggcttcaaaaagtcgccgggaggcgcactcgaccatatgagtttccaggagcgcaatgaccggcagctagaggagctgaaagccagaatactggctgactcggaatggctgacggcgtctgaattatctgcaaaagcgggctttcgttccgccgatcctgatgctggcccgaaaggctggaaagccgccgggaagatattctcgctgaaggtcgatggtgaggatttgtacccggattatgttctggatgagaaaatgaggcccctcaaggttgtcaggctgattctctcgctgttcaaagaacgtaagaccccgtgggggctggctatctggttcggctcggcaaatcgcaggttgagaggagggaagccgaaagatttgctgatttcgaagtcagagttggttctgatggcggcgcaggatgaggtagagtcgggggagtag

SEQ ID NO: 178556 - DNA, 999 bp, Klebsiella oxytoca
atgaaagaagaacagcttttgtctgatgcgatagagaatctgccaaaaggattccatttggagtatgaacatagcggtagacatggtaagcacgatgccttgggtaagctaacagggccggatggtgagtcagtgacatttgctctggaagtaaaatttatccaccgtaaagagtcactgatggctgttcgcgaacaaatggttcgctttcctgcggattttcctgttctgctggtgtgtaaccgcctgacgtctgcactggcggaatattgcgccgacagccagatcaactttatcgatacggcagggaatgcccgtatccaggttccagggttgtatgtgcggatcgaaggccgctatgaaaagaaacccgtttccgccagcagtcgttttgctgaaggggtgatgaagcttctttttgttttgctgtctagcccagagaccctgaacgagacttatcgcagtttggccgggaaggcgggtatttctctgggaatggtcagtaaggcttttgattatctcgaagcgcaacgctatttccgcaaatcgcagaaggggcgtcgcttaatcaatgaaggcgagttagaggttttgtggctgaaagattatgctaccgctttgcgccctaagctggattcgctttctttatccgcgcctgtttcatgggatgagttgacgcttgcgtccggggaatactggagcggtgagattgcggcggcagagctgagcggaggatacctgataccagaaaatggcgtgatttttacatcccatccgttgttacaaaggcgaaaggaactgggactaaaacctgttccgggggggaaactacagctgatcgccggtttttgggggagctttgtcctgaaccgcagagccgaggcgatgctgtgcgtggctgaattgctggcaagcggcgatgacagaaactgggaaacggcaaggataatcaatgacaaatatcttcaccttaatgaatccgatctcttcagctactga

SEQ ID NO: 178557 - DNA, 813 bp, Klebsiella oxytoca
atgacaaatatcttcaccttaatgaatccgatctcttcagctactgaaaagttactgagccagatcaaccgtatttgcatcgcgcaggggatcccgttttttattgcaggtgcaacggctcgtgaaattcttctccatcatgtacacggcagaagtattggtcgccgaacccgtgatattgatattgccgtttttgtggatagctggccgagatttgatgcgcttaaaaatgctttctttgctgaaggcgcagaggctgtccgtgataacgcccatcgtatgattgtcgaagggatcgaactggatattattccttttggtggtgttgctgaagggaatcaaattgcctggccgccagagcgcgagatcatcatggctgtggacggatttgccgaggtatcttctcatactgtaaccgtacgactagataatggtgaaaatcttccgttttgttccttaccaggactggcgctgttaaaactttttgcctggcgcgaccgtgggcatggaagcaccaaagacgcgaccgatctctttaagattatccgtgaatatggtgctattgaggatgaacgcatctatgagtcgcccgtagaaggggaacgcctggactgggatcccatacgtatgggtgcttttctgttgggaagcgatatcgcgacaattagtgagcattcatccttgcaggatttacggcatcttgataaagaacgcctgatagatgcgatagtacgacaacatggagtgggtgatatcgccgggattgagcagatcatcagtgattgctgggatggtatggcaagtgatggttga

SEQ ID NO: 178558 - DNA, 489 bp, Klebsiella oxytoca
atggctaaaaaaacggctcccttacttcccggtactaatcagttgcttgctgagtttggcgaacggcttaagctggcgcgactgcgacgtaagctcacagcaaagcgggttgctgagcgagccgggatgtcgccaataaccttgcgttctcttgaatcaggcgggacgggcgtgacaatcggcgcttatttgtcagttatgcagattttgggtcttgaaaaggatctgaataaacttgccgctgaggatgaacagggacgccagcttcaggattcccggctaataaataaaacatgtgtttctcgtcctgctaccatctctcacaaaaacaggtataccggaaacgtgataaaaaacgatgtcttcgacaagcaactctcgacatcacaagaaaaatcaagcgattctgaagtaaaaacggaagtcgtgacatcggcatctcttgctgcactgctaaaaccaataaagaaacccagaaaaggtagctga

SEQ ID NO: 178559 - DNA, 252 bp, Klebsiella oxytoca
atgaacgtaacctcacccaaaatgctggctcaggcaatcaaggatgcacgcaagcaacgtaacctgacccagcgtgaaactgcagcaagtatgggcatgaaacagtcaacggtttcagagtttgagaaccatcctgaggggactcgcctggatacgctctttaagctgcttgccgctctggaccctaagcttcaggtcgtaagccggaggggtaaaaacaattcttctgatggctgggaccaggagtggtga

SEQ ID NO: 178560 - DNA, 267 bp, Klebsiella oxytoca
atgttaccccggacacaccgccagctcgtaagcgttgaagtgatgtggcctgctcagacgctaccacttcccctgcaacaggtagtcgaagcattgaatcagggcgaaacgcccgatcagattattatccgcatgaaccaacagggcctgctggcgtggcgtgaggatgcatccgcgcaggatacacacgatatctttcaggttcgactggacaaccagaatgaggcgcggtttctttgccgctacgttacgctgccgctgcactga

SEQ ID NO: 178561 - DNA, 465 bp, Klebsiella oxytoca
atgatattaatagaaaaatcttgccccgacacgccagagtctttgtatcttatcgaaatgctatccgcgacgctggctgagattactggcgatagcggaaagaccaactttaacatcgataccatgaaatctgatcgagcgctgtgggtagtggcaaaagatgaaaatggcgaggcaatcggttgtggggcgatccggccaatatctgaaaatattgctgaattgaaaagaatgttttccgtcaataaagcatccggaacaggtacagcattgctccggtatcttgaaggtgaagcaaagtcgcttggatataacgaaatcaggctagaaacccgtaaagttaatacccacgcagttgctttttatgtaaagcataactatcagcgcatcgctaactatggcccgtatgtgggtaaagatgaggctgtttgcttctcaaagcacttatctctcaaggagatttga

SEQ ID NO: 178562 - DNA, 1596 bp, Klebsiella oxytoca
atgctgaagtggctacaaagaccatcccaaagccagccacctgcgccagacgctgcgctgccggagggctggtatgcaccacaatccgcagaacagttactggcgacaccgttacgccagtcctgtttgcaccagttacggcaactgaccccgctgccggataccctgtttgatagctggatcctcacggcgattcatcgcttcgccacgttggtacaactgctacccgcctcacaaagtcatcaccattccacttctggcggactactggaccattcgctggaagttgcctgcaacgccatccgactgcgccagggttatctgctgccaccggaagcgggtgcggaagaacaggcccggcaggccagcgcatggacggtcgcagtggtctgcgcggcattgctgcacgatacgggaaaaatcgtcgtggatatggagattcatcaacgtgatggaatccgctggcatccgtggcaaggtaatctggcgcagccttatcgctggcagtaccagagccacggtcgcgattatcatctgcaccctgcggctggagcaatgctgattaatcagttgataccctcgccattactggactggctggccggatacccggcggcttttgcgtccctgatttatcagctcaccggacactacgaacgggctggcgcactggctgaactggtgcagcaggccgataaagcctctgtcgcccgatacttgggcggcgatatcaaaaccgcgctggcgcaaaagccctcgtccttcccccagcagcttcttacagccttacggtcgctggtacagaacgattaccggctcaataatcccgaatgcggatccgatggctggttgacggaggatgcgctgtggcttatcagcaaaaccaccgccgaccgggttcgcgcctggctgctccagcatggcgtatctagtgtgccggaaaacaataaccgcctgtttgacgaactgctgacgcatcagcttatcgttgccaatgaggataaagcgatctggcgctgcattatccgatcggataagggctggtcgcccgttgaaccgctgacgctgctgcgcctgacgccgtctgcaatctgggaacagggagaacaacgccccaccagttttgccggtgatgtgacaccggtaagtgaagcagcacttgcccctgaacttagcgcacccactcaaccgctgccggatatagcagatgacccaaggcttggtgacaataacaacttcctgcagtggctgaagaaccacaccagcccttcaggcacggtgaatacccggaacggcaaggtacatgtggtggaaaaccatcttttcttgatttcgccggggatctttaagacatacgcagcagaaactacaggcgataccggcgacggctggaagctggcacagcgaatgtttcaggagtcagggctggccctgcgctgtaatgatgacagttttatctggacctgcgaggtttgcgcaccacaaaagaaaaatagtcagttgaaagggtttctgatggaggatcctgggctggtacttggagagataataccggtgaataacccgtggctgaagctggttcccgcaatggaataa

SEQ ID NO: 178563 - DNA, 726 bp, Klebsiella oxytoca
atggcacccggaacagcagtaagaatggagaaagacgccggacgtgtagtggtcgatggtggagacgtacgcctctcttttgcgcgggataaacatcagggcgtacgcaaacaggaccagacttacacagtggaactgatcgttaaagaggtggacagcagcattgatgcgctgcaacaccggcttgaaacattgctgcgagcgacagaagcgctgaagaataaacgcaaaactgtgaaatctggcaatgttgaaactctgctgtcattgtttaaaacggctctggaaacagaaccacaggaaaaaggtttacatgggcttgtcgacgaggaaaggctggcgcaagcaagagcaaggctggttgacgagggctggttgaccgcgcgcgaaatcgcgcaactggcggggttttctgcgctgaatccttcttcgcaacccagcaagtggaagcgtgcaggccgtatttactcggtatataaaaaaggcgtaggcgaggtatttccccgctatgcgctggatgaaaatctgcggcctttacctgtggttaaagtgattctggatattctggccgaagtgaaaaccccatggggcatagccgagtggttcgccacttcaaatgatttgttagccgggaagatgccgcaggagatgttgctgcgttatccgtctaatgtaattcaggcagcggaagcggaagccgggcggatgcgggatggcgcagaataa

SEQ ID NO: 178564 - DNA, 708 bp, Klebsiella oxytoca
atggcgcagaataaatccgccaggaacgagtttggtacgccgcaggttcttgtagcgtgcatcgcgtcgcctccggacaatatagtggtgaacagggttattctgccgccggatagccgattgcaccgctgccattcccttcagtggcctggcgatagtttcaatctaggaagagagctgcaatcctgggaatatggcgcacgcttcagctcctttaaggatgatgcagggcaatatgttccctggctgtatgcagcaggttcactgcagggcgcgctggcggagaccgtgtttcacgatcttatcggcgaagcacggacaggctttctcagcctcaggcctttcagaaactggggctacacggaacttgccagtaccagaaaactgcaactagctagtctgaagtcgcaagatctatatcgcatgggcaccagtaaggctgacttgatcgagagcggaaggctgctgtatacgcagactcgcctgtgggcacgggcaatatatcttcagcattctggtatcgatggactggtctggaaatcgcggcagcatgatgacagtgatgcatttgtgctgttcggtgacagggttaaaccgggagatctgcgtatcgccagtgcaacagttcgctttacggatgatgtttccacaggatacgaaatacagcagatggcacagcggcttggcgtcattctttctgtggaataa

SEQ ID NO: 178565 - DNA, 372 bp, Klebsiella oxytoca
atgggactcgatctcttctttttcgaacgggaaaaaaacgcgcccgatgaaagccagtacaccagagtgggttatttccgcaaggtgaacccgttactcaaatgggtggataaacacgttgggctggtgcgaaaccaggtactgttagaagtcaccaaagcacatttgcaggcgcttctgagtgacctgcagagcctgacgccggataactgcggcgcggtttatcccacgattgacggctttttctatggatataccgattatggagaacactactggaaagacgttcgcgccgtcacccactgggtgaaagagacgctggagacgtttgattttgagcgagacaggctgatgttttatgcttggtggtaa

SEQ ID NO: 178566 - DNA, 906 bp, Klebsiella oxytoca
atggacagaagcaacgatatctaccagaaagtcaccgaccagatcattgctgagctggaaaacggcaatgtgccgtggatccgcccgtggcgcgatggcgagccgccgttcccgatcaatgcgttatccggtcgtccgtatcatggcatcaacgtgccactgctgtggaacagcgccgacaagcagagtttcgccagtgaccgctggctgacgttccatcaggtcagcgcgctcggcgggcaggtgcgccggggggagaaatcctctctggcggtgttgtatctgccgcgcacacaggaagagaccgacgcactcggccagccgttgctggataaagacggcgagccgaaggtgcggcatttcgggatcattcgtgaatttcggctgtttaacctgtcgcagtgcgacggcctgccgcagtcgctatccgagccgtttacccggcccgcagagcctgtggagatggccgaagccattgcgatgaatagcggcgtaacgctgcgccatcgccgccagtcgaaagcgtattacaaacccgcgaccgacctggtgatgatgccgcacccgcagcagtttgaaagcaatgaggcgtactacgccacgctgttacatgaactgacgcacgccaccggacacgcttcacgcctgaaccgccccggtattgccggagcggaacgcaccgaagcactctacgctgctgaagagttagtggcggagatggggagcgccttcctgtgcgcccattgcggcattcagggcaggctccagcacgccagctatatcggctactggctggatatcctgcgccaggacaagcgggcagtgatccgcgccagcggtatggcgcgccacgccagtgaatggctgctcaacgctgtaccacaaccctgtcagcttagcgcctga

SEQ ID NO: 178567 - DNA, 291 bp, Klebsiella oxytoca
atgtcgcttttcgataaaaaaccgtcgttaatgccggtggttatcgcccctgatgtctggcaatccgctgtggaatttcccgccgacccgcagcaggtggaagaacggctgggcaatctgttgctcgccgtactgctgaccctgcgcaccgccgggacatcccgcaagaaagccacctttacgatctactgccagccgccacagggcgatatgaaagtccctgtcgcattaccactatcgctcaactatcacggccactatgtgcaggtctcgatggctgaacaggcataa

SEQ ID NO: 178568 - DNA, 201 bp, Klebsiella oxytoca
atgaaccaacaagatataaacgcattaaagaattttgattttctggcgcgcagttttgcccgtatgcacgccctgggccagccagtagatatcgatgccgtgaccggcaatatgagtgatgaacagcaagcatggttccgggagcgatacaaccactaccgaaagcaggctgagcgggcgatagtgatagaactgcggtga

SEQ ID NO: 178569 - DNA, 873 bp, Klebsiella oxytoca
atgatctctccagaaacgctgcaaaccgccatctctaacgtctctgtctggcgtcagggtgacgtatgcgcgccgcataaaccgctgctgctgttgtatgtactgtcgcagtacaaagcaggccattcacgcctgtttaactacggcctggagatccacgaaccgcttactcgcctgctgaaagagtttggccccaagcgacgcaccgactatcccaatatgccgttctggcggctgcgaaccgacggcttctgggagatcgctcacgcagaaggttgcaaaccgcgcaagggcaatactcagccgacaaagaaagaactgattgataaccaggtagcgggcggcttcgatgaagcggcttaccagcaattgctggcacatccagagatgatcgaccaactggctcagaagatcctcacggatcgcttcccggaaagtattcagcggatcctggccaaccagctgggattcgattttatcgatcgctccaggaaccgcgatccgcgtttcagggatatcgttcttcgcgcttaccactcacggtgcgcgttctgtggttacgatctccggctggatggcgcgctggttggtattgaagcggcgcatattcactggaaagcgtacggtggtccgtgcgtggtaaataatggcctggcgctctgtacattacaccatgacgcgtttgatatgggggcgttcggactggatgagagtatgaccatccgcatctctggcggcgtcagtcgtagtccggtggtagaccatctgttctggcaccgggacggccagcagttattccttccttatgacaaaacgcagtggcctgctgaacagtatgtcggctggcaccgtaaacagattttcaaagcctga

SEQ ID NO: 178570 - DNA, 1503 bp, Klebsiella oxytoca
atgaccgccaacagctatttcgagtatgtgctcaccctgctcggctggctggtgagcaacggcgtgtggcagacgctgaccgccaccgggctgttcgccctgcccctgctggcgaagctgattgccctgtggctgaaggcgcgcggccagggggctgatgaaggcaacgtcgcccgcctgctggtcgtctgggtggagcactcgctctacagtgctctgctggtgatcctctttgcgggcgtgccgttcctcaatgtcgatatcaacaccctcacctacgacagccagcgcacaaaacagtgcggatggtcggtggtgcagcccggcgattccggctatgcgccgctcatcaacgaacttagcggccagagcgcctcggtgccggtgtggtggtacttcactcatgcgcttggcaaaggcatcaccagcgccgccgtcgcggtactgccctgcaagccggacttgcgccagttgcgctttgaggtgcagcacacccggatcgccgatccggcgctggcgcaggaattacaggatttcgttaacgactgctatgggccgtcgcgagtacgactcaagcgactaggcagtgatatcagcgaggagcaaagccgggaagtggactgggtgggatcgtctttttacctctccacgccgggctattacgaccacgaacactcccgttcgccccgcgccgcctggccttatgacgccagccgcgatgatggcctgagcgatacgggtggtggaggctatccagcgtgtaaggagtggtggtccgatggcgatgcggggctgaaaaaccgcctattaaagcaggccgataccacgctctggcagcaactacaaaaactggggcagtcgaaagaggagtacgaagaagcagtgctgcgctcgctggtgagcccgcgcaatatgcaggtgtcacagggcgggctggtgtacaacgggtttggtgggagtgcgggggagaatctcagccagacgcagttactgagtcgtgtgggcgggatcatcggcgcggggctttccagctacgccctgtttccggcgtttgataatgtccgccaggcgctgccgatggtgcaggcgttcctcgaaatggcgctggtaatttgtattccggtgctcctgctgttctcggcatgggatcttaaaactgtcatcacgctaagctttgtgcagttcgccctgttctttcttaccttctggtgggaactggcccgctggctggataactggctgatgcagatgatgtacgacagcgacacccactcctacttcaacctctggggcctgcaaaacacctccgacgatctgattgtgaatatcattatgggcgtgatgttcctggtgttacccgcattctggctgggggcgctgacgtgggcgggcgtcaggatcggcgcggccatcgctggggtgatgggcagcgcggtcggcgatatccgcagcgctggtgaacaggtcgggaaaatgatcgtcagtaaaacacgcattccctga

SEQ ID NO: 178571 - DNA, 1362 bp, Klebsiella oxytoca
atgagagttctttgcctggtcttactgtttttcgcctgggtttgcgtggcggcagacgactacagcttccgcacgcgaggcgcggttgacgacctgctttactatcagattggcggcggcgaggcagtcatgccgcctccggtacgccgcagcccctcgccgcttagcttaggtcttggctggaacgccgatatgatgtgcggcaatttcgacatcgacaccacggtgcgcaaccagctaaacggcatcaccgatggcttccagcagctaatgggcaacgttatccagagtgccaccggggcggtcgccagcttgcccgcgatgattatccagcgcgccaatccgcagctttatgatctactgaccaacggcgtgctgcaggggcggctggattttgataaatcgctgctgaactgccagaaaatggcggagaagatgaccgatttagcgacagattccgcctggttttccggagccaaagctgagaattaccagtccctcgcagccagtgataacgacgccatccgcaccgaccagaaagcggcaaaagaagccgcagaaaagggtaaacgctgggtgggcggtgaaaagcgcggcggtaaaagccagccgccgattaaggtagtccatgacgccaccgccgcaggctggaatattctcaaccagcagcccgccaccagcaccacgtctcttacctcctccgaatgcgacggagaactttgtagcacctggacatcccctgaagaggccgccggatggatgacccgcgtggtcggcgagcagaccatcagcgtggcgcaggccaccgacgatccggatgcgcgttccggcgcgcaggcggggatcggcctgcatccgctgatcgacgaagaaaaggcgaagatcctgccccttctgacggatctggttagtggcagtcagaaacccggcttcgacaatctggcgaaagcctccggcggatccatgcagcttacccgcggcgtggtcgaggcgctacgcgacgatccggatgttgccgtcctcactgaacggctggcgggagaactggcgctggcccgcattaccgagcaggcactgctggcccggcgcacgctgctcgcgggcatgcgcgaaccgaatatcgccaacgtcaaagaggcgcaggagagcctgggcaaaaccaccgcccagctggatgaagagctgagccagttaaagctggaactcgatttccgccaggcgctgacgcgcaataccgccagccagatcctgcaacgcaaacagcagcgcgaccagcttcagggccaggcggtggaggtgccggacgacagcgaccgccgcctgcacaacctcaataacccgcagccggacagtccgcgatga

SEQ ID NO: 178572 - DNA, 933 bp, Klebsiella oxytoca
atgccagaccgctttcctcttctgttgcccctgatgctgtgcgccgctttcccgctcagagccattaccacgccggaaattgcagcctccgccctgtcgccggactgcgtgaactaccgggtggtcggcctgtgctactggctctattgcacgccgttcggctgtacggtgcgcacgtcggtgaaggtcagtcatttccgcccggatctggtggtatcggcttacagcaacaccgggcagaatccgtgggcggagatgtcgttactcagcccaccgttgcccggcgttgccgaaggcggtggtgatacgaatccccgtacggcaaaccagcacagtaagatccgctttaagaatgccgatgccatcggctttccggcgggggatgaactggcgcggtttttcacgcaattcggctatatctgctcaccttcatcgcagccttttcaaccgtactttctgagccagctggatgcgctggcatggcgcagcggtgtgccggaaatgacatacccggaggctctgacgccaggcatgcgggaagtcggtcggaacggtgatatgtggggcaatatctacccgcgcgccggggccatcagccagacgcacgactataaagccgccgccgttatcgcccagcgcgtggccgatctggtgacgcgtaccgggcaaccgcatatctacacaccactgacagcctcatcgcgcgccgggtactggccgccctccccggttatcgaaggcgacaacgataaccatcgctggcagatgctcacgccgaaaaaatccacctcctgttcggtgtttccggatggcagcaccaccgacacctacgccgacaagctggcggaggatggggcgtacgcctggacgctgtggcggccctataaatgctgtccgcgccgggggcaaaccttcctcggcagtacgggttaa

SEQ ID NO: 178573 - DNA, 591 bp, Klebsiella oxytoca
atgccagtaaaacgaaaacatctgacccgccatgaagtggggcagatactgcttgcagcggacagagggatccattttgagcgggattactgcctgattcagacgtgttttttacacggtctgcgggtcagtgaactgtgcggaatgcgcctgtcggatatcgatttggtagggcgttcggtgtatgtccgacggcttaaaaacagtctctcaacgcagcaaccgctgtttgtggaagagcttccggcgctgaaccgctggttgcgtgtccgtagccgctggcgggatgcggattctgactggctttttttgtcgcagaaagggggagcgttgtcgcgccagcaggtgcggatgttgcttaagcaatatggggaaaaggcaggcgtgagcattccggcacatccgcatatgctgcgtcatggctgtggctatgccctggcggatttaggcaaggatacgcggctgatacaggattatctcgggcatcgtaatattcagcataccgtcatttatacggcgacaaatacgctgagatttcgaaatatctggggaggtgtgagagaaaacaatacttttcgaaccagaatgtaa

SEQ ID NO: 178574 - DNA, 513 bp, Klebsiella oxytoca
atgaaaaaaacgatgttaagcgcgtgttttatgctggcggcggctaatgccatggccgccgacggcaccatccatttcaccggtagcattaccgaccagacctgcaagatcgacactggctcccagaatctaccggtgaacctcggcaatgttgcccaaaccgcccttaacggggcgaaggggatgagagcggcgccaacgcaatttaccatcaacgtgagcgagtgcccggaaacggtcaccggtgcaaatgtgaaatttgacgggacatccgataacaatgaccagagcctgctggcgctggacagtggcacgggcatcgccaccggagtcgggatccagatcgcagataaaaacggcacggccatcccactgcactccgcttcatccgactacaccctcgcagaaggcgcaaacgcgctcgactttgtcgcccgctatgtctccacaggcccggcggtcaccaccggtacagcaaacggtacctctgagttcaccatcatttacaaataa

SEQ ID NO: 178575 - DNA, 681 bp, Klebsiella oxytoca
atgaacaggtatgcagacattttgctggcgctattgctggccgtatttaccgtgcaggcacaggccgggattgtcattggcgggacacgggtcatttataacggcgacaaaaaagagacctccgcttctatacggaaccccgacagatccggcgtctggctcgtgcagagctgggtagacagcgggatgaagggaaataaaacgccgtttatcgtcacgccgccgttgtttcgcattaatccaggggaagagaacatcctgcgcattgtgcgcactggagggagcctgcctgaagatcgggaatcggtgttctggctgaacgtgaaatccattcccgccaccgacgacagcgtgccgcataacaacgttctgcaggtggtggtgaaatcccgcctgaaactcttttaccgcccggcggggctggaagggcagccggagaccgcttaccaccatctgtctgtctcccgtagcggcaatcgtcttactgtcagcaaccccacgccttactacgtcacgttattcaccttaaaggcggacgggcaggagatcaaagaggccgatatggtgccgccgaagggcagcgtcagcttcacgctgccatcggccacggcgtccacggtgacctggcaggcgatcagtgattacggcggcgtcagccagaccgaaagccgcaagctctga

SEQ ID NO: 178576 - DNA, 2508 bp, Klebsiella oxytoca
atgaataacccgaattcccgactgatgatcttcctgctggcgctgttgctgattatggtgctcctgttgggttacctgagtcatgcggaagcccgcgagattttcaatacccacgcgctggagctggacagcccgggccagccagttgtggacttatctgcctttgccgaagccgatggccagctaccgggtacttaccgggtgacggtgtatgtgaacggcgagcagcagggcgaagcgcaggacattgccttcgttgccggaccggataaaaaactcatcgcacagttaacccccgcaatgctgaaagcctggggcgtgaacaccgccgcctttcctgcgctggccgcactgccagcggacaaaccgttggaggatattggccactatatcccgatggcttccagcgaactgcgtttcagtaaactgcaactgaacctcagtatcccgcaggcggcgatgagcgctaccgcgcgcggctgggtggatccgtccgaatgggacgagggcgtacctgccgcgctgctgaactataacctcagcggcagcaatacctggcgcgacggggaaaatggctccgatgataactactacgccaacctgcagagcgggctgaacctcggcgcgtggcggctgcgcaactattccacctggaattacgacgaggataacggcagccactgggattcagtgaacacgtatcttcagcgggatatccagcgcctgcaggggcagctcacgttcggcgacagctatacgccttccgatatctttgacagcgtgcagtttcgcggcgcgcaactggcgtcggatgacaatatgctgccggacagcctgcgcggttttgccccgatcatccgcggtattgcgcagtcgaacgcccaggtcaccattaagcagaacggctacaccatctaccagagctacgtcgcgccgggggccttcgccatcagcgatctctatccgacatccggcagcggcgatctggaggtcacgattaaagaggccgatggcagcgagcgaaccttcatccagccgttctcagcggtaccaattatgcagcgtgagggccgcctgaagtatgccctcaccgccgggaaataccgcagcggcaacagcgacagcgatgagccggagttcggccagataacagcgatttacggcctgccgcatgccattacgatttatggcggcacgctgtactcggaggactatcagtccggggcggcagggctggggtttggtctcggcgagctgggttcagtctccgccgatatcaccgctgcccacaccacgctgaataacgatgaaactcacgacggtcagtcgtaccgggtacagtactcaaaagattttcaggccaccgataccagcttcaccctggcggcgtatcgctattccacggaagggttctataccttccaggaagcaaacgacttacgctcggacagcgatgatggctggcggctgacgtacaacaaacgccagaaactccagctcgatctcacccagagtatcggcagcttcggttcattctttgtttccggctaccagcaggattactggcatgaggacggttacgagcgcaccctcagcaccggctggaacggcaatatcaatggcattagctacagcgtctcttacagctacagcgactacccggacagcacccagcctgccgaccagcaactggcgttcagcatccaggtgccgttcagccgctttatgccgaacgcgtgggccagctacagcgtcaacaccgcgaagcacggcgacacccgccagcaggtgggcctcaatggaacggcgcttgccgataacaacctcagctacagcctccagcagagctacaccaaccacggtgtgggcggctccggcaatatcaacgccgactacaaaggcgggcagggggaaatcaccggcggctacaactatgacgacgatatgcagcaggtgaactatggcctgaaaggggggattgtcgtccatccgcatggcatcacgctttcccagccgctcggtgactcgcttgccatcgtgaaagcgcccggcgcggatgacgcgaaggtgcagaacaataccggggtatataccgactggcgcggctatgcggtcgtgccatacgtcaacgcctaccggaaaaaccgtatcgctctggacaccagcacgcttggcgatggagtcgacatcgacaccgccgtgcagaccgtcacgccgacgcagggcgcagtggtaatggcggatttcaacacccgcgtcggacggcgcgtactgatgacgctgctttaccgtgggctgccggtgccgttcggcgctcaggcgaaaatgaaggaaggcggcagcggcatcgttggcgatgacggccaggtgtacctgacaggcgtcccggatgaaggtgatatcacggtgaactggaacggaaaacaacagtgcgtggtgcattaccggctaccagagagtgccgcaaacgcgccggtaacggaaaccgaacaggagtgccgggaatga

SEQ ID NO: 178577 - DNA, 954 bp, Klebsiella oxytoca
atgaaaggattattaacatcaggctacctgttgctggcgctgtggctggcggcttttggcgtacacgcctcctgtagtttcgcttccggagtgagtggcgaaattccgggttatgtcagtttcggcaatgtggcggtgcagcgtgatgcggcggtgggcagtgtcatcgccacggccactacgggggcgtataacggcggaaatacgatagcaggatgtagcgaagcatggacctatcgctgggaactgagtaaatggggcacgttgagcagtctcggaagcaatatctataacactaacctccccggagttggcatcagactgacgaacactgcttcaggaaaaatgcttccctatgaccagagtatgagcccaaatgcttatgttgttgttagtggcaacggcatcaaagcggagttaatcaaaacgggcgatattacgggcggaaccctggataccggtatgctggcgcgggcctcggtggcaaaccaattttattttgccaatgtcaccctgaatggcacaaataccattacctctgaatcctgctccgttaccactaacccggttaatgtcccgctgggcggccatgataaaagtgagttcagcggtccgggtaccggcacggcctggcagacattcaatatcaatctgagttgtgttcagggcgcgcgaattaatgtgcgtattgacgccacagcagacagcgacgccggcgtacccggcgtcattaaactcgacagcgattccgttaatgccagcggtgttggcgttcagctctggtatcgctacgaagacagcccggtacagttaggccaggagcggtattactacacctcgccatcaggcggtaacgaatatgttcagcttcaggcgcgctattaccagacgacgcagagcgtaacggccgggaaagcgaatgccacagcgacgttcacgctgacctataagtaa

SEQ ID NO: 178578 - DNA, 960 bp, Klebsiella oxytoca
atgaaaaaaattttatgttttctgctgctgatgctggtggtttcacccgccgtccgtgccagttgttcattttacagcggtgtttctggagaagtgccgggctatctgaactttggcaacgtagttgtccagcgtgatgtaccggtcggcagcgtacttgcgacagcagtaaccggcgcttataacaatggcaatgccattgcaggatgcaccagggaggcctggaccgctcgctgggagttgacgcagtgggggacgctcagtggctatggcaacggcgtctacaataccaacctcgttggtgtcggtttacgtctgagtgcagcacaaacgggcaaagtactgccctatgaaggcagttacccctacaacgccggaggctcatgggcatctattcctggcgatggcatcaaaggggagcttatcaaaacgggagatatcaccagtggcacgttaaccgacggtatgctggcgcgagcctcggtagtgaaccagttttattttgctaacgtcacgcttaacggcaccaacactgtcactgcagcctcctgctcggtgacctcggtggatgagccggtccagcttggcgatcacaacaggcaggagttcagcggtgtgggctacaccacggagtggaaggcgtttaatatcgtgctggactgcaataaaagcgcgcatatttatgtgcaaattgatgccacaaaagatgcgtcgaatgcgccaggcgtgatggccattgattccgaaagcggcggtaccgcggcgacgggcgttggggttcagctttacttcgcgccggacaacagcgcggcgcagttcgggcaggtaaaggattattatacttcgcccaatggcgggatggagaccgttcagctcaaggcgcgttattaccagacggcctcagcggtgacggcagggcccgccaatgccacggcgacgtttacgctgacgtataaatag

SEQ ID NO: 178579 - DNA, 1539 bp, Klebsiella oxytoca
atgcaaataaaatcgaggagatatattattaatcccgcagtgaatacctggctggccgccgaaaaagccgccatcacccactttgactcttcccagtccgactcgctgtctttcgcgatcccgactggtgacagcaccgtccattcatctgtaccgctcgcgccagtgctgccgcaggccattaacgggccgatcaacatcatgacgctggcctcgccttccccggattatatgtggggcgtcacctggtccggcattacctatatcagcaccagcaacggtgcgtttacgccgctggcgcgcctgcccgtcccgggcatcactcagttcccgatcgatctgctgaccacgctgctcacccagccgctgaataccctgagcgtggtggagaatatcacctcgcagctgttccccatcaccccctccggcgggatcaacagcgcctactgcctggtcgataacaccaacacgctgttcgccaactatggcacgcaggtgtacgccgtcggcctgaatgtccccggcctgccgctgctggggatcggtattaagcgcacgctggacacctcgtcgtttatcccggcaggcgatgccatcaccggtctggtgctgacctacgatggctatctggtcgtcgtcggcacccgctcggtctccgtggtggcgcgctccttctccggcccggttcataccatcacgctgggcgcggatgaatacgtctccaactcggcggcggtggacgaaaatggcggtatttatgtggtctccgataagaagatgcataaggtcatctggacgggaagcacgctgtcagataatccggcagacggcgcatgggtagcggattaccctaccggcgacacctacccgaccatttttggctccgggtccggctccacgccgacgctgatggggtttggcagcaatgcggacaaactggtggtgatcaccgacggcaaaagacgcatgagcctggtggccttctggcgcgatgccatcccgacagggttcaccagccgtatcgccggcagtattccggtcacctgtgggctgccgctgtcgaccgaatatattcagagcgatcagtcggtagccgtgcatgattacggcgcttttgtcgtcaataacgtcggggcggatcccagcaccggtaaccggctcaccgatgcgctggcgcgcggcccgctgcttgactcgccgcagggcgtggagcgttttgagtgggatccggtcagccatagctggagttcaacgtgggccagggcggatatctgctccaacaccatgatcccggctatcagctctgccagcaacaccgtgtataccagcggttatttccgcggtgatggcggctggaaagtggtagggatgaactggcagaccggggctaccgtccataacacgatttttggcgacaatatctgcggcaatgggatttacgcccagatggagtttatgccgaacggtgatttgctgatgaacagcatcatcggcccaacgcgggtgcaactgccgggcggcgtggtacagccgttatga

SEQ ID NO: 178580 - DNA, 369 bp, Klebsiella oxytoca
atgcacgctgaactggccgacggcagttcgtgggtggtggaaaactcgtgggtgctgccggagggctttccgaaggacaacgacgggcgtatcgatattctctgcgaggcaacgtatatccgcagcacttcacagcatcgcgggctggaaatcaccacgccgggcatgacgctcacgcccaacagctatttcatcaactaccgcaacggcgttgccagcggttttggtatcgacccgatcaatgattttgtgcgggcggtcatacataaagcgccttacccggtcaccgcggtggacggactggtggtcagccgtatttgtgaggcggaacatcgcagcctggagagcggtcagcccgtctatttataa

SEQ ID NO: 178581 - DNA, 1053 bp, Klebsiella oxytoca
atgaagtccggtaaaacagctgttattaccacacttttagttgcttttagcctttttagtgcctcagtatctgcgaccgcgtcaataactcagggagcttcgtttgattatcaggctgcaaatactcagcgtgatgaggtccatcgttatttgactttggcgcatcaggcttatattgagtgggatatgccagctcttgagaaaagcctgaaagctgcatatcagcttgctccacatcggctggatattctgttcagcatcgcagcgacccaggtctgggagaaccggctggatgaggcgctgaagacgtacaataatatcctcaaaatatcgccgaatgatattgatgcattgacgtatcaggcgttgtacactcaggctcagggcaggagtgataatcctgctttattaatgctgaaaaaaaactttccttcacgtgcggacgatttgaacaagatttttgccacggtaaaggacacattacgcacaccggttgtcgatcaacttcctgcttcatttaaatccgatacgccagctgtgattgttacgctgggttatgctctggaaagcaatggaatgatggcgtctacgctgactgaacgtctcaacaagacgctggaggtggcgaaggcgcttcctgatgccaaaattattgtcactggcggcgtgcccaggaacggtaaaaatgaaggcattgagatgaaaggctggctaatagaaaagggtatcgatcaggcaagaattatcgatgagaattatgcccgcgatactgtcgagaacatgatctattcccgctatatcatcaacgaattgaagataaaaaatgtggtgttgattagctcaggaacgcatgtccggcgaggcaaagccattctggaagtactgggctggaacagcggcggcgatttcaatgtccagatggtagctgcgccggacaagccgttggcgcaattgcagaatgaagatgaccgtatacctggaatttatcgtgatgccttgcgtgcttacggtctgtacatgatgcgagctgcgccggagttgctggaaatctga

SEQ ID NO: 178582 - DNA, 1611 bp, Klebsiella oxytoca
atgaaaaaacttaaggaaaaaaaagtaaaatcggaagacgttagtcagactgaattctgggcatggaataatgtcccatctcagggaacctggggaggttatgtttgtttacgacataattacccatcggatgacacagtattcgcctatgcctgttatgaatccgaaggatatactgattttaattttcacgcagatggcacaattaccccagttggttatgatcagatgtgcgttacgtcaacagggagttattcctatctgaaaatcagaaactgcaacggcggcctgagtcagaaatggtatttatacagcaacaacagccaggatttcacattactctatagttctgccgaaaatgaatgtgtcacgtttggttataccggactgtggtatgcgaaagcctatggcctggcttatacctcctacggcagcgattgtacaagtagttattcaaactggcaggtgagcaataatacggtaccgggtcatcgtccaaataatacggcattcaccaccatcccctcctctttctggttcccgctggaaggcaaaacaatcacaaatctgcagggttacgccgtaaacctcacggatactaaatatatctacccggccacaccagatacccgttccataccggcgaattgtagccttgccaccagtgacgtcgcgccaggatggacgccggatagctgtcgtgccgcaatggccacctgttcaaaactgtatccaaatggggtaggcaccggcgatcattaccgacgaatcgatcagcctatgtatacggttgaacagatgtttaccactatggcggatcaaaattttaactatatgattaacggtagctggtacgatttacgcggcgcaaactatcctccagagcagcctgcggtaatgtataccgaaccctgtacccggctcttcggctggcagtacgccgatggtgtacaactatccagtcccgacgatcgggattatgattcgtccggggaagcccgttcttatctggatgcgctggtattctcggctcatcacaccacctatgaaagcaaggtagattactatcaggtcagtatcgcggaaaaccccaaaaaatataatccatccggccccagcatggacactcagacactggtggcgaatggcgcgcgttgggcgctatcaggattactgatcgccaaagataaaaccatctatccaccgtgctcagcgacggaaacgacagcctgcgtcccctccagcgccagccctgaaaaacaggcggccagaaccgtaatcggactcagctatgacagcaccagacaacagcagagcatggttatggtagtaatccaggggggacgcgcctccggccaaggtctcaacacggcggaagctgcttattttctgatgagcacatacggtgccagcgatgtctttttgctggacggctccggctccagccagctggtgtctaaccagacgccaacattacatgggggcgagattacgcgctgtaccgatctccccaacctgtattgcactgttcctggcgatatatatgacaatcagcctcgtctgagacccatcggcaacatactgggcttacgttttgccactacgccgtag

SEQ ID NO: 178583 - DNA, 360 bp, Klebsiella oxytoca
atggccgatggcagttcatgggtggtcgagaattcgtgggtgctgccggaggggtttccgaaggacaacgacgggcgcatcgagatcctctgcgggacgacatatatccgcagcacctcacagcatcggggactggaaattaccaccccggacaagacgctcacgcccaacagctatttcatcaactaccgcaacggcgttgccagcggttttggtatcgaccccatcaatgattttgtgcaggcagtcaggcataaagcgccttacccggtcaccgcggtggacggactggcggtgagccgtatttgtgaggcggtacatcgcagccttgagacagggaaaccagtatcactggattaa

SEQ ID NO: 178584 - DNA, 318 bp, Klebsiella oxytoca
atgaaatttctgattaactggcctcctttgcgccaactgatacattatatccgggagcgttttacctttctggtcctgctctgctggccggcgatcatctggctggtttgccgggcgcttgtctggttaacggatggattgatggctcttctgggtaaacccaccgaccactcgtttaccgtgtatcttcagccgcttatgacgctaagtgcgctgctgagaatttccgtcagctgggtgctgctgctgtttatcctgttcagcatggcgatgggattcacctgggctctgcggcgctttatgaatcgccataaatag

SEQ ID NO: 178585 - DNA, 585 bp, Klebsiella oxytoca
atgattcgggccatgaatatggaagcccaacatcgtaaaaaagatcccgtccgcctgcataagcaactgctggaatccgccgccaccatcgccggccgggacggtatcgcctcgctgtcgctgaacgccgtcgcgcgcgaagcgggcgtcagcaaaggcggtttactgcaccatttccccaacaagcaggcgctgattttcgccctctttgcccgcctgctggcgattatggaagaggcgattgcagaacttatggccgcggataacgtctcttatggccgctttacccgcgcctatctgcgctatctgtcggcgccggaactcacggatacccaggagagccgccagctaatggtgctgtcgctggccatgccggatgaaccggtgctgcgaaaatgctggcgcgactggatgctggaccatctggcgaaaggcgatgaactggacaatagccataccggcacgctggtgcgctatgcggcggacggcatctggctatcggaattaaccgaggggcgcaccatgagccccgggcaccggcagtcgctggtcagcgatctgacgaagatgacgcttcctgcgtga

SEQ ID NO: 178586 - DNA, 291 bp, Klebsiella oxytoca
atgatgccaatggagtttgaatgggatgcaaacaaggcaagaagtaatctaagaaaacatggaatccggtttgaagaagcggtgctcgtctttgacgatccccggcatctttcccgacaggatcgttatgagaatggtgaatatcgctggcaaactatcggtctcgttcatggggtcattgttatcatggttgcgcattcggtccgttttgaaagtggaacagaggtcattcgtattatcagcgcccggaaggcggacagcaaagagagaaatcgttatgaacatggttaa

SEQ ID NO: 178587 - DNA, 303 bp, Klebsiella oxytoca
atgaacatggttaaacataaacgtgacaatccggatacgcttacggctaagcgagacgatgagcttaaagcgctggccaacaaaacggatgatgaaatcgattatagcgatattcccgccacagacgacgcacagtggtcagatgccgtacgcggtaaattttaccgaccgctaaaaactcaggcttctgtccgtattgatgccgatattatggagtggcttaaacgtcccgggaaaggttatcaaacgcgactgaatgcgatcttaagagaagcgatgattcgcgatcttaacaagaaatag

SEQ ID NO: 178588 - DNA, 1344 bp, Klebsiella oxytoca
atgagcgtcgaacagtttggctataagcaggagctgcaccgggcgctgacgttccgcgacctgctggtctacggcatgatttttatggtacccatcgcgccgtttggcgtctttggctacgtctgggacggcgcgcagggcatggtggcgctggcctatctcatcggcatggtggcgatgttctttaccgccatgagctactggtcgatgtcgcgcgcgttcccggtctccggctcggtatacgcctatgcccagcgcgggattcatcccattgtcggcttttttgccggctggctgatcctgctggactatattctggtgccgtcgctgctctatatcgtcagcgcggcggcgctggcgcccatgctgccgggcgtgccgggctggctgtggattgtcggctttatcgcgattaacagcctgattaacctgcgcggcattacctttaccgcacgcgccaataacacgattctgatcgcggagatcgtggtgctgtcagtgttcgtcgtgctggggctgattgcgctctactccggcgccggggcgggccatctgaccctcgacccgctctacaacgccgataagttcagcctgccgctggtgatgggcgcggtctccatcgccgtgctctcgttcctcggcttcgacgggatctccacgctgtcggaggaaacgaaaggcggcgtggataccgtgggtaaggcgtcgctgggcgcgctgatgctggtcggttcgctgtttatcctgcagacgtggattgccgccgatttggcgcagggcatgacgttcagcagcctcgataccgccttctacgataccgcgaatctggcgggcggcggctggctgaagtatgtcaccatgtggtcgacggtgatctcctgggggattgctaacgccctggtggcgcaggccgccgtgtcgcgtattctgtttgcgatggcgcgcgacaagcagctgccgcagctgctggcgaaagtgcacccgcggctgaaaacgccttacgtcagcaccctgtttgtggcgctgatttcgctggcttccggcctctggttctacggcgatatcgataacctcagccggctggtgaacttcggcgcgctgatgggcttcctggtgctgcacattgccgtgataaaccattacatcattcgccagaaatcgcgcaatctggtggtacacctgctgttcccggtggtggggctgtgcattatcggctttgtgatttatgaaatggacgcgcaggccaaggtgctggggctgagctggctggcggttggcgtggtctattacctgctgatgcgcctggtgctcaagcgcaatgtggaactgaagctggaaggctaa

SEQ ID NO: 178589 - DNA, 336 bp, Klebsiella oxytoca
atgactaccccgcattctattgcagaattcaccgatccagaagtctccccggaaaataaccgtaaaggcaccgtcagttacgcgagccgctttgaagatcgccagcgtatcccggcgattatcatgaagggccagtggctggcagccgccggttttgccaccggcgccaaaatcgatatcaaagtaatggaaggctgtatcgtgattaccgcgaagcagccggagccggaactggtggagtctctgcgccagctgcataagctgtcggcgcgcaagcaaaaacaggtgcaggcgttaatcggcgcgatcgccgggcagaaacgtaagctggcctaa

SEQ ID NO: 178590 - DNA, 1764 bp, Klebsiella oxytoca
atggcggtggaaaaactgattgtcgaccatatcgatacctggaccacggcgttgcaaacccgctccacagcggggcgcggcagctcgggtaagattgacctgtacggcattaagaagctgcgcgagctgattctggagctggcggtgcgcggcaagctggtgccgcaggatccgaacgacgaaccggcgtcggagctgctaaaacgtattgcggcggaaaaggccgagctggtgaagcaggggaaaattaaaaagcccaagccgctgccggagattagcgaggaagagaaaccgtttgagctgccggtaggatgggagtgggttcgactcgaaaagatttcgacacgaattggttccggaagtactcctaaaggaggaaaaaacgtttaccttgaaacaggagttccttttcttcggtcgcaaaatatatggaaccacggaattaaattagaagatattgcattcatttcctcccaaactcacaataacatgtcaaacacacatgtcatgcctaatgatatattgctaaatatcactggggcatcgcttggtcgctgttctatttttcccaagacgatatctgaagcgaatgtaaaccaacatgtcacaataattagacttgtatcagaagattatgtgccatttattcacctggccataatatcccctgttatacaacgagaaatttggcatcgtcaggttggaatggcaattgaagggttaagcaaaaaatctttagagtctttcatctttcctattcctcctaaaaatgaacaagaaagtataaataaaaaagttacggaactcatgtccctctgcgatcaactggaacagcattccctgaccagtctggacgcccatcaacagctggttgaaaccctgctaaccacgctaaccgacagccagaacgccgatgaactggccgaaaactgggcgcgtatcagcgagcatttcgacacgctgtttaacaccgaagccagcattgacgccttaaaacagaccattctacaactggcggtgatgggcaaactggtgccgcaggacccgaacgacgaaccggcttctgaactgctcaaacgtattgctcaggaaaaagcgcagttggtaaaagacgggaaaatgaaaaagcaaaaaccgttgccaccgattagtgatgaggaaaaaccgtttgaactgccagatggttgggtttggtgtcgtctgaatgatttatttagttttattactgatggagaccatcaagcgccaccaaaatcggatacaggtatcccctttctggttattggtaacttaaataaaggcattgtctcatttgatgaatgcaagtatgttcctatagactattatgaacgcttagattggtcgcgaaaaccatgtcaaggtgatgttttatatactgttactggttcatatgggattcctataatagttgataacaacgaacctttttgtgttcaacgacatgtagctatacttaaatcatgttctaatacaccagtcacgtatttaaggtatttattcctatccaaatatgcttatgcgtatgcagaaaaaattgctactggtatagctcaaaaaactgtacctttaaccggtcttcgcctaatgccaattcctgtgccaccaaatggaacactcctaaatataataaatttaattaacttagttgatgctatatctgcatccttgaagctcggaattcaatctgctaaaaaaaaccagctccatctggccgacgccctcaccgacgccgccatcaattaa

SEQ ID NO: 178591 - DNA, 1470 bp, Klebsiella oxytoca
atgtcaatcagctcggttatcaaatcattacaggacattatgcgcaaagacgccggcgtggacggcgatgcgcagcgcctcggccagctctcctggctgctgtttctgaaaatcttcgacgcccaggaagaggcgctggaactggagcaggataactaccaataccctattccgcagcgctacctgtggcgcacctgggcggcgaacgccgagggcattaccggcgacgccctgctggagttcgtcaatgacgacctgttcccaacgctgaaaaacctcaccgcccccatcgataaaaacccgcgcggctttgtggtcagacaggcgttcagcgatgcctataactacatgaaaaacggcaccctgctgcgtcaggtgatcaacaagctcaacgaaattgattttaccagtgccagcgaacgccacctgttcggcgacatttacgaacagatcctcaaagatctgcaatcggcgggcaatgccggtgagttttataccccgcgtgccgtcacccgctttatggtcgatcgcgtcgatccgaagctaggcgagtcgattatggacccggcctgcggcaccggcggcttcctcgcctgcgcattcgatcacgtaaaaaacaactacgtgaagagcgtggccgatcaccagacgctgcaacagcagatccacggcgtagagaaaaaacagctcccgcacctgctggcgaccaccaatatgctgctgcacggtatcgaagtgccggtgcaaattcgtcacgacaacaccctcaacaagccgctgtcgttgtgggatgaacagttggatgtgattgttaccaacccaccgttcggcggcaccgaagaagacggtatagagaagaacttcccggcagagatgcagacccgcgaaacggcggatctgttcctgcaactgattattgaagtgctggcgaaaaacggccgcgcggcggttgtactgccggacggtacgctgtttggcgaaggcgtgaaaaccaaaattaaaaagctgctcaccgaggagtgcaacctgcacaccatcgtgcgtctgccgaacggcgtgtttaacccgtacaccgggatcaaaaccaacctgctgttctttaccaaaggccagccgaccaaagatatctggttctacgagcacccgtacccggcgggcgtgaagaactacagcaaaaccaagccgatgaagtttgaggagttccaggccgagatcgactggtggggcaacgaggccgacggcttcgccagccgcgtcgagaacgagcaggcgtggaaggtcagcatcgacgaggtgattgcccgcaactttaacctcgatatcaaaaacccgcaccaggcggaaaccgtcagccacgatccggacgaactgctggcgcagtacgcgaagcagcaggaagcgatccagaccctgcgccaccagctgcgcgatatcctcggcgcggcgctctccggtaaggaggccaactga

SEQ ID NO: 178592 - DNA, 2430 bp, Klebsiella oxytoca
atggctgacctgaacctgagtaccctgacggaagcagacatcatcaccaaacgcgttatgcccgccatcctcgatgctggctggaacgacacaacgcaaatccgacaggaggtcaaactccgggacggtaaggtcatcgtacgcggcaaagtcgcggcacggagaacggtgaaatccgccgatatcgtgctgtattacaagccgggcattccgctggcggtcattgaagccaaagccaacaaacacgaaatcggcaaggggatgcagcagggcatcgagtatgcacacctgctggacgttcctttcgtcttcgccaccaacggcgatggttttattttccgcgatgccacggttgctgacggcgaactaatggaaaaaccgattaccctcggcgaattcccttctccttcggaactgtggcaaaaattatgcttatcaaaaggctacaccgcagcccagctcccggtgattactcaggactactacgacgacggcagcggcaaagcgccgcgttattaccagctacaggctatcaataaaacgattgaagccgtttccgccgggcagaaccgcgttctgctggtgatggcaaccggcaccggcaaaacctataccgccttccagatcatctggcgcttatggaaagcgaaaagtaagaagcggatcctgttcctcgccgatcgcaacattctggtcgatcagaccaaaaataacgacttcctgccgtttggcacggcgatgaccaaggtcaccgggcgcaccatcgacccggcctttgaaatccacctcgcgctgtaccaggccatcactggcccggaagaagaacaaaaagcctttaaacaggtagcgccggatttctttgacctgattgttatcgacgaatgccatcgcggcagcgcttcggaagacagcgcgtggcgcgaaatcctcgactatttcagcgccgccacgcagattggcttaaccgccacgccgaaagagactcatgaagtctccagcaccgattacttcggcgacccggtgtatatctactcgctgaaagaaggtatcgaagacggcttccttgctccctataaagtggtgcgcgtcgacatcgacgtcgatctccagggctggcgcccgaccaaaggtcagacggataaaaacggtgagctgatcgacgaccgtatctacaaccagaaagattttgatcgcacgatggtgatcgatgaacgcaccgaactggtagcgaaaaccattaccgattacctcaagcgcaccaacccgatggataaaaccatcatcttctgtaacgacatcgatcacgcggagcggatgcgccgcgcgctggtcaatctcaaccaggaacaggtgaaaaagagcgacaagtacgtgatgaaaatcaccggcgatgacgacattggcaaagcccagctggataactttattaatcccaaaaaagagtatccggttatcgccaccacctccgagctgatgaccaccggcgtggacgccaaaacctgcaaactggtggtgctggaccaaaacattcagtcgatgaccaaattcaagcagatcatcggccgcggcacccgcatcgatgaacgctacggcaagctatggttcaccatcctcgacttcaaaaaggccaccgaactgttcgccgacgaacgcttcgacggcatcccggaaaaagtgatggacaccacgccgcaagatatcgccgacccggagtctgattttgaagagcagttcgacgaacacgaagaagagaccgaagacgacatcaccggtgtcgatgaagatcccgccccgtataccgtcaccgattccggcgatgtcggcccgctgccggaagaggacgaaaacaaagtgcgcaagtttcacgtcaacggcgtggccgtcggcgtcattgcccagcgcgtgcagtattacgacgccgacggcaagctggtcaccgaatccttcaaagattacacccgcaaaacgctgctcaaagagtacgcctcgctggatgatttcacccgcaaatggcagggcgccgagcgcaaagaggccatcatcgaggagctggagcagcaggggattatctgggaagtgctggcggaagaggtcggtaaagatctcgacccgttcgacatgctgtgccacgtggtgtatggtcagccgccgttaacccgcaaagagcgggcggagaacgtgcgcaagcgcaactacttcaccaaatactccgacgccgcgcaggcggtactgaacacgctgctggataaatacgccgacgtgggcgtgcaggaaatagagagtattcaggtgctgaagctcaagccgttcgacagcatgggtacgctgccggagatcattaaaagcggattcggcgaccgcaatgggtataatcaggccatcagcgagctggagagcgaaatctaccacttaccgccccgctccgcgtaa

SEQ ID NO: 178593 - DNA, 969 bp, Klebsiella oxytoca
atggaaattattaagatttggaaatcctttcttaaacatttcaaacagaaaaaattagactctgcggtggttatctacggagcgatcgccatctatttaattccctataaatttccgttgaaaagttaccttgttgcgtttctttttatatctattttaatcttcgcatgcactcaagaatttcggcttagagaatatattaacttctttgtacgtacatgcaacgaccatttactgactcgatttgctggtattctatcgctaactgcatggtcaatttttttgcttttattgttgtctgctaatgtgtttgtaaatactataacgtattggttagcgattttcttttcgctcctcatcctcattagcagtattttgacggttttagatattgccagaaataatacagcaaaaactcttaaaataatcggtctggcggttaccgtcttttcaggtgtgtttacatttaccagtagctattcagccagtattttctggcaaattagtaatctggagctatcgtcctctccatggttagaatattgctggaaagccacggcatttctcatgttcttcttgtggttatcacagccaatttgttatggattgtttatcacttacggtgataaagcgaaagggtatcgaatatttacattaaccggcgcctttattatgtcagtttttttgtttctgcttgttcctaaactgtttggtgatgctgcttattatgtgttaaacagaaccatcaattttgaatggcgtgatgaagcaaaatgcggcgatctaaaagtgaagaataaaaatgaaaaatactttggctttaatactgataaatataccgttttttattcagataaaaatgataaatggggtttctatgagcttacttgccaaaaaggcagtaacaggaaagatttttatgcagtcgagtatttacctgaatataatattcccgcgtggttaaaataa

SEQ ID NO: 178594 - DNA, 321 bp, Klebsiella oxytoca
atgaacggccgcttcgccgcgctttgcgttctgagcttcaccgtgctgctgtcaggctgcgtccagtacaaatgggtgaagccgggagtcagcgatacggagatgaataaaaagctcacggagtgcgaagctcaggcgctgatcgatctccccccggataacgtcgtcaccggttcaagctcggaaaaaacggacaaaaagaacaagaaaaaggatatttccaccagctatacggttgaggacgccaatgaggggcgcagggatacgctcgtcgacagctgcatgtttaagagcggctgggataagattgaagttcagtga

SEQ ID NO: 178595 - DNA, 546 bp, Klebsiella oxytoca
atgaaaaagctgaatatccttcttctctcggcgttggctgccgtctcgggatccgcactcgcgatgggcggcaccgttgagcagggcaagaacttcaccaacctgaatctggaaatggggaaatcctcctctggcctgtatgtggaaagcaactggctcaaaaataccgatgacggtacccagacaggcggcgtaggcgcgggttataacctggaactcggcccggtgatgtttaatgccggcgcgaaagccatctacctcggccctaaaaaaggcgataacggcgtggccttccccatcggcggcggcgtcaacgtggccctgaccgacagcatccatctctatggtgagggctatgccgcaccggagggcctgaacaatagcgtcaaaaactacgttgaagccaacggcggcgtaagctggacgccaatcaccccagtcacgctgaaagtgggctatcgccatgttagcgtcgacggcaaagatggccgcccgggccacacgctgattgacggcgcctatgtcggcggcggggttaccttctga

SEQ ID NO: 178596 - DNA, 789 bp, Klebsiella oxytoca
atggcttaccgttcactcgcattcaacaatgagatcatctggcgggctccgctcccttcggctgagcgtgaactggcgaacgcaatacgggacaagattaccgcgttacgtccgcatctgctggattttatccgtctgaatgaagaagcccctcatcatgccctcaccctggctgagtggtcgcagcccgcgacgctgagttcgttaatcgcgacgtattctgaccatatttatcgcaaccagcccgggcaagcccgtgagcaaaaaccgctgctatccctctgggcacaatggtacatcggtttactggtgccccctttaatgctggcgctgttgagtgaagaacgcgccgttagcctggcgccggagcattttcgcgtcgagtttcatgaaacaggccgtgccgcctgtttctggattgatatccattcagcaggtacttccccggcagaatccgcgcagtcccggatggaaaagctggtcaccaccgctttgcaacccgtggtgcaggcgcttgaagccactggcgatatcaatggcaaacttatctggagcaatacgggttatttgattaactggtatctcggggaaatgagaaccctggtcggagatgaaaaagtggccgcgctgcgtcagctcttcttcttcaacaaacagctatcaggcggtgaggataacccgctgtggcgtacggtggttttacgtgaagggcagctcgtgcgccgcacctgctgccagcgctatcgcctgccggacgtacagcagtgcggggactgtacgctgaaataa

SEQ ID NO: 178597 - DNA, 240 bp, Klebsiella oxytoca
atgttgcagcgaactttagggagtggatggggcgtgttgatccctggcgtactgattgccgtcctcgggtttgccgatttgtcggtagatgcctggcgcggattggtgacgctgggaatgctcatgtcagcggtgatgatttggcaccgtcagctaaggcactttgttctgctgccatcatgcgtggcgctggtcagtgggatgatgctggtaataatgaatttgaagctgatgggataa

SEQ ID NO: 178598 - DNA, 780 bp, Klebsiella oxytoca
gtgaccctacgatttattgatacccactgccatttcgattttccccctttcaccggcgacgaaagcgccagcattgcccgggcggcggaggctggcgtgacgcagatcgtggtacctgcgacagaagcggataacttcgcccgcgtgttagcgctggcggagaaatatgatgcgctctacgccgccttaggcctccatccgatagcgattgaacggcatagcgcagagagtcttgaacggcttgaagcctgcctggcgaaacgcgacgctaagctggtcgcggttggggagatcggtctcgatctctatcgggaagatccgcaatttgcacgtcaggtttctgtatttgaggcgcagatgcggctggcgaaacgctacgatttgccggcgatcctccactccagacgcactcacgacaagctggcgatgctgctgaaaaagcacgctttaccgcgaaccggcgtagtgcacggttttgccggtagccttcagcaggcggagcggtttgtgcaactgggctacaagattggcgttggtggcaccattacctatccgcgcgccagtaagacccgcgatgtgatcgcgcagctgccgctttcggcgctgctgctggagaccgatgcgccggatatgccgttgaacggtttccaggggcagccgaacaggccagaacgggtggctcgcgtcttctccaccttttgtgagctacgctctgagcccgcggaagagatagcgaataccctgattgataatacaaatgcgctttttgcgcttccgtag

SEQ ID NO: 178599 - DNA, 999 bp, Klebsiella oxytoca
atgaatagcatcatgccgtctgcggtctgctcccactattcgaccattggcgttgccgagtcgcgccgcttcgagtattggaacgacgtggtgttgcgtcactgcattccggccgccagcgtgcccatggctggggtcgactttgacgcccggcttgcggtacgcggggtggggatggtggatatctgttcgttgtccgcgccgttgcaccgctgggaacgcaccgcacgttatctgaggcaggggccagacgacgatctgtggctgggctatatgcaaggcgggtacggccagcttgaacagggagggcgcaaggcggcgctggcggcggatagtctggtgttatacgacgccgcgcagacgttcagtttcagcctgggtgggggcgataatcacctggtgcggatcccgcggcatctgctgagttgtcgtttgccgaggattgaaacgctcaccgctatggtactggatgacagtcggcccggcgtgattccactgcgtgaaatgctgcgtcaggcgacagcgatgcccgcgtgtctggacaacccagatatttctggccgtttctcccagacgatgctggatctgctggtgctgagtctggaattgcaggatctggataacgtgagtgctgagcgcgatctgtacgccaggatgatgatttacattcggcggcagcttgtcgatccagatttgaacattgagagcctggctcgggcgcaccatgtttccattcgcaccgtcacgcgtgctttcgcccgccacaaaaaaacgccgatggccgtgatttggcaggagaggctgcgagcgagccgagaggccctcgaacgcggacgagtcagtagcgtgtcccaggcggcgctggatttcggcttctctgatttctctcatttcagccacgccttccgcaaagcctttggcatctcgcctcgctcattattgcccaaagagcagcagggagcgatgccatcgaacaggcacaccgggtcagactcctga

SEQ ID NO: 178600 - DNA, 894 bp, Klebsiella oxytoca
atgactgttagtggcaccacatctcgtatcagcctggtcgcctgcacactctggctggcgacgatcccggcccatgcggtcgatctcaactcacaggatctcattccggctcctgccggtaccgatgccattctggcgtatttcacctacgccacgcgagacagctttacccccacaggtggcgacgaaattaagcaaggcaccgggatggactccttcgtcagcatctttcgttacgtccactatatggatgtggggggcttcacggtcgcgccgcaggtgctgatgccctacggacgtctttataacggctccctgggcggtgcccacctagattccgccagcggcctgggcgaccccattctagccgccccggtctggctggtgaacaaccccagcaccaccttcgctctcgtgccctacctgtacgtccctgccggttcctacgatgccgggcgcacgctcaacgtcggtgagaaccgctggaagttcgatctgcagcttggcggcgtgcagcagcttggtaacggtttcgccacgcagctgtctgctgatgcgatgtggtatggcgacaacgacgatgccacgggcatcggcaccggccgcctcaaacaagacaacacctatcaatttcagggctgggtaagctggacgccgcccgcagacaccacctggaccgtctccgccggttacgccaaattgtggggcggtaagcagcagatcgacggcgtcgagaacggacaagcgacgcgttcggatcaggtaaggctggaattgtcgaaattcatcacccccacggtgcaagtgcagggcttgctccaacgcgacatcaacgtcgatggcggttttaaggaagatctccacaccaccctgcgcgtgatgaaactgttctga

SEQ ID NO: 178601 - DNA, 483 bp, Klebsiella oxytoca
atgagcgaacagcagcaaaagccgtctctctatgaacgtctcggcggatatgacgccgtctacgccttcgcaggcgaagtgttgaagacctgtatgaagcatcccgacatcggccatatctgggcgcacgtgtccgagtcttcatttcagaaagagcatatcaacttcgttgatttcttgtgcaagcactggggtggcaacaccgtctatcggggacgagatatggtgaccgcgcaccgcggcatggggctgaccgaggtgcactggaaagccgtattcgagtctatcgacgagtgttacgaaaacttcaatgtaccgcaggatattcgtgaagaggtcaacgctttcctgacccaattcaagcccgcggtcatcggcagtccttcgtatcgcgacgtggtgctctcacacccggacatggacgtgaccaaaggcatgaaaagtgtcggtatccactggcctaaagccgataagccgacttaa

SEQ ID NO: 178602 - DNA, 1515 bp, Klebsiella oxytoca
atggctattcaacgtcccactgctgaacaactccaggagcttgccggtcggctgcatatcagcctgacgccggcgcaggccgaggaatatctggcggtgatgcaggctaacttcgacgcttacgatctgatcgactcccttcccgacgatatcccggaggtccgctatccgcgcgccgccggctatcgtccgactggcgaggaaaatccgctcaatgcctggtattacaaaacggaggtaaaaggtgcagcgactggcgcgctggccgggcggaccatcgctctgaaagacaatgtctcgctcgccggcgtaccgatgatgaacggcgcctccacgctcgaaggtttcgtcccatcctacgacgcgaccgtggccacccgcctgctggatgccggggcgacgattctcggcaaagccacctgcgagcacttctgcctctccggcggcagccacacttccgacccggccccggtgcacaatccccatcgtcatggctattcctccggcggttcgtcctccggcagcgccgcactggtggcggctggcgaagtggacatggcgataggctgcgatcagggcggttccatccgtatcccttccgccttctgtggtacctacggcatgaaaccgacccacggtctggtgccttacacgggcatcatgccgattgaggcgaccatcgaccacgccggtcccatcaccgccaacgtgcgcgacaacgcactgatgctggaaaccatcgccgggagtgacgggcttgacccgcgtcagtacgcgcccgttgtagagagctataccgccgccctcggaaaaggtgtgcgcggcctgaaaatcggcattctgaccgagggattccagttgccgaatatggacccgcaggtagaaacgaaggtgcgggacgccatcgcccgcctgcaagcactgggcgccattgttagcgaaatttccgtgccggaacacaatctggcgggcgcgctttggtcgcctatcggctgcgaaggtctgaccgcccagatgatgcacggcaacggcatgggttttaactgggaaggccagtacgacgtcagcctgctggacaaacacgcgcaatggcgcgacagcgcggatgccctctccccgtcgctcaaagtttgcatgttcgtcgggcagtatgggctggagcgctataacggtcgctactacgccagagcgcagaatatcgcgcgtcgggcccgcgccggctacgaccgggccctgagcgatttcgacctgctggtgatgcctaccgtgcctgtcctcgctcagccgataccagacccggactgctccatcaccgaatacatctcgcgcgctttcgaaatgatcggtaacaccgctgcgcaggacatcaccggtcacccggccatgtctatcccctgtggcatggtcgacggactcccggtgggcatgatgctggtaggacgtcattacgctgaaaacacgctctatcaggccgccgccgctttcgaagcctgcggtgactggcggacgttttaa

SEQ ID NO: 178603 - DNA, 609 bp, Klebsiella oxytoca
atgagccataaacacgaccacgaccatacccaaccccccgttgatatcgagctacgcgtccgcgcactggaatccctgctgcaggaaaaaggcctaatcgacccggctgcgctggatgagctgattgacacctacgagcacaaagtcggcccccgaaacggcgcacaggttgtcgccagagcgtggagcgacccggaatacaaacgtcgactgatggaaaacgccactgccgctattgctgaactgggtttctccggaatacagggcgaagacatgctggtcgtggagaacacgccggacgtgcacaacgtcaccgtttgtacgctgtgttcctgctacccctggccggtactgggtctgccgccggtgtggtacaaatcagctccctatcgttcgcgtatcgtcatcgacccgcgcggcgttctcgccgagttcgggttacacataccagaaaacaaagagattcgcgtctgggatagcagcgccgagctgcgctatctggtcctgcctgaacgtccggcaggcacggaaggctggagcgaagcgcagttgagcgaactcatcacgcgcgattcgatgattggcaccggtgtggttagcgcaccataa

SEQ ID NO: 178604 - DNA, 654 bp, Klebsiella oxytoca
atgaacgggatacatgatctgggggggatgcacggccttggcccgatccctaccgaggaaaacgagccctatttccatcatgagtgggaacgccgggtatttcctctgttcgcctcgttgttcgtcggcggacactttaacgtcgatgaatttcgccacgccatcgaacgtatggcgccgaccgaatatttgcagtcgagctactacgagcactggctgcatgcattcgaaacgctgctgctggcaaagggggcgatcaccgttgaagaactgtggggtggcgcgaagccttccccctgcaagcctggcacacctgtgctgacgcaggagatggtgtcgatggtggtcagcaccggcgggtctgctcgggtcagtcacgatgttgcgccccgcttccgggtgggcgattgggtacgaacgaaaaatttcaacccgaccacccatacccgcctgccacgctacgcacgcgataaagtcggtcgcatagagatcgctcacggtgtgtttatcacgccagatactgcggcgcacgggctgggcgaacatccccaacatgtttacagcgtcagtttcaccgcgcaggcgctgtggggagagccgcgccctgacaaagtgttcatcgatctgtgggacgactatctggaggaagcatga

SEQ ID NO: 178605 - DNA, 471 bp, Klebsiella oxytoca
atgaataatacggtagcacaacacgattacgccgccctcgggttaccgcgcgatgaggaagggccggtgttcgataagccctggcaggcaaaagcgttctccctgatagtccatctccaccgggccgggctgttcccgtgggccgaatgggtacagacattcagtaaagagatcaacgcggcgccggcgcaaccgggtgaaagcgcgaatgatgcctactatcgtcagtggacggcggcgatggaaaacatgatgacggcactcaacctgacggtgccggatgaaatcagccgacggacgcaggagtggcgcaaggcgtatctcaacacgccccacggccagccgattgtactggcgaacgccagttgcccgccggcacatagccatcatcacctttcgccgggcgtgccggtcacggtgagtccggcactcgctaccaacagcaaaatcgataatggagttacaccatga

SEQ ID NO: 178606 - DNA, 210 bp, Klebsiella oxytoca
atgagtgatatcacccttaatgcccacaccccggctgctcccattcctgtcgcgaaactgctgccctgggcgctgttcaccgccctgctggcgctgctggccatctatttcgttggcgcagagcaaggcgcaacgtcgatgttttccggcacgcaggtgcatgaattcttccacgacgcacgtcatctgttgggctttccctgccactga

SEQ ID NO: 178607 - DNA, 756 bp, Klebsiella oxytoca
atgattggcaaactgttatttaaagggatgatggccggcgttctggccgggatggtggcatttgcctttgcacaccatttcggcgagccgcaggtcgatcgcgcgattggcctggaaaaaagcatatcagctcacgctcaccatcacggcgcgtcagcagacggcgaagaagaagaggtgtttagccgacagacccagtccgggattggcctgatgaccggcatggcgctgtttggcgccgcgctgggtggcggtctggcgctggcgtgggcctttagctaccagcgctttgggccatcggacccgcgtgtgcttgcgttgtgcctggcgctggccggcttcctggcaatgagcctgatgccaggtctgaaatacccgcccaatccgcccgcagtcggcaacccggagaccatcggctatcgtaccgggctctatttcgtcatgatgctgctttctatcggcatcgtcatcgcggccgcgtggttatcacatcagctcacgccgcgcctcggcagagggaatgcgatgatgtgggcaacgctgttcgccgtggcgctgatgctcgtggtttgtgccctgatgccgacagtgaacgaagtctccgaccacttcccggcggacctgctatggcgtttccgcataagttccttcggcacgcatctggtgctctggggcgtcatcggcgtggctttcggtgctttagccgaacgcacgccgacgacacgcgaacatcgcccggccttccggcgcggttaa

SEQ ID NO: 178608 - DNA, 570 bp, Klebsiella oxytoca
atgagagcgtcgctaacgctgatttgtcagggagaaacggcagcctccagaggttcacactttccctgtgatgaccctctggaggcgcgggagtggcaacgggcgcgccagctacaaagcagtgtcgcccgttatcaccgcgtctggttctccccggacgccgccgccaggcaaaccgccgccgcgctctctttacagggtacgccagtgacggaactggcggagcccgactacggcatctgggccggtcggccagtgcatgaggtgatgatgcaagacgccgaagcgttccaggcctggctggagggtgccgctcccccgggcggagagtcacgtgctcagctgctggcgcgctgtggcagctggctggctaaacacgtcgatattcgaggtcgccactgtgccattgcgcctgccgccgcaatccgcgccacgatcgtcgacgttctcggcgccccgcttcactcatttgcgcgtatcgacatccacccgctgagcatcaccgagttgcgcagcgacggacgacgctggaatttgtgtttattaaagggccacataaatagtgaatag

SEQ ID NO: 178609 - DNA, 903 bp, Klebsiella oxytoca
atgcttgacggaatatcgctcgaccagcttcgaacatttgttgctgctgtagatgaagggagcttctcggccgctgcccgtcgtcttggccgggctcagtcagcagccagtgagcttgtgcgtggactggaactgcaattaggtgtcaccttattcgatcgctcagggcgctatccattgctgacacctgcaggctcggcattgcttgtcagcgcgcgaaaagccgtttctattgtggatgccatgaaatcccaggcaaaaggcatggcggccggactggaacccgaacttgctgtggttgtggatgtcttttttcccattgatgcccttgcgggagtcgctaaagagtttcgtcaacagttcccggcagtaccgcttcatgtgtacgtagaagctcttggcgctactttccagcccgttctggatagacgagccacggtgggtattgttggttttctgccattgacgccccccggaatcatcactgaacctttggtgaatattccttttgcaatggtagctgcggcagagcacccactggcagcgtatccaggcccaatcccgcagagtgaactcgcaaagcatgttcagctggtactgaccgatcgttctgaacattcaaaagggcgcgattttggcgtaatgtctcccaaaacatggaaactcgctgacctgtttgccaagcgcgcattcctgcttaatggactgggctggggaggaatgcctctccacaccgtgcagaccgatctggatagtggtcgcctcgtacgtctggccattgaggaagaacctcagggtggggtcagtatgttgatgtcagcagtgtatcgtgtggataatccgccaggccaggcaggccgctggcttatcgaccaaataatggcctgctccagccacaggtag

SEQ ID NO: 178610 - DNA, 615 bp, Klebsiella oxytoca
atgactactattctgcatatcgactcgagcatcctgggtagcaactctgtcagccgcagcctgactgctgaaatcgtcgctaaagaagtgaaattaaaccctggagccacacttctgcgacgcgatcttgttgcagatgaattacagcatttgagccctgcccatctggctgtgtttcagggaaatacaccgacttcagaatcgttagcgaacgacatcgctctgggcagcacctacatcgatgagttgttctcagcggatatcattattattggcgttccgatgtacaacttttcgcttccgagccaactcaaggcatggctggatcgtgtacttgtcgcggggaggacattccactacaccgcgaatggtccggaaggtctgcttccagcaggtaaaaaagtgtatatcgcttcaactcgcggtggcgtttacagcggtaccagccctgtcgcccatcttgaccatcaggaaacgttgcttaccgctgcgcttaatttcatcggactctctgacatcaccatttttcgtgcggaaggtcttgctctgggagatgacgccagagcaacggcacttgccagggcgaagaacgaggttgaaacaacggttatctga

SEQ ID NO: 178611 - DNA, 1053 bp, Klebsiella oxytoca
gtggaaataggcataaacagtttcgcttcacttttacctgaaaggaacaatgggcgtatacctaatccggcggaacgtcttgcggcattactggaggaaatcactcttgccgacgaggctggtatagatgtgtttggtgtcggtgaacatcatcgtactgatttcgccgattcgtcacctgcggtcattcttgcggccgccgccgcacgaacgaaaaaaatcagactaaccagcgcggtatcggttctcagtacggttgatccggtgaggttgtttcaggacttctccaccctggatctgctctcgcagggccgtgccgaaatcaccgttggtcgtggttcttttgcagaagcttattcgctatttggtcactccagggatgactatgacgctctatttacagagaagcttggacttttgcagcaacttgtcagggaaacacacatcacatggtcaggccgttaccgtccagcgcttacgggccagggcgtctatccccggccaatgcagaatccgctgccggtttgggtaggtgttggcggaacaccgcactccttcatccgggccggagctgcgggtctgccgctgatggtggcgattattgggggcagacccgatcgtttccggccattaatcgacctctaccggcaggccggtattcgtgccggctaccatcgcgaacagcttagagtggggctacatgttaccggctttgtggctgactccgcgaaagcagcaaaggacgcgttttacccaggttggctgcatactttcacacaagtgggcaaagagcgcggttgggggccagtgacgcgtgagcaatttgatgcctcctgtagccctgatggagcatacctcgttggcgatccgccaaccgtgatagccaaagcacaggcaatatcgacatcattgggcggtattgaccggttgtcatttcagatgagtgctgccactgcaggatctgaggcaatgggtcattcaatcaaacttatcggacacgaagtggctgcggcccttcgtgaaaaaaagcacacagccagaattgtatattga

SEQ ID NO: 178612 - DNA, 846 bp, Klebsiella oxytoca
atgaccgattctcttgagagccagggcgtgaatcgcgccattgcctaccgtacgaagggccatcgattaggccccattacgcgattactgagcccggatgatctgggagatgatatcaagccgtttgtttttcttgatttgtttgagttcttcccaccgtataaccgtggttttatccctcattcacattcaggtattgcaacccttacggccttctttgaaggtggtatgacttacggggataccacaggaaaacaaggttccatgtctgatggttctgtggagtggatgcgagcaggtagtggggtctggcatgcgggtgagcccttaccggggaaagtcatgcgaggttttcagctctgggtggctttaccgcctgaactggaactggcatcggcagaaagcctttatttcgaagctgaagctattatgcacgatggcccagcccgtattttactgggacagtacaatggcaggtccagtccagttccttcaccaacatcaatgacttatctgcacgtgcggctttcagatggtcagaagtggacttatcagccgcaggcagatcatgatatcgcatggctggcaactaacgccgggcagctggagatcggaaataccctgctcgaacgtgagctggcaattttcgcagaaggtcatggggctatcagcatcacggctcatgaagcggccgaatttgtgatcggatcagcggtcaaacacccttaccctctcatccgggaggcttcctctgtccatacaaacgcggcttcgctggcagaaggagaacgaactatcgcctctattcgcaacagcccggcattcagtgcgcttacatcgcgctga

SEQ ID NO: 178613 - DNA, 372 bp, Klebsiella oxytoca
atgctctggaaccgcgagcttttagcaaaaatagatgcggcggacgacctgaaaatcgcgccgtaccgtcccgatatgaataccaccggcacgccaacatggatttgggaagtgacggtggataaccgacttttcgtccgtgcctatagcggtacccgttctaaatggtatcaggcagcactgtctcaacgggcgggtaagatagtggctatcgggcaggaattcgacgtgcggttcgtaaaacccgcggacccggctcttgaaagtaaaatcgatcgggcctaccagataaaatattccggcagcagctatgtttccgcaatgacgggagctcgcgccagagcggccacggttgagatattaccttcgtga

SEQ ID NO: 178614 - DNA, 1080 bp, Klebsiella oxytoca
atgacgctaaaaacttcaacccgcttttttaatggcgcactccttgccggagcgctggccatgatttcaacagaatctgcggtcgcccagccggcagcaggcacagcagattcttcagtacgcctggttcagacgtgggataaaaccttcccaaggagcgacaaagtggatcatcaaaaagtaacttttaaaaaccgttacggcattacgctggccgcagatgtgtatcttcctaaagatcgcggaaacaagaagcttgcggcactggttatttccgggccctttggcgcggtaaaagagcaggcctcaggtctttatgcgcaaaccttagccgagcgcggatttgtgacgctggcatttgatccgtcttataccggcgaaagcagtggggaaccgcgcaatatcgcgtcacccgatattaataccgaagactttatggcagccgtcgattttattgggctgcaatcttatgtggaccgtgaacgtatcggcgtcatcggtatctgcggtatgggggggatcgcgctgaacgctgttgccgtggataaacgcgtaaaagcggttgttgccagcaccatgtatgatatgagccgcgtgatgtcaaagggctacaatgacagcgtaacgccggcgcaacgcgagcaggcgcttgagaagatgagccttcagcgctgggacgatgcggcaaacggtcaaccggcctatcagccagcttacaataaactgaagggcggcgaagcgcagttcctcgtggaatacgcggactactatatgaccaaacgcggatatcatccacgtgccgtcaactccggaaactcatggtccgtgacaacgccgatgtcctttatgaatttcccgctgatgacgtatattaaggaaatctctccgcgcccaatcctgtttgttcatggtgaaaaagcgcattcgctttatttctctaaaacggcatatgaagcggcaaatcagcctaaagagcttctgattgtgaaagatgccacccatgttgatttatatgaccgcatggataagattccgtttgataacatcacggcattttttaataaataccttaataaataa

SEQ ID NO: 178615 - DNA, 915 bp, Klebsiella oxytoca
atgatttcagacaaatcggttgagagacgactcggcaagctctcccgggatattgctcagcgcacgcccggtaccggtgattttcccaccgcggttgaagggctggaactcttccggcgcaacgaacccgcccctccggtgagctgcctggttcctccgagtatcgtcctggtggctgatggcgcgaagatcatgtgggttggcggtgaagcttatgaatataatacggaaaaattcctgatcacgtctctcgacttgccagccagttcggaagtgttacaggcatcgccatcacggccctgcgtcggcgtcgcctataaacttgaccagcgcgtactgatggaattaattgcccagggatgcctgccgccagtcaaaaaacgagatgcgggaacgggggtcggtataggaaccatgactgatgttttactggagcctttctgccgcctgctttcactgctggacgaacccgaagccattcccgttctcggcccgctgattcagagggagatacattaccgactgttgatgagcgatcggtccgatcgtctcagacagattgcggcagtcgacggccatggctaccgtatcggtaaagctatcgactggttaaagaccaatattgcttcgcctctgcgtgtcgaagagctggcaagtcgggtgcaaatgagcacgccctccttccaccaccatttcagacagcttgcgggaatgagtccgctccgctatcagaaatggctgcgtctcaatgaagcaaggcgactgatgctgaatgagcattacgatgtcaccacagcggcctatgctgtcggctatgaaagcttatcccatttcagccgggaatatacgcggatgtttggggaatcacccaagagggatattactgtgctgagagagtctgccggtaggctttag

SEQ ID NO: 178616 - DNA, 2754 bp, Klebsiella oxytoca
atgaagccatcggatttgaaaagtcgccaggcaacttcactggtctccgggccattgcggctgacgagagatttgccgctaatcctgaccaaattcgttccaccacgctcttcgatacggctgctacagcgctcacggcttctgctcctcctcgatcgcatgcagcgacgccgtctgggcgtcgtttgcgcgggtgctggatttggcaaaaccacgctgttggcgcagtggtatcagcaaatgattgcccagggtgaacgcgttgcctggcttagcctcgatgaggatgatgatggcgtatggcagttcattccttatctgctgcaagcattgcggccgctctatggcgattgggacgccgacttttggcgcaacatagaagaacagacgccttccagttctcaacagctgctggccgggttgattaaccaactgcattactgtccgcacgacctgtatctgatcgttgatgacttccatatgattaatgatgctggtgtatatgaagccctgggatatttgctcaagcatgctcctgccgccttgcacctgatcattggcagccgtttccaccccagtctctctctgagcctgcttcaggcacaggaccagctggtggaaatctacgatcgagacctgcaatttacgcttgaagaaaccagaaactatttcagccagacgattgacataccgctcagtaatcagcatgtacagcggctactttccgcgacagaggggtggatcgccggcatgaaaatcgcttcgttatccccagaattgctcaatgatccagaacatctgctgcgcaatattcgtggtggaacccgcgctatcgcccgttatctgaaagaggtggtacttgacccattgccacaggaagtttttgattttctcgtcaaaacatcgtttcttaatcgtttaaatgccgggttatgtaacggggttacagagcgtgatgatagtgaagcgatactggcatggattgagcggcacaatctttttttgtcagccctggacgaacaaggctgctggtttcgctaccatcctcttttgcaggaaaccctgcgaacgatattgcagcagaacaacgatatcaacctcaagcacttacatgaattagccagtcattggttcgttgagcagagattgtggtccgaggcggtacgccacgcactggcagcgggcaagccgatccataatcccgggcaggatggcgcgggcgcgcagtcgctggcggaagaaggggatatagataccctggtttcctggatgcatcacttacctgcgagtactgacccttcgcgcattgacctgcaaatcaatctggcctgggcgctggcgcactattttcgcttcgatgaatcgaggcagttacttgataatcttgaccaaatggtcgttaatcatcgtgatgatataacccccaacgcctggctcaaattacgtgtcgtgcgcgcaatttgcgaagcttttgccgagaaaatcccggaaagcctggcgattgttgagccgttgctggctaaagtgccctgcggagacacctgggtcgacggtctcatatgcaatattctgagctactgccacgtggttaaccagcgctatagcgacgctcttgaggttcaacggcatatgccttgcccggaaagtccactagacaatctatttgtctcggtttatcgcgcttttatcatcactcagtgccatcttggtcagggtgacctggagaacgcctgggggcatgcagagaatgcattgcgccaggctgagcgttataccggccctcagtcgaccagcggcgcgacgcttgcgccgctgctggcggaaatggcttacgaacgtatgaacctggactcattaaatacgctgttagcagacagactcgaattcatcgatcggtttggtccacccgacgccctgagtcgctgctatacctaccttgcgcgccaggccttgaatgacgatatgccgcatgaggcagaacggctgctggaacacgcgcagcgactagcggtgtctcgaggatggcaaaggccgcaggctttattgttagcagagcaggcgagagtgcgcctgcagcgcgcgaattatccaggcgcggagctgctgcatcggcaactcgaacaactggcggcccgtgccacaattgatgccgaaaacccctgtcaacgcgcaatagctcagcatgccaatgtcagccgcagccgcctgcttctggcgtcaggtcaggcgccacaagccagccttttgctgggcgaactcgtgactgagcaggagcgtcggggagaccggctctccgcagcgcgtcttcgtacgctatggtcattatcattgtggaatagtggcgaaaacgcggcggccgtggctgcattgcagcccgtcctgcaattagcggcacaacagcatctcaaacgtatttttcttgatgctggcgatgcattgcagcttctgcttgtccgtgtacgcgaaacttcggcagccagcgaaggggatgccccttggcccgggaaagggagcctgtctgaaggcaagcggattgagcatgaaaaccttgatgttaaccaggagctcagtgagcgagagctgcagatattacagctcattgctgacggtcagatgaacaaagaaatcgctcgctccctgactatctctactgagacggtgaaatggcacatcaagaacatctacgccaagctcaaagtcaatagtcgtacgcaagccatgagtcgggctctggaaatgaagttactggattaa

SEQ ID NO: 178617 - DNA, 960 bp, Klebsiella oxytoca
atgcttaacaaacaggctttactccaggcttaccgtaagatgcgcgaaatccggacgtttgaggagcgtttgcatcaggaaaacaccagcggggatattccgggcttcattcacctttataccggtgaggaagccattgcggtgggggtctgcgaaaatctcactaacgctgatttcattgggtccacgcaccgtgggcatggccactgtattgccaaaggctgcgatattcacggcatgatggctgaaatattcggtaaggacagcggattatgccggggcaagggaggctctatgcatattgccgatctgtcgaaaggtatgctgggtgcgaacgctatcgtgggtggcgcccctccgttagccatcggcgctgctctgacggccaaaaccctcaagaccggtaacgttggggtctcttttaccggtgacggcggttctaatcagggcctggtatttgaagccatcaacatggcagtggtgctgcaactccctgccatctttattttcgagaacaacggttatggcgaaggaactggccatgactacgccgtcggtggtcgtgatatcgccgggcgcgccgcgggcttcggtttaccggcagtgacggttgatggcacagatttctttgccgtttacgatgccacctcagaggccgtcaagcgcgcccgagaaggtggaggcccaagcgtgattgaggccaaagctttccgctggcacggtcactttgagggcgatccggcgctttaccgcgctgagggcgaagttcaacgtctgcgcgaacaacatgatccgctgaagattttcaccgccagggtcaaacaacacatctcccttgaggaactggcggcgatcgatgcggcggttgaagcacttgtcgatgatgctgtattcaaagcgcgcgccgctgcctatccggctccggaagacctgcttacagacgtttacgtctcatactga

SEQ ID NO: 178618 - DNA, 1020 bp, Klebsiella oxytoca
atgcctataaaaacctatcgagaagcggtcaaggaagccctggcccaggaaatggagcacgacgaacgcgtcgttctgattggtgaagacttgcgcggcggtcacggcggaaatgcgcccgaagaagcaaggatagaggcctttggaggtgtgctcggagtcactaaagggctgtggacgcagttcggctccgaccgggtgatcgacacccccattacggagtcggcgatcgtcggcatggctgccggcgccgctgcaacgggtctgcggccggtggcggagctgatgtttatggattttttcggtgttagccatgatgcgctgtacaaccaggcggcaaagtttcgctatatgtttggtggcaaggccaaggcgccgctggtgatgcggggcatgatcggtgctggtttttctgcagcagcccagcattcgcagtcaccctataatatttttgctaccacaccggggctcaaggtggttgtgccatcgacgccttatgatgtcaaagggctgctgatccagtcgattcgcgacgacgatccggtggtgttctgcgagcataaaatgctctatgacctcaagggcgaggtaccggacgagatttataccctgcccctgggcgtcgccaactatacccgtgaaggtgaggatgtcaccatcatcgcgttgtctgcaatggtacataaagcaaaccaggtcgccgacaaactggccagggaggggatctcggtggaggtggtcgatccacgtacaatctcgcctctggacgaagaaggtattctggaatcagtggcttctaccggccgcgtggtcattgtcgacgagtcagccgcgcgttttggctttgctcatgatgtcgcagcgctgattgcttcccaggcattccatttcctcaaagcgcctgttgttctggtgacaccaccacacaccccggtaccgttctcccctgctctcgaaaaactctggatccctggcgttgaacgtatcgaagctgccgtccgtcaagtgctggaggattaa

SEQ ID NO: 178619 - DNA, 1530 bp, Klebsiella oxytoca
atgagcgatatcaggacacttgaaatgccgaagtggggcctttcaatggaggaaggcgtgctcgcgcggtgggccatccaggagggtgaccgcttcgccaaagggcaggaaatctgtgaaattgagaccagcaaaatcgtcaatgttctggaggcccccttcgccggtacgctacggcggataatcgcccgggtgggagataccctcccggtcggcgctgttttggcgttggtagctgactcttcggtaagcgatgctgaactggatgcctttgccgccagtctggccgcggcgcagccagcagcgcctgccacgcagactaccgagcctgctgtagcggccgtcgcgccctccattgtaccagcccccgccaataagcctgcggcatccattgggcagaccgaggtacccaccagcctgcaaggcataaccgatccgactcaggtgaatgccactccccatgcgttacgtcagtctgcgcggttgggcgttgacttgaaaaaggtccagggtagcgggcgtggcgagcgtatctctgtcgctgacctggagagcgcgatcgttgccgcaggcggccgcatcgcctctccgccgccgcccgttcgttccggcaaagcgccgcgatcgcataccgatgatagccaggtatcggcaaccccgttggcgcgccgtctggccaacaaactggggatcaacctgcacgactgccgcaaaagcggttcactcggacgggtgagccgtgatgatgtgctggcggccgctttgctgcttgatgggctaccccaggccggggctccacaagccacgtcagcgacagcctttgagacgttgccgatgtccagtatgcggcgagcgatcgctggccgtttgcaaatgtccaagcaacatgcaccccatttccgtttgaccgtcgatctcgatctggagcgactcttagcattgcgtaaggaaatcaacagcgaagtacccggcgtcaagatttcggttaacgatatgctggttaaggcctgcgccatggcgctgataaccgtgccggacgtcaacatacagtttgatgaggctacccagagcatccgccgttttgccgatgccgacatttccgtggccgttgcgctgccagacgggttaattacccctatcgtacgttcggccaacagcaggtcgataagcgacatatcaaacgaagttcattctctgataaccaaagcccgggcgggcatgctcaagcccgaagaattccagggcggcacctttagcgtgtcaaacctgggcatgctcggagtacggcagtttgatgccatcataaacccaccccagggcgcgatccttgcgattggcgcaggcgagccccgagcggtagttcgcgatggacaaatcgtcgtccgccatcaactgaccgtatcgctgtcctgcgatcaccgggtcatcgatggggcgtcaggcgcggcttttctccaggcgctcaagcggctggttgaaacaccgacgctgttgtttatcgaggagacgagctatgcacgacaaatatga

SEQ ID NO: 178620 - DNA, 1398 bp, Klebsiella oxytoca
atgcacgacaaatatgatgtactgataataggtggcgggcctggggggtatgtcgccgccattcgtgccggccagctagggcttcgtacagcattggtggaaaagcagcatttaggggggatctgcctgaactggggatgcattccaaccaaggcgctgctgcatggtgcagaggtggcgcacagtattgcgcatgccgatcggctgggttttagtctcagagaggtgagtttcgatgtgcagaaactggtgcagtttagccgcgccgtgtcgcaacagctgaccggaggtgtcgagtacctgctgaagaaaaatggcgttactgtcattaccggcaccgcccggctacgtggaaaggggcaagtaacggtcgccgatccccgaggggaagagcgagactatcgcgctggttatgtgatccttgcgactggcgcccggccgcgagcgttgccaggagtagagccagatggtgagcgaatctggacctattttgaggccctgcagcctgagcgcttaccggagtctctattaatcatcggatcaggggccatcggagtcgagttcgccagcctttataacgatcttggcagtaacgtgacgctggtcgaacaagccgcgcagattctgcccgttgaagacgccgaagtatccgctaccgtgcgtaaatcgttcgaaaaacgcggtatacacgtccatagccaaacgctgctgacgcaggtacagcgcaccgatacgggcgtgcgctgcaccttgaaaaccaccggcgccgaacagacccttgaagtcgaacgtgtgctgttggcagcgggcgtacagcctaatgtggaaggcctggggctggaagcgctgggagtcgagttggaccgcgggtttatcaagacggatgcagcttgccgaaccaacgtatttgggctctatgctatcggcgatgtggccggcccgccgtgtctggcgcacaaagccagccacgaaggcgcgatctgcgtcgagacgctggctggcgtcaaaggcgtacgccctcttaaccgcgactatgtgcccggttgtacctatgcccggccacaggttgccagcctgggcttgacagaggcgaaggctcgcgagacgggacggccaatcaagatcggtaagttcgcatatcaggggaatggtaaggcgctggccagcggggagacggagggttttgtaaagactgttttcgacgccgaaaccggcgaactgctgggcgcgcatatggttggtgagcaggtcactgaacagatccagggttttggtatcgcgcatcatctggaggccacagatgagagtctcttatcgatgatctttgctcatccaacactttctgaagccatgcatgaatccatccttgccgccagtggtcagccgctgcatcaataa

SEQ ID NO: 178621 - DNA, 231 bp, Klebsiella oxytoca
atggacaacattatcctttataaagttatcgtcatcctgaccattgtcgggtggggctggagcatggttagaaggaagcagaaaaagcaggtcctggaacccgctattgcgcaggcgaatgccagggagcgttatcagtggcgttatttcaggtggggctggagagttttgcaaatcgtctgcggtttttatttgctgattaccctcatccagtttcttctctgcggctag

SEQ ID NO: 178622 - DNA, 441 bp, Klebsiella oxytoca
atgcttaaacacttaaccgctatcgcttttctggctgcatccacccacgccatggcgcaggccgatatgacgctggacggcctggccaaaaaggaaccggcagcctttagccagatggttaaagggcataccctgcccgcctggataaagtccggcggcacgggctcgcctgcccggacggtgaagcttggcgccgaggtctatcaggtattcagcgtctgcaaaccccacgactgcgcagcggagcgcttcgccgtgctgtggtcggaaaaatccggacagatgtccgggctttattccgccgttgacgaaaaaaccgcccaggagacactgacctggctgaatgttagcgatgagcgctctatcgatggcaagacggtgctctttgccgccctgagcggcagcctggagaaccatccggatgcgtttaactacccgtag

SEQ ID NO: 178623 - DNA, 1536 bp, Klebsiella oxytoca
atgaactactcatcatcacgccatcgtctgtggatactcctgtttctgcttgcgttactgagcctgggcaccgggctttgctactggcaaatgcaaaaaaaggtggatcaagatatccattcgcgcctgcagcaggcgatagccagcctcgatgtgaccgtctcccatgcggagcaggcagccgatctggctgagcctttttatggtaaaagctgtagcgagaatgtcctgacggagctgcgcacgctggtggccaccattcccgatgtgcgcacggtgaatttaggtaaggataacgaaatatactgcacctcggtttttggcgggcgtaaatttcagttcgatcgtcgccagtatacgcatggcgctctgcgcctgctgagcggcagcgaaatcacgccgtttcatcccttgatggtttacagcgaacaggatgagcggggaaatacgattctggttggcgttgacggctattatttatacaacattttgaccgttcttgatggcgatgcgcatctctatcttcaggttggcgatcggataatgacccgcaaaggggaagtgacggcgacgccggatatcaaggttcccgtgcgcctggcctctgagctgtttacctattcggttattgccgaccgcggctacgcctctggcgtcggggcgtttatccgctatgagcaacacacgcttatcgccattattctggcctccttgctgctcacctttttattcaggaactacctccgctaccgtaatacgattgagtatcagctcagaaaggctatcgaactgaagcagctcaagccctatattcagccgattatcaacaatgatagcggagcggttatcggcggtgaggtgctggtgcgctgggaacatccgaagcagggatttattgcgccggataaatttatttccgtggcagagcagaccggcttgattaaagacgtgacggcgatttgctttgccgaggtgatccgtcagcttcggcgccatcaatccgttatccctggagggctgtttatttgctttaacaccagttcggtaaactttcaggacgacgaaatagtgaccctgtgccagacgtttatccagcagatgaaagaggcgcaagtccgccttgttctggagatcaccgaacgggagtcgatcgaaaatacccggcaaacatcagcggtgacggacaaactcaggcgtatcggcgtccagttttcgctggatgattttggtaccggctacgcgaactacagctacatccagcaatttaatcctgagattatcaaaatcgataaggtctttaccctcaacattgtgaccaacacggcttccgcgctggtggtgaagaatatggttaatctggccaggaagtttcattgccagattattgctgagggcatcgaggataaggagcagctcgcgatgctcaaaaatatggggattaccctctatcagggctattacttttctaaaccggtgccggtcgatgcgtttattcagatgcttcctcgctcgtttagcgagtcaggaaggcgctaa

SEQ ID NO: 178624 - DNA, 423 bp, Klebsiella oxytoca
atgattaacaaagaaaaatggggaaagcttttttatttcattgcattagccattttcccctgcgcgatgaacgccgctttacccagcctgcccgcgcagggcgccccgctctatgacgcctgctcgcacctacaagaaccgtccgaggcctggcgctgtcgcgccctgctcattagccagcgcgtggaacagcggcaacgctatctgcactttttactgcagcagaatattttcagcattcaaacctacgactatctgtggagtgagtaccagcgtacgacgtcatgttctgagatcggcgccttcttgatgagcaaagtccacgatgaggcattccatgggctgccctttaccccgattccgcccgacgatgcgataaacgcgccacccgccgtgtttgctctgcaagcatcccttaactga

SEQ ID NO: 178625 - DNA, 561 bp, Klebsiella oxytoca
atgaaaaacaggatcgtggcgccatcacggcttgtttccgccctcgatgcctgccggtcgcggctgaaggcttttattcgcggacggaccccgctgcgcgatgaggcggacgatatcctgcaggaagtgacgtatcagctcattcgcgtcgagcagccggtggagaatatcgccgcctggttgttccgggcggcgcgtaacgagatgaccgacagggcaagaaaaaagcgcgagctgccgctggcgggcggtttcagcgacgaggaagagggcgattttcccgaggatgagctggccgaaacgctgtttggcgttgcgcaaacgccggaggatgagtatctgaaagcgctgctctgggaggaattaagtcaggcgctctcggagctgccgcccgcccagcgtgaagcctttgagaaaaccgaactgcatggctacagctaccgggagctggcagaggagtccggcgtcagcgaacaggcgctgctctcacgtaagcataaagcggtactctaccttcgtacccgcctgcgcgcgctgtacgatgaactgctggccagttag

SEQ ID NO: 178626 - DNA, 426 bp, Klebsiella oxytoca
atgagagatatcgatatgcacggtcagcaccaccatcaccgctttggccgccacagaatggcgaagccgcttcttatcggcgtggcgttaatcgccatacttgggctgctggtaatgtcgctgtggaatgcgctgctgccggccatccttggggtgaagagcattggcttctggcaggcgttaggtgtgctggcgctgtcgcggatcctgttcggcggcctcggttttcgcccgggcatgtttggcatggggcacgcccggcgtcggatgcatgaacgctggatgaacatgagcccggagcagcgcgatgagtttgtgcagcgctttggccaccgcgggcatcgcggccactgcggctggcgcgaccgccgcagcgagcatgctccgcagcaggagagttcggctaaaagcgcggatcccgagtga

SEQ ID NO: 178627 - DNA, 150 bp, Klebsiella oxytoca
atgagcgggcaaaatattgctgagaagagtaaaaaaattgacacactttatttgtatgacaaatattttttatgtgatctctatcacctacatgcaggcgcgacggcggtaacgttacccggtgattcattgaaaaagaggaacttatga

SEQ ID NO: 178628 - DNA, 1035 bp, Klebsiella oxytoca
atgtcagcaaaaaaagtcaccatggcggatatcgccaaagaggccagagtcggtatcgcgacggtggacagggtgctcaataaacgcacgcccgtgaaagagagcaccgaacgtaaagtgctggaatccgcgcggcgcttaggcttcgcgctggagcaatcccgctatcggctggcggcggatcggccggcggtagccctcagaatgggcttcattctgctacagcagtcacactcgttttaccatcagctggcgcaggcgctggagcaggcggcgttaccgtggcatagcccggcgcaggcccccgctttcctgcattatgatattaacgccatcgacgatatggccgccgcgatcgcccgtctgagcgatacggtcgacgttatcggtattgtcgcgctggataatccgcttatccgccatgcggtcgtgcaggccatcgagaaaggcgtccgcgtcttcaccctgctctccgatatgagcatcccgcagcgtaccggctatatcgggctggataaccagaaagcgggccgcaccgccggttgggcggtggacaggctgtgccacgacgacggcgaaattggcattatcgtcggcgataaccggtttatttgtcaggaaagctgcgagataagtttccgctcctacctgcgtgaacagggcaaaggcgatcgggtgcttgaaccggtgcgcagccacgaacgcgccgatgtcgcgcgccaggttacggaagagatgctgcaacagtaccccgatctgaaggccatttacgcgccctgcggcggcgtggaagggattgtcgccgccctgcgcgcgcgccagcgccagcatcaggtcaccctgatttgtcatggcccggtggatagcggcgagctggcgctaattgacggcactatcgatctcatgcttacccatcggcttgacgaatttgccgccgccaccatcaacgcgtttgtccacgccgccagccagccgcaggtggcgtttatcaacgctctgcagccgtttgacctcctcactaaagaaaacctctga

SEQ ID NO: 178629 - DNA, 924 bp, Klebsiella oxytoca
atgaccatacatattgccaacgcgccgtgcagctggggcgtcgatgatcccaaaaacccttatctgccgccgtggtccaaggtactggaagaagcggcgaccgccggttataaaagcattgaactgggcccgtggagctatctgccgacccgggccgatgaactcagcgcagcgctgaataaacaggggctgtcgctggttgccggaacgatcttcgacgatctggtcagcgaagagaacttcgcgaatattgtcgaactgacgcataacctctgccgcaacctgtcgcaggtgccgtcggcggaaaagacgccgggcaaccccttccagccgccttatctggtcattattgatttcggcaatccgcagcgggcgaaatatgcagggcgcggcgagctggctccccgcctgtcacccgccgactggcagcagatggtcgaccacattgtgaccatcagccgactggcgtggcaggagtacggcgttcgcccggttatccatcctcacgccggcggctgcattgagtttgccgatgaaatcgatctgctggcggcgcaaatcccccatgacgtagccggtttatgtctcgacaccggccatctcttctattcgggtatggaccccatcagctggctggatcgccattttgatcgccttgactacctgcactttaaagatgtcgacccgcaggtgttcaggagcgtgatttcccgcggaatcgacttcttctccgcctgcgcggagggggtgatgtgcccgctcggcagcggcgccattgattatccggcggtgcgcgcctttctcgacaagcggggctatcagggctggatcaccattgagcaagagcgcgatccgcgcaacgtcgagggcagcctgcaggcggtcacggaaagcctgcgctacctgcgctcggttggtttttaa

SEQ ID NO: 178630 - DNA, 789 bp, Klebsiella oxytoca
atgagcagtgaatcagcggtgctggtaaccggcgcatcgaccggaattggcgcagtctatgccgaacgttttgcccgccgcggccatgacctggtgctggtcgcgcgtaatcacgagcggctgacggcgctggccgagcggctgcgcgacgaaaccggcgttcaggtcgacatcctgcaggccgacttaacccaggatagcgacatcgccgccgtggagcagcggctgcgggaagacgcgcgtatcaggattctggtcaacaatgccggcacctcgattcccggtgatttcctccaccagagcagtgacgatatcactcgcctgattaccctcaacgtgacctctgtggctcgcctggcgaacgcgatcgcgccgcgtctggccgaggccggagagggggcgattgtcaacattgcgtcggtcgttgggctgggtccggaaatggggttgaccgtctacggcgccacgaaagcctttgtgctgtttctctcgcaggggctcgacgttgagctgagcgcgaaaggcgtatacgttcaggcggtactgccggcggcaacgcgcaccgagatttggcagcacagcggcaaagacgtggataccattcctggcgtcatggaggtggataaactggtggatgccgccctggtggggttcgaccgccgcgaatcggtgaccataccgccgctgcatgatgaaacgcagtggcagacgctgaacgcgacgcgtcaggccatgctccccggctttgcgcaatctgaacccgcggcccgttacctgtcgcgatcgtga

SEQ ID NO: 178631 - DNA, 549 bp, Klebsiella oxytoca
atgagagtgagcagaaaacaggttgaagagaataagcagacaatcctgaccgccgccgggcggttgtttcgcgagcggggttttgacgcggtcacggtcaccgatattatgaaatcagccggtctgacccacggcggattctacggctacttcaaatcgaaggatgacctgatcgcccaaaccctcgcggaactgaagatggagaacgacgcggcgaaaaacgacgtcgtcgcgcaaatcgagcgttatctttcccccgaacatcgggataattttgccagcggctgcccgctggcggcgctggcggcggagaccatccgtcagtccgaacccgcgcgtgacgaaatgagcgcgcggctgcagcagcagatagcacagctcagtgaagcgatggatgatcgggacgctcaagccagccgccgcgcggcgattggcagctggtcggccatggtcggcgcgttaattctggcgcggatgaccgcggattcaacgttttccgacgaaatcctcggtgaaacggcggcctggctcgcggaaaaacagcgctga

SEQ ID NO: 178632 - DNA, 1797 bp, Klebsiella oxytoca
atgatgcagcagacgtttgatttacgcctggcaaccctggcggagcgttaccgcaccggtaaaaccacgccgcgcagcgtgctggcggacatccgccagcgggcgcaggcgctgaaccccgagttccgtttgtttatccatattctgagcgaagaggagcaggagccatttctggcggcgctggatggcctctcgccggccgcgctgccgctgtacggcgtgccgttcgccatcaaagacaatatcgatctggcggagattgtcaccaccgcggcctgtccggcgtttgcgtatcgggcggagcagagcgcgacgattgtcgctcagctgattgcgctgggcgccgtgccggtcggtaaaaccaatctcgatcagttcgctaccggcctgaacggtacccgatcgccgtacggtcgctgccgcaatagctatcatgcggagtatccctccggcggttccagcgccggttccgcgctggcggtggcgctgggcgttgccagcttctcgttgggcacggataccgccggtagcggccgcgtcccggcagggctgaataacctggtgggtctgaaggccagtaaagggctgatatccaccgcaggggtggtccccgcctgtcgtacgttagactgcgtgacctttttcagccccaccgccgacgaggccagccagctgctggcgctcgtcgcacagtgcgatccgcaggacgcctggagccgccgtaatcctcagtggaacagccgtcaggcgttcggcaggccgtccgcggggtttcgttttggcgttccgcgcgagctcaatttcctcggctgccgcgcaagcgaacgcctgttttcccaggcccggcaacggctgacggcgctgggcggggtggcagttgagattgatttcacgccgtttctggcggcagcccggctgctgtatgacgggccgtgggtcgccgaacgctacgcggtggtcggtccgctgatggcgcggcagccggaggcggtactgccggttattcgcgacgtgctggcaaaagcgccgggcaccgacgccacggcgacctttacggcgatctatcagctacagcagtataaagcccggtgcgacgcgatactcgagaccctggactgcgtgctgacgcccacctatccgcgcccggtgacgcttgacgagctggaggcggagccgatcgcgcgcaacgccgatctcgggtactacaccaactttatgaacctgctggactatgccgcggtgagcgtgccatgcggatttatgccggacggattgccttcgggcgtcacgctgtttggccgggcctttaccgaccagtatttactgggcctggccgatgcgtttcagcgcgctgagcggctgccgctgccgggcggagcgcggctggagaccccgccgcctgaacgcgtcgccgggcatgaccgaatggcgttggttgtttgcggcgctcatctctctggcctgccgcttaatggccagctgctggcgcggggtggtcggctgctgcaggcgacccgcagcgcgccgcactatcgtttatacgctctcgcggacggcaaacgcccggcgatggttcgcgccgatagcggcggggcgtcgatcgcggttgaagtgtgggagctacccagcgcggaggtcggttcgctgctggcggccatccccgcgccgctgggtctgggaaaagttgagcttgccgacggacgtcggttagcgggctttatctgcgaagccaacggattaggcgaagccacggagattaccgcctacggcggctggcgcgcctggctggcacgctaa

SEQ ID NO: 178633 - DNA, 3606 bp, Klebsiella oxytoca
atgtttgataccttactgattgccaaccgcggcgccatcgcctgccgcattctgcgcaccctgcgcgcgatgcaggtgaagggcgtcgccgtctattccgaagccgacctgagtagtctgcatatccgcgacgcggatgaagcgttaagcctcggcgacggcccggcggcgcaaacctatctggtgacggagaagatcctggccgccgcgcagcagagcggcgccaaagcgatccaccccggctacggctttctgtctgaaaacgcggccttcgctgaggcctgcgaggcggcgggggtggcgtttgtcggccccactccgcaacagctgcgcaccttcggcctgaagcataccgctcgcgccttagccaaagccgagggcgtgccgctgctggaaggcagtgagctgctggccgacagcggcgaagcctgccgggcggctgaggcggtgggctatccggtgatgctcaaaagcaccgccggcggcggcgggattggcatgcgcgtctgtcgcgacgcccgtgagctgattgaggcgtttgccgcggtgcagcggctgggacaaaacaacttcagtgacggcggggtatttctcgaaaaatatatcgaacgcgcccgccatctggaggtacaaatcttcggcgacgggcggggagaggtcatcgcgctcggcgtgcgcgactgttcagtccagcggcgtaaccagaaagtgattgaagagacgcccgcgccgaatctgcctgacgggatggcgcaggcgctatgcgcggcggctatcgcgttgggtaaagcggtgagctaccgcagcgccgggacggtggagtttgtctatgacagcgcggcgcggcagttttatttcctcgaggtaaatacccggcttcaggtcgaacacggcgtcacggagcaggtgtggggcgttgacctggtgcgctggatgattgagctggcggcgggggaactgcctccgctacctgagctggccgccgggttacgcccccagggccatgctatccaggcgcgaatttacgccgaagatccggggcggcaattccagccttctcccggcctgttaacggacgtcttctttccgccggcggacggcgcagccctgcgtattgaccgctgggtggaagccgggtgcgaagtcccgccgttcttcgacccgatgctggcgaaagcgatcgcctggcgccccagccgcgatgaggctatcgccggcctggcgcaggcgctggcggagacccgcctgtacggcgtagaaactaaccgcgtgtacctgcaacaaattcttggctttgcgccctttaccgaaggcgagccctggacccgctgccttgagcagctgcgctaccgcgcggcgaccgtagaggtgctgagcgccggaacccagaccagcgtgcaggactatcctggacgtttggggtactgggcggtgggcgtaccgccgtcggggccgatggacgatcgcgccctgcgtctcggcaaccgcctgctgggcaatgccgagggagcggccgcgctggaaatcaccctcaacgggccgaccctgaaatttaataccgacgttcaggcggtggtgtgcggagcgccattggcggtgacgctcgatggcgtagaccagccgctggactgcgtattgactattccggcgggggcgaccctgaagctgggcgcgataagcggcgcgggggtcagaagctatctctgcctgagcggcggcattcaggtaccggactatctggggagtaaaagcacctttaccctcggccagtttggcggccacggcggacgggcgctgcgcggaggcgacgtgctgcatctggcgccgcacgccgccgccagatgcggggatcaactgcccgccgcgctacgcacagcgctggctgaggtgcggacgctgcgggtgatttacggcccccacggcgcgccggaattctttgcgccggaatatattgcgacgttcttcgccacggagtgggcggtccactttaactccagccgcaccggcgtgcgcctgattggccccaagccgctgtgggcccgcgacagcggcggcgaagcggggctgcatccgtcgaatattcacgataacccttacgcggtgggcgcggtcgattttaccggcgatatgccggtgatccttggaccggacgggccgagcctcggcggttttgtctgcccggtcacggtgattgaagccgacctctggcagttaggccagctcaaggccggggataaggtgcgtttcgtggcggtggatttacccaccgcccggcggctggcggaagggcggcgcgccgagctggcgaccctgagtcaccaggcgatagcctggcagcccgcgccgctgacgtcgcctgtcgtgatgacctgcggcgaggcggacaaacgcctggtggcgcgactttccggcgatacgcatctgctgctggaagccggggagccggagctggatctggttctgcgtttccgcattcacgccctgatgcaggctctggaagcgcaatcaagagacggcgcgatcgatatcaccccggggattcgctcgctgcaaatccattttcagccggaaacgttgccccttgagacgctgctggcgtgggtgcgcagcgagtggtccacggtctgtctgagtgacgatctgcaggtgccgacgcgcgtggtgcatctgccgctctcctgggacgatccggcctgccgcagggcaatcgataaatatatgaccaccgtgcgccaggacgcgccctggtgcccgagtaatctggaatttatccgtcgcatcaacgatctgcccgatgaacaggcggtatggaatacggtatttgacgccagctatctggtgatggggctgggcgatgtttatctcggcgcgccggtggcgacgccgcttgacccgcgccatcgcctggttaccaccaagtacaacccggcgcgcacctggacggcggaaaactcggtcggcatcggcggggcctatctgtgcgtctacggcatggaggggcccggcggctatcagttcgttggccggaccctgcagatgtggaatcgctatcgcgaggtagcggattttgccggcaaaccctggctgctgcgtttcttcgaccaactgcgtttctatccggtttcggccgaagagctgctgcaaattcgccgcgatttcccgctcggacgctacccgctgcgcattgagcacagcacgctgcggctggcggaataccagcagtttctccgccgtgaagcgcacagcatcggcgcgtttcgcgagcatcagcagcaggcgtttaacgccgaacgcgatcgctggatagccagcgggcaggcccattttgacagccaggagagcgccgtggatgagggcggagacgcgccgctgcggcagggtgaacagggggtggaaagcccgatttccggaaacctgtggcaagtacaaacggcggcaggcagccgggtccgcgcgggggatgtgctggtcgtgctggagtcgatgaagatggagatcccgctgctggccccctgcgatggcgttattcaacaggttcacgtgcagccgggcagcgcggtacgcgccgggcagcgggtggcggtgattattgaggagaaggcatga

SEQ ID NO: 178634 - DNA, 636 bp, Klebsiella oxytoca
atgaccctgatcgccagtaaccgtcgtcccgaagatgccgtctatcgccatgtgatcccggcaggggaaccctggctgtttgaggtacaaaaagggcaaaccctgcgcctgcttgacctcgaaggcaaccaggccattgataccctgttttacaacgccgataacccccgagaacgctacgatccgcagcgcacgctgcgccgccagggcaatgcctatctgaccaccggcagcgtactctattccaatctgggcaatccactgctgaccatcgttgccgacacctgcggtcgccacgataccctcggcggcgcctgtgcccaggagagcaacaccgtgcgctacgcccaggataaacgctatatgcacagctgtcgggataatttcctctgcgcctgcctgcacgatggccgcctgcataaacgcgatatcggcgccaacattaactttttcatgaacgtcccggtaacgccggaaggcggtctgacctttgaggacgggatatcggcggcggggaaatacgttgagctgcgcgccgagtgcaacgccgtggtgctgatttccaactgtccgcagttaaataatccctgcaacggctggaaccccacgcccgccgaggtgctggtatggaactga

SEQ ID NO: 178635 - DNA, 729 bp, Klebsiella oxytoca
atgaccgcactttttcactcatcccccagcctgcgcgaagagcggctacccggcggggcgcacacctcgctgattttgcgcaaagggcagatcctgcgcctgaccgatatcgacggcggagccaacgtcagcatgatgatgctgaatccccatgagaagagtgagcgcctgaatctgccggataccctcaaggggcagcacaccgcgcgcctgaccgccgggcactgtttctactccgatatggggcgcgttctggccgggattgttgccgacagctgcggctggcacgacccgttcggcgggatactcaacgccgacgagacgcgtgaaaaatatggcgcaggacgctaccaggagctgcgaaacggcttctaccgcaacggcgtcgataacctgctggttgaaatgggtaaatgggatctgggcctggaggacctgctgatggtggttaacttcttcagcaaagtcaccgtcgatgaggatggccgttttcagtttatttccgccaacagccgcgccggagattacgttgagctgtttgcgccgatggatgtcctcatggtgctgaccgcgctgccgcatcctcaggaccctgccgctgagtacgccccgcggccgatccagctgagctggtaccaggctgacgatgcgcaggcggccgcggaagcgctctttacccgcgatgaaaaccagcgcgcgttcctcaacacccaactttttgccctgtaa

SEQ ID NO: 178636 - DNA, 777 bp, Klebsiella oxytoca
atgagctttatcgacatcaaaaatatctggcaggagtacggcgaccacgtggtgctggagcgcatcaatttgcaggtgaaagagggcgagttctgttcgatggtcggcgcgtccggctgcgggaagtcgacgtttttacgcctgctgctcggccaggaaaagccgactcgcggggaaatcaccctcgatggccagccgctggcggcggagccggaccgcagccgcggcgtggtgtttcagcgttattcggttttcccgcacctcaacgtgctggataacgtcgccattggcctcgaactcccggcgtcaccgctgtttggccggctgtttgccggcaggaaacgcgacgcgcgcgaacgggcgcagcggatgctggagaaagtcgggctggggcacgcgctgaataattatccggcgcagctctccggcgggatgcagcagaggctggcgatcgcccaggctttcgtcatgcagccgcgcgtactgctgcttgatgaacccttcggcgcgctggatcccggtattcgcaaggatatgcacgggctgctgctccagctgtggagcgaaacgcggatgacggtatttatggtcacccacgacctcgcggagggcttcaaccttggcacccggctgctggttttcgacaaagtgcgcatcgatccgcaggcgcccaacgcctggggggcgcgcgttacctacgatattccgctcaatgaagcgcggatgtcgcagatgaccaccggcagcgacaataacgtttacgcattaaggagatag

SEQ ID NO: 178637 - DNA, 816 bp, Klebsiella oxytoca
atgcgccacattaaccgctatccccggcagggtatgcgcctgacgctgatgctattgcccttcgtcctgatgatcgccgcctggtttatcggttcggcggtgcggctggaagccaacccgcaggataagctgctgcccggcctgtcgcagatgatcgcggccatcgatcggatggccttcaccccggataaacgcagcggcgagtatctgctgtgggccgacacgctgattagtatgagccgcctgctgattggtctggcgctctcgtcgctgattggcctgggcatcggcatcgccgccggcgtgttcccgatgtaccgcgcggcgctgtcgccgctgatgaccgtggtgtcgatgatcccgccgctggcgatcctgccggtgctgtttatcgtcttcggcctggatgagctatcaaaagtgatgcttatcgtcattggcattacgccgatgctggcgcgcgaccttgaacagcgggcgcgggagatcccggcggagctgtttatcaaagcgcaaaccctcggcgccaatagctggacggtggtgctgcgggtagtgctgccgcagctgctgtcgcggctgataacctccctgcgcctgctgctgggctccgcatggctgtttttgatctccgccgaggccatttccgccaccgccggtctcggctatcgcatattcctcgtccgccgctatatggcgatggacgtgattattccttacgtcatctggataaccctgctggcatggctgatggatctggcgctgcgccagctgcacaaagcctgtttcccgtgggcggaaggaggccgggcatga

SEQ ID NO: 178638 - DNA, 1059 bp, Klebsiella oxytoca
atgaagacaccgccgatcctccgctctcttatcctgtcgctggcgctgctggccagcgtcccctcgtttgccgccgtcaaaaaagagttcaacatctgctggactatctatgccggatggatgccctggggcaccatcagcaacgaaaagatcatcgataaatgggccagcaaatacggcatcaaaatcaatatcgttcagctgaacgactacatcgaatccattaaccagtacaccgcgggccagtttgacggctgcaccatgaccaacatggatgccctgaccattccggcggcggggggcgtggataccacggcgctcattaccggcagctactccgacggcaacgacggcgtggtgctgaagggggcggataaaaagctcagcgatctgaaaggcatggcggtgtatctcccggagctttcggtatcgcactacctgctggttcgcggtctggaaaaagccgggctgcaggaaaaagacgtcaaagtggtcaatacctcggatgcggatatcgtctcggcttttggcaccagcggcgtacgcgcggcggtggcctggaatccgcagctttcggttatcaaaaagacgccgcaaaccacggaggtctttagctcttcgcaggttcccggcgagctgatcgacatgatggtggtgaatactcagaccctgaaagataacccggcgctgggtaaagccctgaccggcgcctggttcgagatgatggccaaaatgcaggccggagacacgcaagcgctaagcgcaatggccgccgattccggcaccgacctcgcgggctaccgggcgcagctcaaaacaacccatctcttctggacgcctgccgataccctgacgtttatctcctcgccggcgctggcaaaaaccatgcagcgggtggcgcagttctcttttgataaagggctgctgggagagggagcgcagagcgctgactttatcggcatgaccttccccggcggcgtcaccgtcggcgataccgccaacagcaaactgcgctttgacgacagctatctgaagctggcggcggcggggcagctgtaa

SEQ ID NO: 178639 - DNA, 693 bp, Klebsiella oxytoca
atgaatagcgtattaccgtcaatcagcccgcaggtctccgcgctggcccccggctttcgcgccctgagcattgatgtcgtttccgccgccgtacgcgcccccctggtcgggtccgatgcgctccgctccgcctgccaggcggttatcgccggcgagccgcagtgggcggaggcgcacctgcaggcctggaacgaggtattccgcgcctttggcgcaaaacccaagcggacgccctgctcggcggaagccttgcgcaggcgggtgctgcgcgatggcgagatggctgcgatcgatcccatcgtcgatctctataatgcggtgagcctgcgctacgccgtgccggtcggcggcgaaaacctggcggcttacgttggcgccccgcacctcaagctcgcggacggcagcgaaccgttcgataccgtcaaagaggggcagatcgttcacgaatatcccgacgcgggagaagtggtctggggcgacgatcgcggcgtgacctgccgacgctggaactggcgacagggagtacgtactcgtctgagcgtggagagtccgcggatgtggtttattcttgaaagcctgccggaaatgccgcttagcgcgctgcaggaggcgggagagatgctgagcaacggcctgctggagatgatgccggaggcgacgatccgctcacagctgatagggccaggagcctaa

SEQ ID NO: 178640 - DNA, 633 bp, Klebsiella oxytoca
atgcctgagataccgtcgctgctgaccttcgcgcttgttgcccttggcctggtattgaccccggggccgaatatgatctatctgatttcgcgctcgatttgccagggaagaagggccggactggtctccctcggcggggtggcgctggggtttgtgttttatatgctgtgcgccgctttcggtattaccgcactgatcttcgccgttccctacgcttacgacgcgttgcgcatcagcggcgtggtctatctgctttatctggcctggcaggcggtgaagcccggcgggcgctcggtctttgcggtgcgcgacctgcctgccgatagcggccgtaagctgtttatgatgggctttattactaacctggcgaaccctaaaatcgccatcatgtatctctcactgctgccgcagtttatctctcccggacacggcagcatccttgcgcagtcgctggtgctgggagggacgcaggcgctcattagcgtagcggttaatgcgctgattgtggtgatggccgggcaggtgtcgctgtttctcgcggggcgcccgttatggcagcagtttcagcgctggctgatggcgacggtgctggcggggatggcggtgaaaattgccttcgaggcgcggaagtaa

SEQ ID NO: 178641 - DNA, 2184 bp, Klebsiella oxytoca
atgagcacgtcaaacgatccttcgaataccccgtcggcagggaaatgccctttccacgccgagacggcgacgcccacccagagcgcgggcggtggcaccggcaaccgcgactggtggccaaatcaactacgggtggatctgctgaatcagcactccaatcgttcaaacccgctgggcgaacactttaactaccgcgaagagtttaagaagctcgactactcggccctgaaggccgatctgcgcgccctgctcaccgattctcaggagtggtggccagcggactggggtagctatatcgggctgtttattcgtatggcgtggcacggcgccggtacctatcgtaccgttgacggacgcggcggcgcgggccgcggccagcagcgtttcgcaccgctcaactcctggccggataacgtcagcctcgacaaagcccgtcgcctgctgtggccggtaaaacaaaaatacgggcaaaaaatctcttgggccgatctctatatgctggcaggcaacgtggcgctggaaaatgccggtttccgtacgtttggcttcggtgccggtcgtgaagacgtctgggaaccggatctggacgtcgactggggtaacgaaaccgaatggctggcccatcgtcatccggaaagcctgaatcagcaggccattggcgcgaccgaaatggggctgatttacgtcaaccctgaaggccccaacgccagcggcgacccgctctccgccgcctccgcgattcgcgcgaccttcggcaatatggcaatgaatgatgaagagatcgtcgcgctgatcgccggcggtcatacgctgggcaaaacccacggttccgcggtgaccagccacgttggcgcagagccggaagcggcgccgattgaagcgcagggactcggctgggcgaacagctacggcagcggcgcgggcgccgacgcgatcacctccggtctggaagtggtctggacgcaaacgccgacccagtggagcaactacttcttcgaaaacctgtacaaatatgagtgggtgcaaacccgcagcccggcaggcgcgattcagttcgaagcgaaagatgcgccggagatcattcctgacccgtttaatccggagaaaaaacgcaagccgaccatgctggtcaccgacctgacgctgcgcttcgacccggagttcgacaagatttcccgccgcttccttaacgacccgcaggcctttaacgaagcctttgcccgcgcatggtttaaacttatccaccgcgatatggggccgaagtcccgctacatgggcccggaagtgccgaaagaagatctgatctggcaagatccgctaccggcggcggtccacaccccaaccgcagaggatatcgcgacgctgaaaaccgccattgccgacgccggcctttcggtcagcgagctggtttccgttgcctgggcatcggcctccaccttccgcggcggcgataaacgcggcggcgccaacggcgcgcgtctggcgctggaaccgcagaaatcctggccggtaaacgccatcgcgtcccgcgtgctgccgaccctgcaggggattcagcaggcatccggtaaagcgtcgctggccgatattatcgttctggccggcgtggtgggcattgagcaggctgccgcggcggcgggcgttcaggttagcgttcccttcgcccctggccgcgtcgatgcgcgtcaggatcagaccgatgtggaagcgatggatctgctgcagccgctggccgatggtttccgcaactatcgtcgcgttggcggcggcatctccaccgaaacgctgctgattgataaagcgcagcagttaacgctgacggcgccggaaatgacggtactggtgggcggtctgcgcgtgctgggcgcgaacttcgacggcagccgacacggcgtgttcaccgaccgcgtgggggtgttgagcaatgatttcttcgctaacctgctcgatatggggaccgtctggaaagccgctgacgagcacgctgagctgtttatcggccgcgaccgtaaaagcggcgaagagaaatataccgcgacccgcgttgacctggtgtttggctccaactccgtcctgcgcgccctggctgaagtgtatgcctgcagcgatgcgcggcagaagttcgtgaatgacttcgttgccgcatggaccaaggtgatgaacctcgaccgcttcgatctgtaa

SEQ ID NO: 178642 - DNA, 2301 bp, Klebsiella oxytoca
atgagtaacagaagacgcgtcgttcccggcgtccatccctatgatggtccggcgggcggctggggtgccttaaaagccaccgctatcgccgttcgtacgcaaatggatgcgctcgatgcccccgccacgctgctgcggaccaatcagccggatggctttgattgtcccggctgcgcttggcccgacaaagagcataaatcgacgtttcagttctgcgaaaacggcgccaaagcggtgacctgggaagccaccagtaaacgggtcacggctgagtttctcgcggctaacaccgtgacgtcgctgctggcgcgcagcgattttgagctggaaggctacgggcgcttaacccagcccctggcctacgataaggccagcgataccctgcgtccggtctcatgggacgcggcgtttacccgcatcggcgccattcttcgtacgctgcggcccaatgaagtcgagttttatacctccgggcgcgcctctaacgaagtggccttcctgttccagctgtttgcccgcgaatatggcaccaacaactttcctgactgctccaatatgtgccacgagtcgaccagcgtcggcctgccgcagtccatcggcatcggtaaagggacggtctccctcgatgactttgataagaccgagctggttatctctatcggccacaatcccggaaccaaccatccgcgcatgatgggtacgctgcacgaactggcgcgccggggggtgccgattatcgtcttcaacccgctaaaagagcgggcgctggagcgtttcgccgatccgcagaacgtcattgagatggcgacctacggctcaaccaacatcgcgtcgacctatttccaggtcaaagcgggcggcgacgcggcggcgcttaagggtatcgcgaaggcgctgctccggctggaagcagagcagggcgaggtgctggatcgggcgtttatcgatgagcatacgctgggctttaccgaatttgcgcaggatgtggacgcgacgccgtggccggatattgaacgcgagtccggcctgacgcgcggcgatcttgaacgggtagcggcggcttacgctaaatctaacgccacgattatcacctacggtatgggcatcacccagcacaataagggcacctctaatgtacgcctgatagccgacctgctgctgatgcgcgggaatatcggcaagccgggggccgggatctgcccgctgcgcggacactccaacgtacagggcaaccgtaccgtcggcatcactgaaaagccgagccccccgtttctcgccaacctgcagcgggtgtttggttttacgccgccgcaggaacatggtcacgatgcggtaaaagcgctacaggcgatgatcgacggcgaatcgaaagcgctgctctgccttggcgggaacttcgcggtggctatgccggatagcgaacgggcttttccggcgatgcgggggctggatctgagcgtgcatattggcaccaagctgaatcgctcgcatcttctggtggccaatgagacctttatcctgccgtgccttggccgaaccgaactcgatattcaggagacgggacgccagtcaatcaccgtggaagattcgatgtcgatggtgcacgcgtcgtcgggcaagctgaaacccggttcgccagagctgcgatcggagccggcgattgtcgcggcgatggccatggcgacgctgccggaaagcaaggttgactggctgtcgctggtcgccgactacgatcgcattcgcgatctgatcgagcagaccattcccggctttgaccagtacaaccagcgtattcgccatcccggcggttttcgcatgccgctgccgccgacggagcgtatctggccgacgccgaccggcaaagcgatgttttccgtttttcacggggtgcacgaaaaccagcaggtagcagggcatgacgtgatgcgcctggtgacgctgcgcagccacgatcagtacaacaccaccatttacgccatggacgaccgctaccgcggcgtgtttggccgtcgcgacgtgttgtttatgaacgagcaggatatggctgagcagggattcgaacacggcgatcgggtggatatcagctccgcgctgccgggccaccatcagcggttggaagatatcacgctggtcgcctacagcatcgcgccgggcaccgttgccgcctattaccccgaagccaacgtgctggtccctctggattatctcgataaagagagcggcacgccgtcgtataaatcggcgcccgtccgtttaacgctgcgctcgaaagagatccgcgcgctggcggggcttcgctaa

SEQ ID NO: 178643 - DNA, 480 bp, Klebsiella oxytoca
atgatagtgcttcgcccaatgcgcgatacggagtaccccgcgtatctcgactactttatccccgactacgcggcggaaatctccgccaattacgcgctctcgccggcggccgcgttagcccaggcgcagcgcgaaatcgccgcggatctgcccgacggcgtcaatactcgcggccaggttttatgctgcttatttgatgacagtgacggcgcggaaaagcgggtcggctatctctggtacaagcctgacgaagaaatgcgctccgcctttatctgcgatttttatatttatccggcgtttcagggacagggcctgggtaaacaagcgatggcggcttttgagcatgcgctgaaaagccaggggatcggccaaattaaactgcgcgtcgccggggataatcagcgcgcgcgccatctctacgacgccgcgggtttccgcgttaccggcgttaatatgagtaaaaatatcccgacggattga

SEQ ID NO: 178644 - DNA, 1713 bp, Klebsiella oxytoca
atgagcacattactaactgcacaatctcttcatgttgatacggcgtttggcccgctgttcacaaacctctcctttaccctgaaaaaaggcgaccgtattggcctgattggctataacggctgcggaaaaagtaccctgctacaggtgctggacggcacgatcgtgcccagttcgggcagcgtggcgctggccagtcactgtctgatggcgcgtgtggaacagcatctacccgatgcgctgttagcgcagcccctgctgcaggtagtactggcgaaacttcccgcccctgagcgtgagagtcagcgctggcaagcggagaggctattggcagagatgggctttacgccagatgaggccgcgcagcgggcgtcaaccctgagcggcggtcagcatacccggctgctgcttgccagggcgctgattcagcagccggatctcctgctgctggatgagccgggaaaccatctcgacctgccgaccctcctgtggctggaaagcttcctgcaaacctggcaggggagcttcgttctggtgtcgcatgataatatcttattggatgctgtaactaatgccagttggatcctgcgcgacagaacgctgcacgccttctccctgccctgcagcgccgcccgccgggcgctggaagagcaggacgccagcgatgcgcagcgccataaagccgagcaaaaagagatcgaccgggtcgccgccagcgccaaacggctggctatctggggtcggacctatgacaacgaagatctctcccgcaaagccaagcagatggagaagcaggttcaacgcctgaaggagagccaaaccgagctgaccatgggcaccccctggcggctggcgctccacggcgacatgctgcgggctgaccgactgctggagatggaacagctcccggttccccccgcgcccggtctgccggccctgtttaccgcgggcctggctcgcctgaaaagcggcgatcgggtggcggtgatgggccgtaacggcggcggcaagtcttcgctgctgcgtctgctgtggcggcaaatgcagcaggaaacgacggaaagcggtttgcgcctgcatccgcggctgaagccgggttattacgaccagaccctgcatcagctggcggatgacgatacccttctcgacgcgctggagccctttgaaccaggcccggatgcgcgcaggcgggcgctgatttccgccggattcagctggccgcgtcacgggcaaaaggtcgccaccttaagcggcggcgagcgttcgcgcctgctgttcgtcggcctctctctggcccgctatagcctgctgctgctggatgagcccaccaaccatttagatatggatggcaaaacggcgctggcggctacgctgcgcgactatcccggcggcctgctgctggtgagccacgatcgcgagctcattaaccgcagctgcaatcgcttctggcttatcgacgagcgcgggctgagcgaatggcacagcagcgaagaggtgtatgagattttgcgcaccgccgttcgtcgtccggcgacgcaggccgcgacggtgaacagtagcgaaccggaggaggaccaggatgcgctgctggagcggttagtcacgcttgagcagctgctggccgacgatctggcgcgcaaaccaaaacatcaaaaaccgcagctgcaggcgcagtggcgtaaggagataacaacgattgcgacgttattaggctaa

SEQ ID NO: 178645 - DNA, 528 bp, Klebsiella oxytoca
atgatcgacttaaccgccaggattgatatcgttaccggctatcgtccgggaatgattggccgcattacgcagatgcacggcgagtactatgcgaagcattatgaatttggtcactttttcgagagcaaagtggccagcgggctggcggagttttccggtcgtcttgagaaaccgtgcaaccgggtttggcttgccgttcagggtgagcagattgtcggatcggtggcgattgacggcgaggatcttggcaataatgaagcgcatctgcgctggtttatcctcgacgatagctgccggggaagcggtgttggccgacgtctgctgaatgaagcgatggccttttgcgatagccagaacttcgccgcggtgcggctgtggaccttcagcgggctgaacgccgcccgcaggctgtatgaatccttcggctttacgctggataaagcgtggcagggggatcagtgggggcggatgatgaccgagcagcagtttagtcgggtcaaacccgttgcgcctgccggcgcggaataa

SEQ ID NO: 178646 - DNA, 480 bp, Klebsiella oxytoca
atgtctacacccgcacatttatggctcgaagatgaaaatggttcgccgattgttggcagttgcctaatgccacttcgcctgggttcaatcgaattaaaatcattctctcacggtgtcactattccggttgacccgagctggggaaaacttacaggtacacgcgttcaccgccctataacgatagtgaaagaatttgatcagacaacaccacttctgtaccgcgcggtctgtgaaggccggaccatgaaaaaggctacaattaagatgtaccgcattctggaatcgggcatcgaggccgagtatttcaatatcattcttgaaaacgtcaaattcacaacggtcgcaccattcctgtctcctaacggtatgagtagtactcaccttgaaacgcttgaattgcgttatgaagcaattacatggaagtatacggagggtaatattgtctatcgtgattcatggaacgatcgttgttgtgcctga

SEQ ID NO: 178647 - DNA, 693 bp, Klebsiella oxytoca
atgtactacagaaatgaagttataagttatttgcaggctaataaaattcttgcgttaaaactcgaccacgcattagagagtgtgggaaaagacgtatcaaatcagattgaaaggatcggtgcaggcgcaacgcgtgtgctgtattatacatcctgctttactgatgaatatcaggacgtatgccagaaacaaaagtccgaagatatccgatttactaaaggcgtttatcatattataaggcatggaggtgttgtgtatgaaatgcttagaatttactttgaagaagtattccgatacaaaacatccgatcaactagagcacatcaaacaactgttaatggcagtaaatattcatattgccgcaagttcactcacaaatacaggatttgctttagcaacagcatcatttgtcgctgcaggcatgaatttaagtcttgaactcagtgcactggcagggagaagagcgggaggtgttgttggggttattggtttatatggcgttgtgcagaaagcggcagatagtgcgcgtcgtcttcatattacttgtccagcgtactacacggcgctatatgcacaagagctggaaatgatgtacttcctgatagagccattgtttgaaagagctgaggcgtttaatgcacaatgggtatcggatggtgagattgcagacatcatcaccaggatgattcgataa

SEQ ID NO: 178648 - DNA, 399 bp, Klebsiella oxytoca
atgacagaaatacgcattggctatgcccgatgttcaactgaccgccaggatctggctcaggctctggcggcagttcgccagggagacacgctggtcgtaccgaaactggacaggctggcccgttcagttccggatgcaagagatattgctgatgcccttcaggcccgtggcgtgaagctggcgctgggcaacagcctctacgaccctgcagatccgatgggtaagatgttctttaatgtgctggcgacgtttgccgagtttgaaggctacctgatacgtcttcgcacgcgcgaagggatggccatcgcccgggctaaaggaaaactgcgggggaagcagccgaagctgtcagataaacagcagaaagagctttgcaggatgcgcggaagcggcgagtaa

SEQ ID NO: 178649 - DNA, 1011 bp, Klebsiella oxytoca
atgaaagctgctgtcgtcacgcaagatcatcaggtcaatgttacggaaaaaacgcttcgtcccctgcaacatggcgaagcccttttaaaaatggattgctgcggcgtatgtcacaccgacctgcacgttaagaacggcgactttggcgataaaaccggggtcattctgggccatgaaggcgtgggcgttgtgcagcaggtcggccccggcgttcattctctgaagccgggcgatcgcgccagcgtggcgtggttcttcgaaggctgcgggcattgtgaatattgtaacagcggcaacgaaacgctgtgtcgctcggtgaaaaatgccggctacaccgtggatggcggtatggcggaagagtgtatcgtcatggccgattatgcggtcaaagtgccggacgggctcgattctgcggcggccagcagcatcacctgcgcgggcgtcaccacctataaagcggtcaaagtctcacatatcaaacccggccagtggattgccatttatggcctcggcggcctcggcaatctggcgctgcagtatgccaaaaacgtgtttaacgccaaagtcatcgcccttgacgttaatgatgaacagctgaagctggccgctgaaatgggcgcggacctgaccatcaactcccgcagcgaagacgcagccaaaattattcatgagaaaaccggcggcgcgcatgccgcggtggtaaccgccgtcgccaaagcggcgtttaactcagcggtggatgcggttcgcgcgggtggacgcgtggtggcggtaggcctgcctccggaagcgatgagcctggacattccgcgtctggtcctcgacggtatcgaagtggtgggttcgctggtcggtacccgtcaggacctgaccgaagccttccagtttgccgcggaagggaaagtcgtaccgaaagtgaccctgcgtccgctgggcgatatcaacgccatcttcaaagagatggaacagggacagattcgcggccgtatggtcattgatttccgccgctaa

SEQ ID NO: 178650 - DNA, 570 bp, Klebsiella oxytoca
atgctgaagtatttactgatgttggcgatgacggtgctggcaggctgtaccagcgcacccaatttgccctctaccgataccattattaaggttaaacctattgagtcgggcatcattgccaattcaaacaaatacagctatcgattcttccgtaaaggggtgccgcaggagtaccagcgttataatactttctacgaacgcttcaataaggtcgcatccggcgtacgggtgaattttgtcgtgaaacagcatgaggttgttgcggaatatctggtggtgctcgacaagcgcagactggatgccagtcagctaagtctgttaaccagccagtatcacgcgaccgcgctggacaacgaccatcttggcgtactgtttaaagcgaccggtttctggtcaaccgttgatcccaatgagctggatgacgcttatcgccttgccagacccgtcgtcgtgtcaattaacgataaaacgcagaccattagccctctgggagagatcgccctgattccgctggtgccgctatttccgctggtgatgatgtacggttgcgcaacggggccgtgcgtgtaa

SEQ ID NO: 178651 - DNA, 189 bp, Klebsiella oxytoca
atgaaagagtacacagcggatgatagcttccagcaggcgatatcaacgagcaaaaagcaccgtttatcctcgatacccacagctgaaagtcagtcaattcatcccagtaacgagttgatccggttaatgaatgaattcgtcgacgagcatgggtccatcaccgaagatgaatacttcagggtgctctga

SEQ ID NO: 178652 - DNA, 324 bp, Klebsiella oxytoca
atgcttaaacaattcgacgtgtatcggaacccttcttcgcaaacgaagcactctctaccctattttatgattgtgcaaaatgatttttatgaagacctacccaccagggtaattattcccctgatgcgtaatgctcatctgccactatggcagcatcctttagttcctgaggtaaatattgaatttgaaacgtttatgctttgttcgccgatgatgacaaaccttaataataagctgatcaagcgcgaagattttatctgtaacttaaaaagcgccagaggcgaagttatttccgccattgacgcccttgttaccaatacctga

SEQ ID NO: 178653 - DNA, 1389 bp, Klebsiella oxytoca
atgctgagcaaaaatgagaaaaagaatcattatcttttaaaagagtggaaaccagaaaatgcggcgttttgggagaataagggaaagcaaatagcgcgcagaaatctttgcatttccgtaggttgtttgctactcgccttttgcgtctggatgctattcagcgccgtcgccgtcaatctcaataaagtcggatttaatttcaccaccgatcagctctttttattaaccgctctgccctcgctttccggcgcaatattacgcgtcccctactcctttatggtacctatatttggcgggcgctactggacggtattaagcacgattattctggtggtgccctgtatctggctgggtatcgccattcaaaaccccgctactccattctgggtatttatcaccattgccctgctgtgcggttttgccggtgcgaactttgcttccagcatgggaaatatcagttttttctttcccaaagcgaaacagggcagcgcgctgggtatcaacggcggcctcggcaatctcggcgtcagcgtgatgcagatgatcgcgccggcggcgatttttctgcccatcttcgcttttcttggcatccatggcgtgcctcaggaggatggctctcttctcgcgctgagcaacgccgccctcgtctgggttccgctgctggtgatagccaccttcgccgcctgggtaggaatgaacgacatcgccagctcaaaggcttcgattcgcgaacaactgccggtgctgaaacgcccgcatatgtggctgctgagcctgctctatctggccacctttggctcgtttatcggcttctccgccggtttcgccatgctggcgaaaacgcagttccctgatgttaacatccttaagctggccttcttcgggccgtttatcggcgcgctggcgcgttctttcggcgggattatatccgaccgtctcggcggcgtacgggtcacgctggtgaactttgtgctgatggcgctgttcaccggcctgctgtttctcaccctccccggcagcggctcaggcagttttctcgccttttacgtggtgtttatggggctgttcctgaccgccggtctcggcagcggttccaccttccagatgatcgccgtgatctttcgccaaatcaccctcgacagcgtgaagaaacgcggcggcagcgacgaacaggcccagcacgaagcggtgaccgacaccgcggcggcgctcggctttatctccgccatcggcgcgattggtggcttctttatccctaaagccttcggtacctcgctggcgatgaccggctccccggtcggggcgatgaaggtcttcctggttttctacgtggtttgcgtgctggtgacctggctggtctacggccgtcgtaaaccggcaaaacaataa

SEQ ID NO: 178654 - DNA, 681 bp, Klebsiella oxytoca
atgatacagtatctgaacgtctttttttacgacatctacccctacatctgcgcgacggtcttttttctcggcagctggctgcgctatgactacggccagtacacctggcgcgcctcctccagccagatgctggataaacgcgggatggtgatctggtcgaatctgttccatatcggcatactcggcattttctttggtcatctgttcggcatgttaacgccgcactggatgtatgcctggtttttacccattgcggtcaagcagcagatggcgatggtgctcggcggcgtctgcggcgtcctgacgctgattggcggcgccggtttgctctggcgtcgtctgaccaaccagcgcgttcgcgccacctcgaccgcgccggacatcatcatcatgagcattctgctgattcagtgcctgctcgggctgagcaccatccctttctcggcgcagtatccggacggcagtgaaatgatgaagctggtgggctgggcgcagggcatcgtcaccttccgcggcggctcgtcagaaatgctcagcggcgtggcctttgttttccgcgtgcatctggtgctggggatgacgattttcctgctgttcccgttcacccgactggttcacgtctggagcgcgccgtttgaatatttcacccgccgctaccaggtggtacgttcaagacgctga

SEQ ID NO: 178655 - DNA, 297 bp, Klebsiella oxytoca
atgaaagacgaattgtttgccgatctgctggctagtgcagaagaaatggtcaggattgagaagggtgaacaaacgccgaaggtgcaccacgttcataccttcagcgaagttgatgtgaaagcgatacgcgaagccacaggtttaaaacagcaggacttcgccgccgccgttggcgttagctatgagctggttaaaagctgggaaacgaaacgacgtcatccaaccggtgcatccaggaagctgcttttattgcttcagggcaatccattgattatcaacttgttgaaggttatttga

SEQ ID NO: 178656 - DNA, 318 bp, Klebsiella oxytoca
atgtttacttttattgaactacaaggtttcagtaaacgacgccaggcgctgttaccggatgatgaatttcgggccttccaggaaatcctgatcaatgatcctgaggcaggtgacaccatttcgggaaccggaggttttcgtaaaatccgctggagtcgtcccggaacgggaaagcgcggcggcgtgcgggtgatttactataatgtaacgataaagggaagaatctacctggcgctcatctatcctaaaaatgaacaggatgagttaagccaggagcagaaaaagatgttaaggcaggttgctgagttattaaactag

SEQ ID NO: 178657 - DNA, 228 bp, Klebsiella oxytoca
atgccgcacgttgatattaaatgttttccccgcgacctgaatgatgaacaaaaagcggcgctggccgccgatattaccgaggtgttgattcgccacctcaacagcaaagagagttcagtgagcgtggccctgaagcaggttgagccgagcgactggcagcaggtgtgggacagcgaaatcgccccgcagatggaacagttgattaagaaaccgggctatagcatgtaa

SEQ ID NO: 178658 - DNA, 3225 bp, Klebsiella oxytoca
atgccaaaacgtacagatataaaaagcatcctgattctgggcgcgggcccgattgttatcggtcaggcgtgcgagtttgactactccggcgcccaggcgtgtaaagcactgcgcgaagagggctaccgcgttattctggtgaactctaacccggccactatcatgaccgacccggaaatggccgatgccacctacatcgagccgattcactgggaagtggtgcgcaagatcattgagaaagagcgtccggatgcggttctgccgaccatgggcggccagacggcgctgaactgcgcgctggagctggagcgtcagggcgtgctggccgagttcggcgtgaccatgattggcgcgaccgccgacgcgattgataaagccgaagaccgccgccgtttcgacgtggcgatgaagaaaatcggtctcgataccgcgcgttccggtatcgcgcataccatggaagaagcgctggcggttgccgctgaagttggcttcccgtgcatcatccgtccgtcctttacgatgggcggcaccggcggcggtatcgcctacaaccgcgaagagttcgaagagatctgcgaacgcggtctggatctctcgccgaccaacgagctgctgattgatgaatcgctgatcggctggaaagagtacgagatggaagtggtgcgtgataaaaacgacaactgcatcatcgtctgctccatcgaaaacttcgacgcgatgggcatccacaccggcgactccatcaccgtggcgccggcgcagaccctgaccgacaaagagtaccaaatcatgcgtaacgcctcgatggcggtactgcgtgaaatcggcgtagagaccggcggttccaacgttcagttctcggtgaacccgaaagatggtcgcctgatcgttatcgaaatgaacccgcgcgtctcccgctcctcggcgctggcctcgaaagccaccggcttcccgatcgctaaagtggcggcgaagctggcggttggttacacccttgatgagctgatgaacgatatcaccggcggccgcaccccggcgtcgtttgagccgtccatcgactacgtcgtgaccaaaatcccacgcttcaactttgaaaaattcgtcggcgcgaacgaccgtctgaccacccagatgaagtcggtgggcgaagtgatggcgattggccgtacccagcaggagtccctgcagaaagcgctgcgcggcctggaagtgggcgctaccggtttcgacccgaaagtgagcctcgatgacccggaagcgttgaccaagattcgccgcgagctgaaagacgcgggcgctgagcgtatctggtacatcgctgacgctttccgcgcgggcctctccgttgatggcgtgttcaacctgaccaatatcgaccgctggttcctggtgcagattgaagagctggtgcgtctggaagagaaagtggctgaagtcggtattaccggcctcgacgccgacttcctgcgtcagctcaagcgtaaaggctttgccgatgcgcgtctggcgaagctggctggcgtgcgcgaagcggaaatccgcaagctgcgcgaccagtatgacctgcacccggtctacaagcgcgtggatacctgcgcggcggaattcgctaccgacaccgcctacatgtactccacttatgaagacgagtgcgaagccaacccgtccgttgaccgcgacaaaatcatggtgctcggcggtggcccgaaccgtatcggccagggcatcgagttcgactactgctgcgtccatgcctccctggcgctgcgcgaagacggctatgagaccattatggtcaactgtaacccggaaaccgtctctaccgactacgacacctccgaccgcctctactttgagccggtgacgctggaagacgtgctggaaatcgtgcgcattgagaagccgaaaggcgttatcgtgcagtacggcggccagacgccgctgaagctggcgcgcgcgctggaagcggcaggcgtgccggttatcggcaccagcccggatgccatcgaccgtgcggaagaccgcgagcgcttccagcacgcggttgaccgcctgaagctgaagcagccggcgaacgccaccgtgaccgcgatcgaaatggcggtcgaaaaggcgaaagagattggctacccgctggtggtgcgtccgtcctacgttctcggcggccgcgcgatggaaatcgtctacgacgaaatcgacctgcgtcgctacttccagaccgccgtcagcgtctctaacgatgcgccggtgctgctggaccgcttccttgacgatgcggttgaagtcgacgtcgatgcgatctgcgacggcgaaatggtgctgattggcggcatcatggagcatatcgagcaggcgggcgtgcactccggcgactccgcgtgttcgctgccggcctacaccctgagccaggaaattcaggacgtgatgcgcgagcaggtgcagaagctggcctttgagctgcaggtgcgcggcctgatgaacgtgcagtttgcggtcaaaaacaacgaagtctacctgattgaagtcaacccgcgcgcggcgcgtaccgtcccgttcgtctcgaaagccaccggcgtaccgctggcaaaagtcgcggcgcgcgtgatggccgggaaaacgctggctcagcagggcgtcacgaaagagatcatcccaccgtactattcagtgaaagaggtggtgctgccgtttaacaaattcccgggcgtcgacccgctgttagggccagaaatgcgctctaccggtgaagtcatgggcgtaggtcgcaccttcgcggaagcgttcgccaaggcgcagctgggcagcaactcgacgatgaagaaacagggacgcgcgctgctctccgttcgcgaaggcgacaaagagcgcgtggtggatctggcggcaaaactgctgaagtttggtttcgagctggatgcgacccatggtaccgcgattgtgctgggcgaagccggcatcaacccgcgtctggtgaacaaggtgcatgaaggccgtccgcacattcaggaccgcatcaagaatggcgaatacacctacatcatcaacaccaccgcgggccgccaggcgattgaagactccaagctgattcgccgcagcgccctgcagtacaaagtgcactacgacaccacgctgaacggcggtttcgcgaccgcaatggcgctgaatgccaacgcgatggaaaaagtgacctcggtgcaggaaatgcacgcgcagattaaaaagtaa

SEQ ID NO: 178659 - DNA, 1866 bp, Klebsiella oxytoca
atggatagccatacgctgatacaggcgctgatctatttaggatccgccgcgctgatcgtgccgattgccgtacgccttgggctggggtcggtgctcggctacctaattgccggctgtattattggcccgtgggggctgcggctggtcaccgacgccgagtcgattttgcacttcgcggaaatcggcgtggtgctgatgcttttcgttatcggtcttgagctcgatccccagcggctgtggaaactgcgcgcctcggtgttcggcggcggggcgctgcagatggtcgtctgcggcgtgctgattggcctgttctgcatgtcgctgggtctgcgctggcaggttgccgagctgattggtatgaccctggcgctctcctcaacggcgatcgctatgcaggcgatgaacgaacgtaacctgacggttacccagctgggccgcagcgcctttgcggtgctgctgttccaggatatcgcggccattcctctggtggcgatgatcccgctgctggcggcgagcggcggctcgacgacgctgggcgcgtttgcgctctcggccctgaaagtggcgggcgcgctggcgctggtggtggcgctcggacgctatctgacccggccgatgctgcgttttgtcgcgcgctccggcctgcgtgaagtcttcagcgccgtggcgctgttcctggtgtttggcttcggactgctgctggaagaggtcgggctgtcgatggcgatgggggccttcctcgccggcgtgctgctggcgagctcggagtaccgccacgccctggagagcgatattgaaccgtttaagggcctgctgctggggctgttttttatcggcgtcgggatgtctatcgacttcggtaccctggtgacgcatccgctgcggatcctgattctgctggtgggattcctggtcattaaatccctgatgctgtggctgatcgcccggccgttaggcgttccgcgcgcccagcgccgctggtttgcggtgctgctggggcaggggagcgaattcgcctttgtggtcttcggcgcggcgcagatggccgatgtcctggacggcgaatgggcgaaggcgctgaccctcgcggtggcgctatcaatggcggccacgccaatcctgctggtgctgctgacccgcctggagaaatccgccagcggccaggagcgcgaagccgatgaaattgacgaagagcagccgcgggtgattatcgccggctttggccgttacgggcagatcgccggccgcgtactgctctccagcggggtgaagatggtcattctcgatcacgatcctgaccacgtcgacaccctgcgtaaatttgatatgaaggtgttctacggcgatgcgacgcgggtggacctgctggagtcggcgggggcggaaaaggcggaagtgctgattaacgccatcgacgatccgcagacgaacctgcagctggcggagctggcaaaagaacatttcccgcatctgcagatcatctcccgcgcccgcgatgtcgatcattacatcaagctgcgccaggccggggtcgaagcgccggagcgtgaaaccttcgaagcggcgctgaagtccggacgcatgacgctggaggcgctgggcctgggcgcctacgaggcccgcgaacgggccgatctgttccgccgtttcaatctgcaaatggtggaagagatggtggcgatggcggaaaacgactcggcttcccgggtggcggtattcaagcgcaccagcgatatgctgaccggcattatcaacgaagaccgtaatcatttatcgctggttcagcgtcacggctggcaaggaacggaagagggacggcataccggtgacatcgccgatgagccgcaaaataagccctcggcataa

SEQ ID NO: 178660 - DNA, 1599 bp, Klebsiella oxytoca
atgacactgcctttcaaaccccatctgctcgcgctgctctgtagcgccgggctattagccgccgcgggtacgctctacgtcaaaagccgggagccgcaaacggttcccgagccccccgccgttgcgcaaacggcgcaggcaaccgccgccgcccagccggtgaccacgacctatacacccgcgcagatagaccagtgggtcgcgccaatcgcgctctatccggacaatctgctgtcgcaggtgctgatggcttcgacctacccgagtaacgttgtccaggcggtagagtggtcgcaggataaccccacaatgaagggcgacgcggcggtgcaagcggtggcaaatcagccctgggaccccagcgtaaaatcgctggtcgccttcccttcccttctcgcgttaatgggagaaaatgcgccgtgggtggaaaacctgggtaacgcctttctcgcccagccgcaggccgtcatggattcggtgcagcgcttacgcgccatcgcccagcagaccggaacgttaaaatccacgccgcagcagaaagtcatcaccgccacccgctccgcggcaccggctccggctccggcaacgtccacggccaccgcttcccgcagcagcagcgccgtgacatcctccgccccggcgcaggtgattaaaatcgaatccaccaatccaaatgtggtatacgtgccggcctataacccttcagttgtttacggcacctggcctgaaaccgcctatccgccggtctacctgccgccgcctccgggggagcagtttaccgacagcttcgtcaaggggtttggctatagcctcggcgtcgccacaacctacgctctgttcagcagcatcgactgggatgatgacgatcatcaccactatgatgatgacgatcaccatcacgatgatgatcatcacggtggctacgtgcacaacggcgataacatcaacatcaacgtcaataatttcaaccatattaccgggcagaacctgccgggaaaccacgccagctggcagcataatccggcctaccgcggcaatattccctatccgaacaatacgattgcgcagcattaccatcagaccaatgttcccggcgggcttagcgcgacccaacatcagcccgccgatcgcaacgcgcagcgtcaggcggccatgacgcagctacagcagcgtaccgggcctgcggataacgcgcttaatcacgcgccttcccgcgatgcccagcgccaggccgcgtcgcagcagctccatcaggtgacccagcgcaataactatcgcggctatgacgccacgccggcggtaaaaaatagcgccgtacaacagcagcatcgggaagcggtcaaaacgcaaattcagcatccgacggcgcagcagcaacagcgccgtgaacagttccgggccgcaacgcccgaacaacgtcagcagaagctgaataatctgcacgccaatgccctgagcggtaacgatatccgctctccctcctggcagtctcagcaggagcgcggcctgcagagccgccatatctcgggtttaagcagcgagcagcgcagcgcggccagagaacatctttccgaacaccgtgaactgcgccgccgctga

SEQ ID NO: 178661 - DNA, 954 bp, Klebsiella oxytoca
atgaacatcaaaaaggctatagaacgtgtacctggcggcatgatggttgtgccactggtgatcggcgccattatcaatacctttgccccgcaagcgcttgagatcggcgggttcaccaccgcgctgtttaaaaacggcgcagcgccgctgattggcgccttcctgctctgtatgggggcgggaattagcgtcaaggcagcgccacaggcgctgttgcagggcggtaccattacgctgaccaaactcctggtcgccattgcgattggcctcggcgtggaacaactctttggtgctgaagggatcttcggcttaagcggcgtggcgatcatcgctgcgatgagtaactcgaatggcgggctttacgccgcgctggttggcgagtttggtaacgagcgtgatgtgggagcgatctccatcctgtcactgaatgacgggccattctttacgatgatcgcgctgggcgcggcggggatggccaacattcccattatggcgctggtcgccgtgctggtgccgctggtggtgggaatgatcctgggtaacctcgatcccaacatgcgcgacttcctgaccaaaggcggcccgctgttgatcccattcttcgcttttgcgctgggcgcagggatcaaccttgaaatgctgctacagggcggtctggcgggcattctgctcggcgtgctgacgaccttcatcggcggtttctttaacattcgtgccgaccgtctggtgggcggaaccgggattgccggtgcggcggcgtccagtaccgccggaaacgccgtggcgacgccgctggcgattgcccaggccgatccctctttggcagaggttgccgccgcggccgcgccgctgattgccgcatcggtgatcaccaccgcgattctgacgccggtcctcacctcatgggtggctaagaagcaagcgcgtcaggttgcagaggagaaaaaagcatga

SEQ ID NO: 178662 - DNA, 1272 bp, Klebsiella oxytoca
atgaaaatgatcgttatcgccgacgactttacgggttctaacgataccggcgtgcagctggcaaagaagggggcgcgcacggaagtgatgctaacgccggatcaaaaaccttcgcgtcgcgctgatgtgctggtgatcaacaccgaaagccgcgcgatgcctgcagctgaggccgggaaagcggtagcgcaggcgttagcgccgtggtgcgatggtgatgcgcgtccgctggtttacaagaaaatcgactccactttccgcggcaacgtgggggctgaagtgacggcggcaatgcgtgctgcaaaccggaagctggccgtaattgcggcggctatccccgcagccgggcgcaccacccgcgacggattatgcctggtcaacggtacgccactgctggaaaccgaattcgccagcgatccgaaaacgcccattatctcctcgcgtattgcgacgttgatcgccctgcaaagcgatatcccggttcatgaagtgtcgctcgaagacgttcgtcgggggcaattgagcgccctgttgacggctttttcagccgagggtgagtgcatggtggtggtggatgccgtggaagatcgcgatctgttgctgattgcccaggctatttgtgaacaaaaagagatgccgctgttggttggcgctgccgggctggcgaacgcgctaccggtcagcaccttcatgcaggaaaagcaggagctaccggtactggtggtggccggatcgatgagcgaggccacgcggcggcaggttgaaaaagcgctctgccaggcgcgcgccagggtcgtggatattgatgcctcgcggctggcctcggcccagtacgagcaggaaatggccgcggcggttgaacaggcctgtgcgctgctcggtcgccagcagcacaccattttacgtaccagccggagtgcggacgatcggcagatgatcgacggcctgtgcgctcaggctagcgtaagccgccagcagctcggtgagatgcttagcgaacgcctcgggatgattacgctgcgcattatcgaacaggctcgtattggcgggctcttcctgaccggaggagatatcgccaccgcggtcgccgccgcgctcggggcggaaggctatcgcattcagagtgaggtggcgccctgtattccctgtgggacgttcgttaacagtgaaatcgacgatctgccggttatcactaaagccggcggattcggttcagacagcaccctttgtgatgcgctttattttattgaggagatgtacagtggtaactaa

SEQ ID NO: 178663 - DNA, 984 bp, Klebsiella oxytoca
gtggtaactaaaacaattgcgattacgatgggcgacccggcgggcatcggtccggaaattattgtcaaagcgctttgtgaatacgagctcaacggcgcgccgctggtggtggtcgggtgtctgaaaaccctgaaacgtctgcaggacaaagggctggccgaaggcgtcacctttcgcgcgatcgccgaggtcgcggaggcgcgatttgctcctggcgtgattcatgtcattgacgagccgctggcccagccggacgcgctggagccgggtaaagtgcaggcccaggcgggcgatctggcctaccgctgcgtgaagcgggcgacggcgctggcgatgaaaggcgacgtacacgccatcgcgaccgcaccgctgaataaagaagcgcttcatctggccgggcacaattatcctggtcataccgagctgctggcgacgctgactgaaagccgcgattacgccatggtgctctacaccgacaagctgaaggtcattcatgtctcgacccacattgcgttgcgtaagttcctcgatacgcttaatggccagcgcgtggagacggtcatcggcatcgcggatcgcttcctgaaacgcgtcggcttcacccagccgcgcattgccgttgccggggtcaatccccatgcgggcgaaaacggtctgtttggcgatgaagaaatacgcattgtgtcgccggccattgaaaacatgaaagcgaagggaatcgatgtttacgggccctgcccgccggacaccgtgtttctacaggcatacgaggggcaatatgacatggtggtggcgatgtaccacgatcagggacatattccgctcaaactgcttggcttctacgatggggtgaatatcaccgcgggtctgccgttcatccgcacttctgccgatcacggcaccgcgtttgatatagcctggacgggaaaagcaaaatctgagagcatggccgtatcgattaaactggcaatgcaactggcgtaa

SEQ ID NO: 178664 - DNA, 771 bp, Klebsiella oxytoca
atgaaaggacaacaccgtctggataagattgtagcgtatttgaaaaatcatacgctggtgaccgtggaacagctggtggatgcggtagaagcatcgcctgcaacgatacgacgcgatctgatcaaactggatgagcagggcgtgatcagccgcagccacggcggtgttgccctgcggcgctttgagccttctcagcctaccaccaatgaaaagcagctacgatcgcctgcggaaaagcgggcgattgcgcgttttgccgcctcgatggtgcaggcgggcgacgcggtggtactggatgccggcaccaccatgctggagctggcaaaatgcctgacccatcttccgctcagggtgatcacagtcgatctgcatatcgctctgtttttatccgagttccggcagatagaagtgaccatcgtcggtggccgcattgatgacagcagtcagtcctgtatcggcgagtttggtcgtaagatgttacgtagcgtctatcccgatatcgcttttatgagctgtaacagctggagcgtggaaaagggcgtgacgacgccgacggaagaaaaggcggggctgaagcaggagatcattgccaacgcccagcgtaagatcttactggccgacagcagcaaatatggcgcccactcgctgttcaacgtcgctccgctgggccgcttcactgacattattaccgatgtgagtctgcctcttcccgttcaggctgagctgaaagcgcagtccgttgcccttacgctggtacagcctgaacgttaa

SEQ ID NO: 178665 - DNA, 1764 bp, Klebsiella oxytoca
atgaacgggaaaatagccaaaaacttcaatccggtatcgctggcagcagtttttgtgctggcgctatcgccggatgtctatgcggaaaaagatgcccttattagcgtcacggcaagctcaaatagtgatgcttcaggcccggcatttttaaattatgctaaagagcatcaggcgcaaaaaatcagcgagccggtaaagcccgttgaggagaaaagcaataatacaaaaacaacgaataaaaaaacagtcctgaatacccatgaagtttcccgtcaggctgcaataattgctcaaaaagataaactcatccgccaacttcggcagcagcttgatgcgaagccggccatgatgaacgccgaagcagacaaccaaaaagcgctgaaggataaaattcagctgcttgagaaaaagttagcgactgccgtagccgaaaaacaacaattaatagataacgcgctatccgccgcggctgaaataaaacagatcgagggtcagcgtaatgccacagaaaataaaacgctgcagcaggaaaaaagagtggcattaatagaatccgcgaaacaaaaagttgagcgtcagctggctgaggcaaccgccgaaaagcaatccctgcagcagaagctcgcagcgctggaaacagaaaaacaggatacgctctcaaagctggcggcggccgcagcagagaaacaagcgctcaccggtaagttcacgacagaggcgaaagagaggcaagccctcgcaacaaggctcgctgctgcagaggcagatcagcaggaaatgctgacaaaactcgccgcggctgacgccgcacagcgggcgctgcaaacgaaactcgatgcgtctcaagccgagcagaaagcagcgatagcgaagctcgccgccagtgaagcggaaaaaacagatttaacgacaaagctggcggccgcggcagtagaaaaacaggcgctcacggctaaactagacgccgttatcatcagtaagccccagccgtcccttcaggcggatgctgtccgtcagcaggccgatcaagaccacgccctacagcaggccagcgccgatgaaattacccggctaaaggccaggcttgctgacgccgaggcgaaaaagccgctggctatcgactttgcaaaagagcctctgcggcaggcttacgctatcggcgtatcgatgggcgaggaggtgctgcagctcttatctacccgggcatctcagggcgtaaaaaccagtaaagataccgttttacaggggattatggattctttttcaggggatatcgcccttgatgagaaagcgcgcaataaagccttattcgatgtgtctaaaaaagtctttcagaacctaaagaagctcgaacagcaaacccttagcgaaggaaagaaatatcaacaacacttcgcgaagcaaaaaggggtggtattgaaagacggcatttacagtcgcatagattatgccggcaagggcaagattctcgacagcgatatcgttaccgtcaccatcaaggaaacgcttaccgacggaaccgtcattaacgatatggaagcggaggggaaagtctggtcccagcctctgaaatcttatcctcccatcttccttgggccactcaagcggctgggaaaccacggagcgataacggtcgtgatccctcccaatctcgcctacggcagcgaaggcaagccgcctaaaatcccgccgggagcgaccatggtatataccgtcagaatcgttgacgccactgcggcggaaccacaggttaaaaaaccctga

SEQ ID NO: 178666 - DNA, 759 bp, Klebsiella oxytoca
atgaaaaataaactcactatcgccctgctgctggcggcggtctatctcttctggctgctgtttagcgcgccggcgcggctgctcactctggcgctaccggacggcgcgcggctcggcgaaaccacgggcaccctgtggcaaggagaagcccgtcaggccagctggcgcggttttgacatcgcccatttacgctgggagtttggcttttcgtcgtggcttcccggctggcatatcgcgtttaacgacccctccggcctgcgcggccaggcctggctgcacggtctgaacgacgttgtggtgcgcgagggacgactcgcggcgccggcccggacgatcggccagcggttagcatccggcataccgctggaggcccgcggtcaggttgtgctgacgctgcccgaggcccgctttaacgccggcggttgccgacagatgaccgccagcaccgtgcagtggcgggacgcggcgctcagctcccccgccgggtcgctcgaactggcccaggtcaacggcaaattaagctgtaccccggcgggcgcgctggctgtcgccctgacccaggactcccgtcagcttagcctcgcaggacagggcgttctgacgcccaacgggcgctttacgtttaacggtacgctgcagacccgccagacggctccggcgctgctgacgctgctgctcgcgcaaaacggccgcaaagatgagcaggggcgcacgccgtggcagtggcaggggcagtggcgctccggggagaaaaaatag

SEQ ID NO: 178667 - DNA, 486 bp, Klebsiella oxytoca
atggataacctgctcgccttatggcaacagcgtacgcgccgcgaacggcatctgctgctggggatgggcgtcatgctgcttattggcctgatttattacgccctctggcagccctggcaaaatcgcgaggcgcagtggcggcaaacgctggccagggagcagtccagcctgcggtggatgcgccagcagaccccgcttctccagcagcttaaccagcggaaaccttctgccgcgccggaagaaccctcgacggtgattatgcgcgaagctggccgccacggtatcgctatcgttcgcctgcagccgcagggctcccgcctgagccttaccgtgcagcccgccgatttccaggcgctgatggcatggctggacgcgctggggcaggcggggatgaccaccgccaccctggcggtgaccgccgtggcgcagcagcccggttgggtgacgattaatacgctggtgctggagcgcagcgatgaaaaataa

SEQ ID NO: 178668 - DNA, 513 bp, Klebsiella oxytoca
gtgcgacagcgcggctttacgttgctggagatgatgctcattttgctgctgatcggcgtcagcgcgggcatggtgatgctggccttccccgcctcgcgcgacgatagctcggcgcaggcgctggcgcgctttgaggcgcagctgcgctttgtccagcagcgagggctgcaaaccggccagttttttggcgcctcggtgcatcccgatcgctggcagtttctggtcttacagccccgcgaaagcaacgacccgcccccggccggcgacgactggaacggctatcgctggctccccctgcgcgccggacgcgtcgccacctcgggcagcgtcgccgggaacacgctgcatctcacttttccgcagggcgaggcctggacgccgggcgacaatcccgatgtgctgatctttcccggcggtgagatgacgccgttccggttgaccgtcggcgagggaccgggtatcgcgtttaatgcgcgcggcgaaagcctgcccgaaccgcaggaggcgccatga

SEQ ID NO: 178669 - DNA, 1086 bp, Klebsiella oxytoca
atggcaggagaaccacaaccgccgcattcccggctaagcccccggcttgagcgggaaatctatcgcatcaacttctaccgcttctgccagttactggaaaagcgtcgtccgggcgcatcaccgttgggcagcaccctgaatccggcggacgatccggtacggtttcgcccgcatccgggaatgggcttcccggtcagcgagctgaaagcggtggaatatgatgaagaccatccggatgcgccgccgacggtgcgcacgacgtttatggggctctacggcgtcgactcgccgctgcccaccgcgtggctcgacgagatcgcccagcagcgggaagggcacgaagcgcaggaggcgtttcttgatatctttaaccaccgcattctgacgcagttttaccgcatctggcgaaaatattcctacccggcgacgtttgaagcggggggcagggacagcacctcgcagagcctgctgggccttatcggtctgggaatgccgggtaccgataagcatatcgctaccccgatatcgcgttttctggcgctgctcggcatcatgcgcctgcctgcgcgtactgaagaggggattcaggcgctggtgcgtctgctggctcctcgcacgcggaccaccgtcacgccgcactgcccgcgcacgtttttcatcaacaatccactgggtttttacggcaatgacgattttctgctcgatggctataacgtgctgggcgacgaaacgacagaggtcagcagccagctattgattgcgctgtacacggacgatatcgccgaggcgcaggggtggttaccggaagggcagatatatcaggattttctggtcctgctgcgggtctatctcggctggcgctataaggcgcgtatacagctgaccgttcctgcccggttactgcctgcgccggtgctgggcgaaaccccctttatgctcggcatgaccgggatactgggcgtggagggagaggagagcccgcccgatatccccgccacctttactattgagcctggcggctattgcggaatgccgtctgcaactttacaacaaggaaaccagcgtgttgcataccactttgattaa

SEQ ID NO: 178670 - DNA, 498 bp, Klebsiella oxytoca
atgcctttactgctgacaggctgtggcctgacgcagaaaattagcgacagcacctcatcggcggtgaaatcggtattttataagcaggtaaacgtcctgcatctggacgttaccgcccgggcggaactgaacaccgatgagcgggagaacacctcgctctcccagccggtgatggtgtgggtctaccagctcagtgaccgcaaggcgttcgataaacgggtctatcagcagttggtcacggaaagcgaggaggccgccggagacgaacggcttgccagccgtagcctggtggtaaaacccggcgctgacgtcagcctggatatgccgatggacgagaaggcgcagtttatcgcggtggtggggttattccgggcgccggatatggtgaagaatgactggaagctggtgctgaggcgcgacgatctcgatcccgacaaaccgcgcattattgaagccagccataaccgcctgacgctgaaacccctgaaggatgactga

SEQ ID NO: 178671 - DNA, 456 bp, Klebsiella oxytoca
atgcccacacgccataatgccccctcgctgtatgaaatgctgtacggtaactttaccggcggactcgacctgcatcaggtcagtgaggaaaaccaggttattctgtcggtgctggataatatgcagcgcgtcctcaactgtcgcgccgggacgctggcgcacctgcccgattacggcctgccggatatgactaaaatcctccaggggatgccgggtacggctcacgagctgatgggcatcctgtcggccgtattgcttaaatatgaaccgcggctgaagaaaattgacgtggttctgctcgagcaggctattcccggcgagctgcgttacgccattgacgcggagctgaagggcgtaggcctggtgcgctacggcaccgaatttatgcccgagggcagggttcttatccgccacctcaaacagcagcagtacctggaagtccgctcctcaatctag

SEQ ID NO: 178672 - DNA, 1335 bp, Klebsiella oxytoca
atgacgaccccttctgaatgttgcctgaaaaccggcggcgacccgcgtacgcttgcggattacgcgcgccttcgcgatgaaatgaacaaactgacccatccggcgcgcccggatgtcaactggcggctcgcggaaaaactctgcctgtcgctgtttgagcacaacggcgtggagctacagactgccgcctggtatacgcttgtccgcacgcatctggcggggctatacggcatgaatgaagggctggcgatactggtcgcgctggtctcccggcagtggggcaatatgtggccgcagccgacgactgcgcgaatcaaaatactcagttcgctcagtaaacggctgcagcaggcgatgcgcacgctgtcgctgacctatatcgacctgagccagctttaccaggcagaagcgcatctgacggcgctggatgacgtactgcagcgtctggaactcaaacatgccggccagcttgacgccctgtctatcctgctgcacaacgcggcggtgcggctggagagcagcgaaaataaagaggagaccgcgccgcaagcggccgcgcctgatcctgccccttccagcctccctgaaccgaccgcgcaggtgaaatgggtctatgtcgccgaaccggcatcgcggccgaatgctgacgttgtgacggcattcccggcgcccgcgaagccctggaagccgtttgtcgccgggatgctgactatgctggcgctggccggggccgcggcgggaggatggcgggcaacgcacccgtccgattcggggcagatgcggtttcccgcccggttctctccattacccacggtgctttccgctgagcagttacagacgctacgacaacaatccccctcggccgagacggggataaaacagactcagcagcagctggcacagcttttacagctaaaaccggactgggctttgagttatggcactcatctggcgcagcaggcgctgacgctatggccagaacaggcgaaaccgctggcgcaacaatggcaacagcaggtcagcgccgccgcgcttcccgtggagaatctcagcggctggcaccagggaatgacgcagctacagcagttgacgaaccggcttaacgcgctggatgaacagaaggggcggtatatcacggtgagtgagctgaagtcagcggtgtttgccataacgcagtcgttgagccgtaccgttccggcggaagagcagctgcgacaactctccgcacagccgcgcaatcagccagggtctgcggcgcagcagaaccagacggagcagcatctgcaacaactgattgcccgctatgctgcgctgaaacaaaaaacggcggaataa

SEQ ID NO: 178673 - DNA, 1680 bp, Klebsiella oxytoca
atgtcacttattcaaaaccctattttacgtgggtttaatgccgaccccagtattatccgtgtcgaggacacctactatatcgccaactctacgtttgagtggttccctggcgttcgtttacatgagtcaaaagacctggagcactggaatcttctcccttcgcccctgtcaaccaccaccctgctggatatgaaaggcaatccttcatcaggcggcatttgggcgccggcgctctcttatgccgacggtcaattctggctagtgtataccgacgtcaaagtcaccgaaggcgcctttaaagacatgacaaactatctgaccaccgcaaccgatatccgcggcccgtggtcagatcccattaagcttaacggcgtaggttttgatgcttctctcttccacgacgatgatggccggaaatatatcgtgcagcaaacctgggaccatcgcgaatatcaccatccctttgacggcatcacgttaactgaactggatacaaaaaccctgaaattaatgccagagaccgcgcgtaccgtttatcgggggaccgccgttgggctcgttgaagggccgcatctctataaactgaacggatattattatctttttgccgcccaggggggcaccgtatttacgcaccaggaagtggttgcgcgttctaaaaccttagacgccaacagctttgaaacggagccaggtgaggtcttcttaaccaacgtcgatacgccagacagctacatccaaaagcaagggcacggcgcgttggtttccacccccggcggcgaatggtactacgcctcgctctgcgcgcgtccgtggaatcgcccgggtgagtcagtctacgatcctcgcggctggtcaacgctgggcagagaaacggctatccagaaggtgtactgggatgaaggcggctggccgcgtattgaaggcggtcacggcggaaagacgtttgtcgaaggcccgaaagatgccattgataccgaaagtccggaagaccgtagccagcacgacgaatttacaacggcgacactcgatggtaactggaacaccctgcgggtgccgtttacagaaaaaatgggtaccaccggcgatggcaagttaacgttaattggccagggatctttagcgaatacccatgacctgtcgctgattgcccgacgctggcaagccttttattttgatgcgaaagttaaagttaaatttaatccatttaactaccagcaaatggccggattaacgaattactataacgatcgtcactggagttttgtgttcattacctggaatgaaattaacggtaaggtcattgaaataggtgagaataaccgagggcggtatacatcatatttaaaagatgaagccattaaggtcccggagcacgttgaatatgtctggttccggacgaaagtcaggaaggaaacgtatagctatgaatatagctttgatggggttgagttcactgaaatccctgtgaagctagatgctgcgatcctttcggatgattatgtcctgcaaagctatggcggattctttaccggagcgtttgttggccttgcggctgtcgactactccggttatggcgcccgcgctgagttttatcatttcgattatcaggagcttggcgacacgttaatcgccagggacgcgtatagctgggaagccagtgaattacggcgttattag

SEQ ID NO: 178674 - DNA, 342 bp, Klebsiella oxytoca
atgtttgcccaccggagcgatgaagttaacctgaaaaaagcctacgtcggcgtcaccaacgtgctggagtctaaccccaatgccaaatcggagccggccgtgacttccatcagcgtccgcaacaggggatcaacaacgacttccggatggggtgaggcatggttccagaagccgatggatccaacaacgaagaggctggcgtgcgccagccacttcgcgcgttcagctatctcaatacaccgtcaggcgcagggccaggtcctgcgggtagggatcaaagtagttctgcgcctgcagatagcgatccgggtattcggccagatagtgcttaagcagcgttaa

SEQ ID NO: 178675 - DNA, 435 bp, Klebsiella oxytoca
atgagtccctcgccatccatcattagccgttttagtacgtactacgccacgctggatacccagccgccttcggcgctggccgcgctgtaccacacgaatgcactgctgatcgatccttttggccaacaccaggggctgtccgcgatccagagttatctttcgcacctgctggccaacgtcgatcattgccgtttcaccctcgatgccccgctctgcgaaggtcaacgttttgccgtcgcctggaccatgcactggtcgcatccgagacttgccgggggtaaggcgctacagcttgcgggctgctcggtggtcaccgttgaagacgaacgaattattcaccagcgtgactactacgacgccggggagatgctgtacgaacaccttcccctgctgggctgggcggtgcgcggcgctaaacggagggtgcggtcatga

SEQ ID NO: 178676 - DNA, 348 bp, Klebsiella oxytoca
atgataaatctcaatcgatgttgttatttgctcctgattttcgcagcggtcggcagcatctttaccgcctggccctttgctacctggctcctgctggtcaacgcgctgaccctggcgatctacggcgtggataaaatggcggcgcgcagggcctggcgcagagtaccggaagccacattgctggcgttcggggtgctgggcggctgggctggcgcgatagccggccaacagctgttccgccacaaaacgcaaaagcagccgttcagaacccgattcatcatcagcacgatcgtcagcctctcagggatggtggcgatttatttgttctctcctttttcttttcactaa

SEQ ID NO: 178677 - DNA, 981 bp, Klebsiella oxytoca
atgaaaaataaccgaatctgccagatcctgaatatagaaaaacctgttattcaggggccgttatcgtggttgaccgatgcccgtttagtcgccgctgtcagcaatgccggcgggcttggtgtgctggggccgaatgccggtttaaccgctgagaccgcggtgtccacgccggaagaaaccgccgaaaaaatgcgtgaagagatccgcaaaaccaaacggctgaccgaaaaacctttcggcgtgaacctgatccccgcggctgaaaacgatatctggaccccgcctattttgcaggtgataaaagaagagggtgtcagggccgtggtgtataccggctacggtgaaggggcgctcataccggcgctgttcaacgaattaaaagaggcgggcattgctatcatctatcgcgatattaacccgacgcctgaaaatacccgccttgctgaagatgcgggcgccgatatcatcgtcgcgaccggctttgatgagggaggaacattgccggggaccgcgctgggaaccttttctatcgtgccgctgatcgccgatgcggtgaagcgtgttccggtgatggccgcgggcggtattaccgacaagcgcaccgccagagcggcgcacgcgctcggcgctgaagggatatttgccggttcggtttttatcgcgacggaagaaagcagagtgccgcggtcggtcaaaaataaaattattgccgccagtggcctggatttactgcttttccgcacgctgccccattactatcgctctctgccgggcagactggccgaaaaactggtggcgatggataaagccggcgccagcaacgaggcgctcggtgaagcaatggggggattacgcggcctgcgcgtcggcatgctggaaggcaatgccgatgagggctatatcgcgctcggcacgggtatcggcagcatctgcagcgtcaaaagcgtagcggaagtggtcgacgcgttaaccgtgagttag

SEQ ID NO: 178678 - DNA, 831 bp, Klebsiella oxytoca
atgttcgctccggaaaagaaaaccgcgctggtcaccggcgcatcgtcagggatgggcaaagctattgcccgtcgcctgattcaggatggttaccaggtatatgttgccgcccgtagcatcgataaaatggccgatctggccgaacttggcgcacagccgttacggatggatatagccagggatgaggagattgtctcctgtgtaaacgccattctgtcgcaaaccgggggagtggatgtcctgatcaataatgcaggctttggcctgtatggacccgtagaagagatcggtattgatgaagcacgctatcaatttgaggttaacctctttggtgccgcacggctgacgcagctactgctccctgcaatgcgggccagacgtagcgggcatattgtcaacatctcctcgatgggagggaagatgtacagcatccttggtgcctggtaccacgccacaaaacacgcgctcgaaggatggtcagactgcctgcgcctggaggtcgccggatttgggattaaggtcacgatcgtcgagccgggggtgatagagacaggcttcggtgatgctgccagcgaaagcatcgtcaaacgttcacacagtggcccctatggccaactggtgaaaatggtggccgcgtcgatcaaaaaaacttacgggcacgggacaggcagcgatccgaaggttatcgcggatgtcgtttcaagcgccattaacagtaagaacccacgtacgcgctatgccgcaggtaagtttgcaaaaatgcttatctgtctgcgcgtctggctgggcgaccgtatattcgaccgtattattctcagtcagacacgctaa

SEQ ID NO: 178679 - DNA, 1086 bp, Klebsiella oxytoca
atgctcttctccgggaaaagattcgctcccggacaacactcatccagcggaaacctgacaatggcacataaccgtactttctctctcaacatcggctggaaagcgctgctaaaagatgccggtttagcgcctcaacatctactgcgcaaagcaggattgcccgacgacacgttttcgaggacagagcgcggccttaatatcgaggagtatattcgtttctggcgcgcccttgaggtagaaacaaacgatcctgcttttcccttaccactggtagaaagagtctctgctgaaatctttgatcccccgcttttcgccgcactatgcagcaccaacatgatgcaggcggttcagcgactggccagatataagcaactcattgccccaatggttctggaaatagttgtagaacacagcggcatccttaccgtttcaccgcgctggctgtcagcgacaaacattcctccgtccctgcagatagcagaacttgctttcttactgcggctgctaaaacttgccactcgcgaaccggtcacagcagtgaaagtcacgctccctcagcttcccgccagaatacaggacggccaccttacccgctttttcggtaccgccgtagcgtatggagaaaaaccggccatcagcttttccgccgctgatgccctccgcccgtttttaacggtgaacgaaggaatgtggcaaatatttgaaccagagctgcgccgccgtctcagcacgttagatgaaacggcctcaacaactgaacgcgtacaggcggtacttcttgagcttcttcccggtaacgaagccactattgagaaaacggcggagcgtctcggtatgagcaaacgtacgcttcagcgcagacttgaaagtgagggaggaaattttcgtacattggtcaatatttgccgggagaacctggcgcggcactatctgagtcatacccatctctccggctatgagattgcattcctgcttggctttgaagatccaaactccttctatcgcgcatttatggcctggaccggacagacgccggaaaccgtcagagggagcatgcgtcttaatggaaagaactcctcaggttaa

SEQ ID NO: 178680 - DNA, 630 bp, Klebsiella oxytoca
atgcatatcctaccgcccgtccgtccggaagagagtatccagcgcttaacggcgctcctgacgccaattgctgaaaaaatggtcgttgtgccgcggaaacgcatgacctggacgcataaaaatcaaccgcagttgttccttttccttgacggcgagctctccatactccgggcctcggacggtctgttgattgtcacggtttaccacccacacctgtttggtattgccgagatgatccagccggtacgcggccatcagctgcgtgcggaaaccgaatcgacaatactgcgcgttgatgcgcaaaaagcgatggaagcctttcgccagcacggcgtttgggaagacgtcgcctcactgttgtcgtaccacacggcttatcttttctatcgcgacgcgctcgtcgtacagcagcgaacctacgccgttatccgcaatcatttgcaggaaatgggccagctacccgaagagacccggatgcgggtctctatcctggattatatccaggaacgtacgcacttatcacgcagcagtgtattaaacgtgttgtcggcgttaaaaattggtaattatattgcttttaaacggggagggtatttgacgggggtgaataaattacccgagcgtttttag

SEQ ID NO: 178681 - DNA, 582 bp, Klebsiella oxytoca
atgaagaagacgcttattacgttaattattgctcatacttttacggcgactgccgcttttgctgctgcggagacagggacctggtacgcggggtctaaatttggctggtcgcactacggcgactccagcaccgatcggcaagtcgatgttgaccgtgataacgtcggcggcggtgtgtttaccggctatcagattaacccctggctggcggttgaaggtggatatgactatttagggaatatgggcatcaatggtcgccatggcgcagccggttcgcaaatgaaaagtcaggggctacagctttcgttgaaggccagctacagcctgaccagcgactgggatctgtacggccgggccggcctgatgggctaccgtgcggaatccgatgtgaatggaaaaaatcgatttgatacgggcgtgcgtccggtgctggctttcggtaccgaatatgcctttaatgacagatggtcggggcgcctggagtaccagtgggtcaacaatgtgggtaacgaaaaccaaattggcgtgagcagcgatgtgagctccgtgatggccggcattagctaccgctttgggcaataa

SEQ ID NO: 178682 - DNA, 315 bp, Klebsiella oxytoca
gtgaaaaaactattaatatgctgtctgtttggcgaaacggcagggattattgcccgcaaaatgcaaaaaattgctgacgatcggcaattagatttattaatcagcgccgttggggttgaaaatttctttagcgtcgcgcctgcctatgatggcgtactggttgcaccgcatatccagtataaggttgaacaatttattagcgcactgcatttaccacaagaaattgccgtgattgaaagcttgccctatgcctcatttgatggcgagaagatcctcaacttcgcgctgaatacaatgccttcatctctgtcctga

SEQ ID NO: 178683 - DNA, 192 bp, Klebsiella oxytoca
atgggaacagtaaaagccagcaatctggaacaggcaaagcagcttctgcagtccggcgacgccattaaactcgaactggatttcgagctcgactctgatgagttttttaattttgctatcgagtactgtacaaatggaacgaagctcacgcgagccggcgatcgcttcctgatttcacgtaaaaaaaggtag

SEQ ID NO: 178684 - DNA, 1266 bp, Klebsiella oxytoca
atgtttgccctggtcgatgtgaattcattttacgccagctgtgaaatagcctttcgccctgacttacgcgggcgtccggtggtggtgttaagcaataacgatggctgcgtcatcgccagaaaccacgaggcgaaactgctggaaattccaatgggcgcgccgtatttcaaagtgaaatcacagtttgaacgtcatcaggtagcggtgtttagcagcaactatgccctttatggcgatatgtcccatcgcgtcatgacgattctcgaagaactggcgcccgcggtgtatcaatattccattgatgaagcgttcgtaaatttgaccgggatccatcgttctgaggagcttgaggcatttggtcgccacgtgcgtagtacattactccagagtaccggcttgacggtaggggtggggatcgggccgacgaaaaccctggccaagctggcgaattatgcggccaaaaggtggccaaaattcgagggcgttgtcgatctctcattgccggccaggcagagaaaactgctggagaaggttgccgtcggtgaaatctggggagtggggcgacgcattgcgaaaaagctcaatgacatggggattacgacggctcttcagctggccgagacgcccgctccgctgatcagaaaacatttcagcgttgtaatggagcgcaccgtgcgggagctgagaggcgagccgtgtcttgaactggaagagtatatgccgactaaacagcaaattatctgctcgcgttcctttagtcagaaggtaattgaatacggggcgatgcgcgaagccatctgcagccatgcggtccgcgccgccgagaagctgcgcgcggagcaccagtactgccgctatgtttcggtctttgtgaagaccagtccgttcgccggtcatgaagtctattacagcaaagacgccggcacgaaaattcacatcccgacgcaggatagccgggatatcgtcgctgcggcgctaaaatgcctggatactatctggcgggagggatgccgatatcaaaagtgcggcgtgatgctgggcgatttctttagccagggggtggcgcagttaggcctgtttgacgactatcagccgcgagcgaatagcgaacagctgatgacggtgcttgatttagttaaccgacgtgaaaaaggccagctctggtttgccgggcagggaatcgagcgcagctgggagatgaaacggcatatgctgtcgccagcctacaccacccgattcagcgatttgctgcgggtgaaactgtag

SEQ ID NO: 178685 - DNA, 621 bp, Klebsiella oxytoca
atgttgaatattgttattaaaaataataaccagttctttaatttgggatttcattttttattgcaagcgctcttcccggaatactcgttctctacacaggtctccgcatcgcttaacgaacggctcgtgcgtgatgcagacgtcgtcgtactggatttatgccgcggagaagagttcgtatgtcatccagagttgttaaaccgtaaaccgggattgctgatcggcgtggttgccaggctaaatcatcgagggagaggcgctttgccgctctgcttgaaggagatagtttttgttgggcgcgatgagaagctctctcaggttattgcgaaaattaaactttcatgggttctgacgcctccgtcagcaaaagaaaagctggcgctccggtgcgatagttgcccgcagaggacgctttccccgcagcagagaatcatcgcggcggcaatttatcaggggttaacggtgaacacgattgccagaaagctatcgctttgcaataaaacggtttttgcccacaagcgtcttattatgtctaaattcgatctacgcaatgatttagacctcgtactattgctgcgtcatctggataacgcacgctgggttgcgaaagataattcttaa

SEQ ID NO: 178686 - DNA, 273 bp, Klebsiella oxytoca
atgtcgcgtatggtacggattccgacgacgaatgccagcgcgttttacggcggctttccatctgctaacgatagtgcggcgagttttggcctcaatcccccctccgggcagaaagacaaacgtcgttttcaggctcgccagcgtcacacgcccggtgatggagtgtatctggtaaaagggtgcgagaatttattgttcgcgataatcaaaaagcgttggcaaggtacctcgattttttttaaagcaggggccttgttcctgcttttgccataa

SEQ ID NO: 178687 - DNA, 939 bp, Klebsiella oxytoca
atgaaaaaaagtaccgttgcagtaatgatgatagcgactctttcaggatcagcttatgccgagtcaatgcagctaagcccaaatttttctgcggaaagttttactgtatcgacgtctgcagggatgctgagtgggaaatcacaggagagagtttatgacgcggatacggggcgaaaggtcagtcaacttgactggaaaataaagaatgtcgccattgtgaaaggtgatatctcatgggatgcctactcctttttgacgctgaccgcccgcggctggacgtcgttggcttcaggttcaggacatatggatgactatgactggatgaacgataaccagtccggttggacagatcattcatctcatcccagcaccaatgtcaattatgccaatgaatacgatctcagcgtgcagggctggcttttccaggacgacaattataaagcgggcgtaattgcgggttatcaggaaacgcgtttcagctggacggctaccggaggttcttacaattatgataacggtgcgacgactggcaattttccgaccggtgagcgtgggataggatacagccagagattctccatgccctatatcggtctcgcgggtcaatatcgtatcaatgactttgagtttaatgccttgtttaaattcagtgattgggtcagagctcatgataacgacgaacactatatgcgtgagttgacctttcgcgagaaatcaactaattcgcgttattatggtacatcggttgatgccgggtattacatcacgcctcatgccaaagtttttactgaattcacctatagtaaatatgaagagggtaagggaggcactcagattattgatacctatagcggtgaatcagcttcaattggaggagatgctgccggcattgcaaataaaaactttaccatcacagccggacttcaatatcgattctaa

SEQ ID NO: 178688 - DNA, 1107 bp, Klebsiella oxytoca
atgaaaagaaaagtactggccctcgttatcccggcattgttagctgctggcgctgctcactctgctgagatttataataaagacggaaataaactggacctctatggcaaggtagatggtctgcattatttctccgatgattcatctaaagatggcgatcaatcctacgtccgtcttggcttcaaaggcgaaactcagattaacgatcagctgaccggctacggtcagtgggaatataacgttcaggcgaacaacaccgaaggcgccgacaaccagtcctggacccgtctggcgtttgcgggtctaaaattcgctaactacggttcattcgactatggccgtaactacggcgtactgtacgacgtagaaggctggaccgatatgctgccagagttcggcggcgactcctacacccaggccgataactttatgaccggccgcgctaacggcgtagcgacctaccgtaacaatgacttcttcggtctggttaacggcctgaacttcgccctgcagtatcagggtaaaaatgaaaacgcaggcagcggcgaaggcaccaacaacggcgatcgcagcgtacgtaacgccaacggcgacggttttggtctgtcaacttcttatgatttcggtatgggtatcagcgctgccgccgcctacacctcttctgaccgtaccaacgatcagatgacccgaactaccgcacagggcgataaagcggaagcatggactaccggcctgaaatatgatgccaacaatatttacctggcgaccatgtattccgaaacccgcaacatgacgccatacggtaacggcaacggcgtcgccaataaaacccagaactttgaagtgactgcgcagtatcagttcgactttggtctgcgtccggcggtctctttcctgatgtctaaaggtaaagatttgagcaaaaccgatggcgacaaagatctggttaaatatgctgacattggtgcgacttattacttcaaccgtaatatgtccacctacgttgattacaaaatcaacctgctggacgaagacgatagcttctattccaacaacggcatctctaccgatgacgtggttgctttaggcctggtttaccagttctaa

SEQ ID NO: 178689 - DNA, 363 bp, Klebsiella oxytoca
atgtcccgtaaaaccgcgtttaatggctccgctgcgggccgacgtcgcgcgcagcgctcccacttacaaaatccgcaaacgctcagttcagatcttatccatcggcccactccgtcccgcgctcagattcaggcaaaagggaagcaccatacgcctgaacgtattgaggacgcattgccgattaaatttgtggcacaggatattttttggcagcgcgaggaatataaacggcaaattgagcgagcgaccatcatttatcagcaagaatttgcacaccagtatgcgcagccaggaacctggctcttccagagggcaatttatgcgcttggtttgcaaaaaagaaagaaagtaacggcgaggtaa

SEQ ID NO: 178690 - DNA, 393 bp, Klebsiella oxytoca
atgtccgatcctgtttccggtacgtcgataattgttgctggtggattaatgggcgctggtatgtttggcctggtgacaggtattgattatggcgttgtttttggggcttttgccggcgcggtattttatgttgcgacggcggttaatatcacgcgttttagactcgctgcctattttatgacttcttttattgtcggtgttctgggttccgggttaattggtacgaagctggctatctggaccggatacaatgaacgacctttagacgcgttaggcgccgtgctgatatccgcgctgattattaagatactcacgttcctgaataatcaagaactaaccgacctctacaaaatactaacccgcaacaatagtgggcgcccgaatgggaaatga

SEQ ID NO: 178691 - DNA, 543 bp, Klebsiella oxytoca
atgaataaagatgagatttttaatgccattctggaaaaggagggcggttatgtaaatcatcctgatgataaaggaggtccgacaaactgggggattactcaagtcaccgcacgggctcatggttatgatggcgatatgcaaaaactgacgcgccaacaggcgctggatattctcaacgctgactactggattgcgccccggttcgatcatgttgctgaaatatctaccgcgatcgctgaaaaactgtgtgacgccggggtcaatatggggcctgttctgccgggtaagtggcttcaacgctggttaaacgcttttaatcatcgtggagtactttatccggatcttataaccgatggtgttattggccccaggaccttaaatgccttgagccattatgttattcgaagaggcagtgaaggggagcttgtactgctacgggcattaaactgtagccaggggcagtattatctggagttagcagaaaaaagtgaggctaataaatcatttatatatggttggttaagggctcggatagctatgtaa

SEQ ID NO: 178692 - DNA, 420 bp, Klebsiella oxytoca
atgtatacatctaatgatttaaccctctcaatgttttactcatctgccattgctgaggaaactggtaataaagtcgcaacgctcaccgttcaaaccatggggccatcagcggaaattttacaaatcagtaagttgcactgtattactgatgaaaataaagcgaaacgttatagtattggcgagcagtttattgctaatggctccgactctcttctcgccgctattgaaacctggtggcgtgataattctgcggctctcattgaagagttaatgattgaagttatggattttattttgagtaatgttaaccaaaatgcaacctggatcggccagtatggtatgaaaatttttgaaaatgagccggtcgcaaaacgtatccctgatagcgtattacagaacggcagtcacacaaattcctga

SEQ ID NO: 178693 - DNA, 663 bp, Klebsiella oxytoca
atgggttttgctctgcctaatggctcaaccgtttttgttggttccggtcttggttctcccgtatctgtgagtacggtttccaatgctgaaggtgcggtatttaccgttgctgaaaatcataaccttaaggttgatgatgtcgtgctgatttcttcgggttggggtgtaatcgatggtttagttgccagaatcaccgcacaaacaacaaatagcgtaaccatttcggtcattaactccagcgaccggaattttttcccggctcatgccggtggcgggaaattacagaaaatcacggagtggactgagattccacagattacggaagtcgcgcagtcgggtggtgaacagcagtatgcacaggtacagtttctggcagacgatcgccagcgtaatattggcacctttaaggcggctaaaagccaaacctttaccttagcgcatgatgcttctttaccgatctataaagtattgggcatggcggatcgctacggccaggtgttaccgctacgcatgtttgtgcctaatgcgaaggagtatcgctattggtccggcgttccgtcatttgatccgcaaccagtgaccgcggtgaatagcgttgaaactgtacaagtcgcgttttccattcactctcgggatattactttctataaatcggaagattaa

SEQ ID NO: 178694 - DNA, 312 bp, Klebsiella oxytoca
atgagcgctattttcaaattacaacctaaccctgtttttaaagctgatgttgctattcctcgtgccggtgaagaagacggagtgctgaattttacgtttaagcatcggccaataaaagaactggcagagctagaagatattgacgaaaaaacggtctgtgatttcttactggagatcgtcgacggctgggcattatctgaaccctgtacgcgagaaaatatgggcgtgctggtagataactatccgggggccgttaaagcaataatggctacttattatcaggagctgacgggaaatcgcgaaaaaaactga

SEQ ID NO: 178695 - DNA, 1110 bp, Klebsiella oxytoca
atggcgggtgatacaacaataacactgcgcatgaataacagtgaactggaaaaaagcaatcagcttctggataaatatcaacagaaagtaactgtcgccagccgtaaaagtgaagagtttaataagacttttcgtgctgcaacagatatccagaaaaagcatacggatggcctgaaaaggttaatacagacgttaccccttcctccagccagaatgggacccatacttcaggatatggtaaagaaatctgaggatgagacctacaatataacgtcaggctctaaaagttactgggattcactggcaggaataggtagccctccaaaagaagaactgggtaatacgccaaaagtttttcgcccaggcgcaaatatggaagagcgttctgacgatgatacggaaaaaggggggaagagcgattggctcggcggtttaatggcaggagccaaagaggcgtgggataaattccttaaggatggagaaaacgttcatggcaagcttaaggatttagctaaagacgccttcagctcaatgggaaactcgctggtggaatatataaccacaggaaaggcgaattttagtgatttcctgatgacctttctgaaagggacgctgaagatgcttagccaattattgttggtaaaagccatgcaggcttcctttaacgcgatgtcgaattccggcattggctgggtagcatccatcggtaaagttttcacgggccactccgatggaggctataccggagacgggggtaaatatgagccgagagggattgttcatggcggcgaatttgtttttaccaaagaggcgacctcggcgatagggattggcaacctttacgccatgatgcgcggtgcgcaggggtatgcgggcggcggctatgtgggaacggcatcaatgcagggactgggttcttcaggcgcagggccactgaccattcagacctcagtacttattcagaatcagggctcagaaccgcaggcggccgacaataacggcgcgttaaatcgcgcctggcagcagacgatagaccgttccgttcgcgctggcgtggcaaatgaattgaggcctggtggccttatctggaatgcaaaccacgcacgttaa

SEQ ID NO: 178696 - DNA, 348 bp, Klebsiella oxytoca
atggcaatagaaacctttacctggcgaacgcaaatacaagcgggtttgcagggggattttaatttcaccgttcgcgaggctcgttttggcgacggatatcagcagatcgtcggcgatggtctacattttgaaaaacaaagctggccagtgaccttgaccggagaaaaggaagagatattagccgtgcttgaatttatgcggcgtcatgtaacgaagtcgtttatctgggatacccctgcgggggaatccgggctttatcgtgttagcgccgattcactaaaactttcgccattatcgagtcagataatgacggtaaccgccacatttaaccaggcatatgcaccatga

SEQ ID NO: 178697 - DNA, 753 bp, Klebsiella oxytoca
atgattacagctgattatcaaaaacttgaacccgggagtgaaatacgtttactggaaattgatggcagcgtctttggcatggatgatgtcttatatttccacgggcacagtatcgcccatagcgaagctgaaatccaggctgctggaggggacgaaacgcgtttgcctgcaaaatccatttggtggcagggcaatgaatatatgccatggccttgtattattgacgggattgaatcctctaccagcggtcgggacgcgcaaccatcgctgaaggtggcaaatattgatgcttcgattaccgcgctgtgcttgtattacgatgacctggttcaggcgaaagtcaccattcacgatacgctggcaaaatatctcgacgcacgtaatttccctgaaggtaatgcgagagccgaccccacgcaggaaaaacgaaaagtcttctttattgatgccaaaagtgaggagaccaatgaagcgattgagttcactcttgccagtccaatggatttgcaaggaataatgatcccaacgcgtcagctgcattctatctgtacctggtgtatcaggaataaataccgcagcggcgatggttgtgattatacaggccagcgatattttgataacaataatacacctgttaccgatccggcgctggatgtttgtaacggcactttgtcggcctgtaaattacgctttggcgaagacaatgagctgccttttggtggttttcccggcacgtctttaattcggagctaa

SEQ ID NO: 178698 - DNA, 735 bp, Klebsiella oxytoca
atgcgccagaaagttatcagggctattcaggtgcatgctcaggagcaatatcctcgagaatgctgcggtgcgattgcccaaagggggcgggtagagcgctatttcccctgtcgtaatattgccgatgccccccaggagcattttgttcttgcgccggaggattttgcacgggtagaggattggggcaccgtaacggggatcgtccacagtcaccccgatgcgacaacccagccaagcgaactggataaggctcagtgtgacgcgatgttgttaccctggcatattttaagctggccggaaggcgattttcgtaccatttatccgcgaggagaattgccgctgctggaacgtccgttcgtgcttggccattatgattgctggggactggtaatgagctattttcgccagcaacataatgttgagttgacggattatcgtgtggattatccgtggtgggaagatggctaccctgataacttttatcatgattgttggtatgaatgtggctttcgcgagtttgatggtccgccgcagccgggagatatgattatcatgcaggtacaggcaaataagtggaatcatgcgggtattctccttgagggaaatatgctgctgcatcacctgtatggtcatttaagccagcgagtgccgtatgggggatactggcaggaaagaacggtgaaagttttgcgctatcattttaatgataatgcgttggctaatgaaaaaatctga

SEQ ID NO: 178699 - DNA, 615 bp, Klebsiella oxytoca
atgcaagaacatatggtcagaatagagttgggcggtattcttggtaagaaatttggcaaatctcattgtcggatggtggcaacggcatctgaagcgataagggctttatgttgtactatcaatggatttgaaaaattcatgaacaacagcaaagctatgggattaacctatgctgtttttaaaggaaagaaaaatattagcgaggatgatattcctttccccatcaacgataaagtaatacgaattgttcctgtcgttattggtagtaaaaaagctggcgtgctacagacgatattaggtgttgcattgatcgcggtcgcttcaatcgccactatgggcactggagggatattcgccgcgattgctgccggctccgggtggggaagtgccgcaatgctgggggcctcaatggtacttggcggtgttcttcagatgctctctcctcaggttccaggtttagccagtcaacaatctcctgaaaataaagcctcctacgcatttggcggggtcacgaacaccaccgctcagggatatccggtaccgttgttatacggcaagcggcttatcggcggggcaattatttcagcgggaatttatgtagaagaccagcagtaa

SEQ ID NO: 178700 - DNA, 10335 bp, Klebsiella oxytoca
atggacaaaatatctatgacacagcatctcattaaaggttgtaagggcgggagttcaagcccgcgtaccccaacggaacagcctgatgatttacagtctgttgcgaaagcaaaaattctcattgcgctgggcgagggtgaatttgccggtgcgcttaccgcaaaagatatttaccttgatggtacgccgctggaaaattccgacggctcgcaaaattttagcggcgtcgcctgggagtttcgaccgggaactcaggcacagaattacatccaggggatccccggttcagaaaatgaaattaacgtaggagtggaagtctccagcaaaacggcctggtcccgctcttttagtaatacccagctttccgccgtccgcctgcgcttaaaatggccatctttactgaaacaggaagataatggcgatctggtagggaacgccgtcagctatgccgttgatttgcaaaccgatggtggtagctggcagacggtgctggagagtgcggtaagcggaaagaccacttccggctatgaacgatgccaccgcattgatctcccccaggcgacgacaggttgggttttgcgcctgcgtaaggtcacggaagacgcaaatacctcaaaaactggcgatgttatgatgctgcaaagttatgctgaggtgcttgatgcaaaactacgctatcccaacactgccctgctttacgttgaatttgactctcgtcagtttaatggctctattccaaaaattgcctgcagtcctcgcgggcgggtgatccgcgttcctgataactatgacccggaaacccgccaatattcaggcatctggaccggagcattcaaatgggcgtggacggataacccggcctggattttttatgatctgatcgtcagcgatcgttttggcctggggaatcgtcttacctcagaaaatattgataaatggacgttgtatcaggtagcacgatattgcgatgaacccgtccccgatggtaaaggtggggagggtaccgagccgcgctatttatgtaacgtctatgttcaggatcgcaacgatgcctatacggtgttacgcgattttgcggccattttccgtggcatgacctgctggagtggcgatcgggtgattgctctggcggatatgcctcgtgatattgattacacctacaccagggctaacgtcatcaatggtcgttttcactatgccagcagcagtagcaaaacgcgctataccaacgcgctcgtctcatggtctgatccagagaatgagtatgcggatgcgatggagccggtttttgagcagccgctggtcgcccgctatggatttaatcagctagaacttacggcgattggctgtacccgtcagtcggaggccaaccgtaaagggcgttggggaattctgaccaacaataaagatcgcgtagtgactttttcagtcggactggacggtaatattccacaacccggctatatcattgcggtggcggacgaaatgctggcgggaaaagtcaacggtggccgtacccgcgaagtggatggctgcgttattacgctcgatcgtaaaacggaagcgaaagccgggggccgtctgttattgaacctgccatcgggggggacgcaaggccgaaccattgagagcgtcgatggacacgtcgtcaccgtcaccgctgaatatgccgaaagaccagagccggaatgcgtatgggccattgagtctgactctctgagggtccagcaatatcgtgttgtgggtgttaaagataataacgatagcacctttacaatttccgcagccgctcacgatccggataaatacgccaggattgattccggtgcgattattgatagtcgaccaatcagcgttattcctccagggaagcaaagcgcgccagccaatatcgttgttgagtcttattccgtggttaatcaggggattagcgttgaaacgctgcaggttcactggacggcagtaaagaatgccattgcttatgaagcacagtggcgccgcaatgaaggtaactggataaacgtgccccggagttccgttgcctcgtttgatgtcagcggaatttatgccggccgatacatcgtaagggtgcgcgctatcaatgccgcggaagtgtcgagcggctgggcatattcgcaagagaaaacgctgaccggcaaaatcggcctgccttcggcacctgtttcgctgaccacaacatcccttctgcatggcgttcaactaaactgggcgttcccggagggaagtggcgatacgcaaaaaaccgagctgcagtacagcccaaatccaaccggcaacggcgcgatggcgctttctgacgtaacgtatccgggaaactcgtatcagcagatgggcctgcagattgcggcgacgttctggtaccgggcacgcattgtcgatcgccttggtaacgaaagtccgtggaccgtctgggtgcaggggatggccagcgacgatatcggggagtattacgacaagctgaccgacgcaattaaggacaccgaagcctggcaagaatctcagcgggatatggaggaaacccacaaaacgctgacggaaaccgctgatgccatccgtgaagaggtcgagcagcaggttaacgaaataaaccagagcattaatgagaccgccggggggatccgtaagcaggttgatgggcagatagcgacggtcaataagtcgataacagagaatattgacctcgttaatcagaccctcaatgacaccatctcgacagtaaacaaaagcatcaacgatgctgtgagtgatattaatacttccgtcgaccagcagatagcagatgtcaataaagccctgactgcgggggactcggcgttaaaatcccagctgcagacggttgaaaacggcctgaaacagtccattgctcaggcaaatacgggctgggataaagcggtaaaacaggagaccgctgaccgcattgcggacgtcaacgcgaaagcggcgcaggcggcagaccagctgctcaatgaaaaaaatgagcggctggccagcattgataatctgcagacaattattcaggatggcgacgagtcactggcccgtcagatcgctgaaatctctgccggtagtgggcagcagtttgattcgttcagtatctggtacttcgataaagacaatgaagggtggaccgaggacgatgccggtcaggtgccgatgcaaatcacggacgaaggctggctgaaagcatcgaacagcacggcctcctgccgttcgccaaacgggcaaaaaatcccgggttcctcctatcgcaccgtcatgctgcgtattaagcgcgtgggtaatccggcatggaaagggcggctttactggattggtacagaggaaaccggctggagtgatgcccgctcggtgactatcgccgagcaggagtttgatggcgagggtatcagcgtggtggccatttccgacgtgaactggaacgcgtccggcacggttcgccgttttcgtctcgatctggcccaggggcagaatgccgacaactattttctgatccactggatatccgttgggcgcccggcgccggcagcaagtacggcggccctgcgtaatgaggagatggcgcggacgcaggcggatgaggtagaggcgctgaaacgttccacactggcggcgcagatcaggggaacctctgacagtaacagccttgcagacctgcgttccggcctgctgtatcaggagatgaatgcccgtatcaccgccgataaagcagaggtgacggccagagaatcgctgcagacgcagttcaacgacaataaatcctcggtcgcggaggagctgagttccctgtcgaccacacaaagcgcacaggccggcaaaattagcggcctggaaaccagtctgggtaaaaaagccgatgcaaccgcgctccagtccctcacgcaaaaggttgaacagcagggcaccacgttaaccagccagggaaatacgctgacctcgctgtctaaccgcgtcgggaaaacggaatcgggcgtggccgcaaacagcaacgccatcacaggtctgcagtctactgtcagccagcaggataaaacgctgaccagccagggcagcgcgatcgctaaactgcagaacgacctgacgataaccaattcaaacgtcagtaaaaaggccgatgcgagcgcggtcacggcgttaaccaaccgggtatccgcgacggaaggcaacctgaccacacagtctggccagctgacgatgctgaaaaacaccctggctgaagggagtctgattagcaacggcggcatggatgtggatctgtcgttctgggagaactccggtaccggctcggcgttcacttatgattcgggtgaaaaagccctgaaaaccacgactggctccattcgcgtcgccaacgtcacgcgtatccccgttgaggccggactgactctcacggtctcttttgagtaccggacttcggaaacggttaacagcgtatcgtctgacaccgtcggtgtgatagcggatttaggcaatccgatcgcctggttatcgtctatatcgccgtggctgagtggggtaacgaccagctggcagacgaaaaccgtggaactgaccattcctgccaattttaccgggcgttacgtttatctgcgatttgccgccgggggctggacaccgtcaaacagtgcacgtctgtatatccgtaaagtcgacgtcttttcatcgaccggggtgtcaaagaaagcgaatgcatcggcggtaacagacctgaccagccgggtcgactcggcggaagggaaactggtcagccagagccaggcgatcgcaaagctacagaatgatctgacaacgaccaacgccaccgtaagtaaaaaggcggatcaaagcgccctgacgtcactgaccggacgagtggagaagacggaaagcggcctgactgcagcgaatggtaatattacttccctgaccagcgcgattggtgctgcaaaagctgcaggggatgattatattcctaacccggcgcttgaaccttcctacgaccgcatgggttatgacgtcgtttcagccactgatgcgggtgtacctgtagattgcccgtttgcgtatgtggttcgcctggccggtcgcgaccatgtacctaaaatcaacaatgttgcggtgactccgggtgatgttttcgagatgtcggcggtggttgcttgcggaaccggacaggcggattttaatctctatatcgctaatgccacttcagcgacaggtggtatcaaagcgagactttccggcgggaataccaaagtcaccgcagcgtggaaacgcgtgacatggcgctttacggtgccggccgatatgaattttatgcgtcccttcctgcaggttaatcagagttcaccctttggtacggtctggtatgcggcagactggcatctgcgcaacgttactgcagcgcagagtgcacagaaaaccgctgatgcaacagcaaaagcggtggactccctgacgacaacagtctctgtgcagggcgatacgctgagcagcatcggtagccggaccacggcgctggaaaacggtctgtcaacgacgaatgccagcgtcagtaaaaaagcggatgcgagcgcgctgcaattgttgcagaacacagtcaccgaacagggcaagacgctgaccagccagggcagcagtctgacgaagctggataacagcctgaaggaaactgtcgcggctgttgatgccacaaaagctgatgccgatgcttcccgggcgatagtcggaaatctgttaacgaatccgtcttttgaacgaggtaaagatggttacagcggctggcaatcagcgacgtcaatactcacagcttcttcgccgcatagtggcacccaaattcttaaagtggttccaggcagcagtgtcgtctcgttgcttcagaagatttcgtttaccaaagatcgcacctacaaaataggtatcttcacgcgtgtttcaggtggaacaacaatgccgtcaggcaccgctggcaataataagctgcgtattggcgattctgacgggccactgaaggaggttcagtttaaccccgcgacgctgccaacgagttctgtctggcaggaaatttcgggcacatggaaagccacgaaaaccgcagtccttgacgtctcgctcatggtgctgctggcgacgggagagcagtattttgatgatttctatctggtagatgtgactgatgaaaccaatattgcggtcagcgccaccgccatcagcaacctgacaaaccgggccagtagcgctgaaggaaagcttgagagccagagtcagtccatcacaaaactgcaaaacggacttgccactgccgaccagaacatcgagaaaaaagccgatgcttcagccgtcgcttcgttaggcaaccgggttactgaagctgaagagaagctgacgagtcaaagtaacagtattacccagctagaagcttcactcgatagcgctcgcgataccggtgagaatctggttgaaaactatgatttcagaaaccaattaaatgcgtggaatctgcagaatgccgggcgcattgtgtggggagcatcaaacggggagggtgctcccggtgtgataatcacgcatacgggtgacgcaagtaatcctggattaatgtcgaataacgctaaatggttcccggtaagttcatcacgccggttccgttttaaggtacgtgcaaaattaatctcaggttcaggtgggattttatgccgcatctttaattcgaagaccgctggtacttacacccagacgcaggctgttgtaaccagaaaagatggttttgaaacgctgacggtagatatacccgcgttgccggccaccaccacagacgcaaggattgctttttatgtatatccgtccgcgacagttgttgccgtcgacagcattgccgtttatgacgttaccgatgaaaccgtgggttcggccaatgccagcgcaatcagtgatttgacaacacgggtgaccagtgctgaggcgggaatgacctctcagggagcggctattacaaagctgcagaatgatctgtcaaccaccaatgcgaatgttaataagaaggctgatgctactgcattaaacgcgttatctaatcgtgtaacgcagactgaaaaggatatcaacagccaggctgacagcattaccagcctgaacagcacgctgaatattaacgcccgcaaaggctcaaacccgtggctggacggaacgtttgaaacttatgacgttaatcagaacctgggtgggtctgcgcgagttattagcggagtcagctactcgggcggcaaatgcatgcgcgtgacgcgtgcaccgaacactaccggtaacagcgacgacctaatcggttcacgccttgccattcgcgacgcggcagtattcagggttgagttctgggcgatgatgccatccggtgaaaccccctcaggcggctgggtcaccgtggtcggcctcaacgtgcaaaatgatgcgggcgcaaactcatggctgggagctgctaatgtcagcgaaacagcgctggccggtcgtgacaaatgggttaaattttccgggtatgcaaaagccaccgcgaaaggtgcaacccgtgccgttgtttggatctctacgcgcggggcgaacggcagcaacacgccgggttataatctgtttatcgacgacatggttattacagatgtaaccgacgcttacaatgcgcagagcacggcagacgcgaccgcctcagctgttgattccctgacgacgcaagtctctcagcagggcgatatcctgacgagtgtcggaagccggaccaccatgctggaaaacgggctgaatacgacaaacggcaacgtcaacaaaaaggccgatgctaccgccctgcagacgctccagaataccgtgacggaacagggcaaaacgctggccagtcagggtagcagcctgacgcagttgaataactccctgaatgatgccacggccagcctggctgctgatggtaaaattcccggcaacctgatttccaacggttcatttgaacgcggccaggaggctttcacaggatggggaagcgtcgggtccgttatcagtgcacaatcgcccaactacggcagcaaaatagcgatgtgtggtgtgggcctggccgggatctctcagaaagtaccggtcgtcaaaggcaacacatataaaatcggtgtgtttgcccgtgcgcagggcggttcggtcatgagtgaccagggtaataacaaactgcgtattggtcagtcgtccctgttgtacgatcgccagttcaacaccgcgaaccttccaaccagttcatcatggattgaattgaccggaacatggaaggcgacggtagacgggatggtcgatgtggcgatctactcctccctgaagtctggcgcgcagtattttgacgacttctattttgttgatgttacagatgaagtaaatatcgcagccaatgccggggccatcagtagcctgaccacgcgcgtgacgagcgctgaagggaagctgactagccagggtagcagtatcacggagttgacgaacgacctgactaccaccattaacaacgttaataacaaagcggatgccgccgcgttggctgctctgaccaaccgggtgacgagtgctgaaggaaagctggagagccagagcagcagcgtcacgtcgctgaataatagtattgcggccactcagtcggatgccgacgcagcaaaagcgattccgggaaatatgctggcgaataactcattcgagcgcagttttgacggatgggtgaactcaggctggagcatactggcggcgcagaaccctaagtccggaaagtacattatccaggcgacaaagacatccagcggctctacggcctgcgatcagaacgtaaacctgattgcggggcatacataccgcattggcgcgtgggtgcgcaagtcgggtgactttgcggtcagcaatgccagtaatactaaaatcagcatccgtaatagctcagggccgctgaaagatattccgataacaaccagcatcggaaccggctggacggagatctttggggactataaaccgtcctccgatgctgcactgactatttccctgcgttccagcctgtcggccggttatctgtatgcagatgatgtattttgcattgatgtcagcgatcaagtggcaaatacagcgaacgcttcggcacttactgccctgaatacacaggtcaaaattgacggaggaaatattgaggctaatacccgggagcttaaaagcctgaaagctgatttagggaccaaagcgacggccagtgcagtgagcgatctgaacgccaatgtgcaggaaatcgacggtacattaaaggctagcgtagagaaggtagatggcctggatataacggtcggagaactgaagggtaaagttaagacccagggagagacgatagcggattcggaaggcaaaattaactcgatgtactcaattaaagttgagacaaaaggtgataagagagttggcgcagggatggtattagccagtgatggttcgacaagtgacatcatttttaatgctgatcgtttctctatttttaatgccatcagcaaaaccgccgtgccggtgatgattgcggaaggtaacgagttgtatattgattcggcgcgaattaaaaacggcacgattgatattgccaaaatcacagatcgactttcctctactaattatgtggccggatggagaggctggagtattaccaagagcggaagtagtgaattcaataacgttgtggttcgcggtgaaattcaggctgatacaggtactttaaataatgtagttattaatgagagttgtaatatcctgggaaccgtaagggctaataagattattggagatgttggctcatgggcaatcaatattgctcagcaccgctcccgtcgaattgcgaaagcacaatgggcctggttcgatttgcttgctgttgatcgccagccgttcgagcaacgagtgcagcttttaggcgcgcttcgccaggacgactcaattaatattacgggtggaggtaaattaacggcaggtatggagtacaagagttatgaaggtggctcgttgagtatgggtaaactagggtactgtattctcatgctgggtaccggtgatacttcaggtggtggtcccatgacctgtgcgctctctattgatggcgttttatataagcaggaaaatgggagtatggaaattcagtcaatggacttcatcgttccgccaggtaccggccagactgttgtgcgttatgggtactatctggacagaaacggtggtatgacgggcgtaatcttgtcacgttttcacgcgtttgttatgcgtaattcaaatattattcgaggcgtttcaagtgattaa

SEQ ID NO: 178701 - DNA, 1500 bp, Klebsiella oxytoca
atgtccacatcacaggtcgcgctactcgccagcgtgcagcagtttttagacagacagcatgggttgtatcttgacggtgcgcagcaggcggcagagagcgaaaagcgcttaaccgtctgggatccggccaccggtcaggctatcgccagcaccgcggatgctaacgccgcggatgtcgatcgggcggtgatgtccgcctggcgcgctttcgtttcccgcagttgggcagggcgtacgcccgccgaccgcgaacggatcctgctgcgtttcgccgatctggtggagcagcacggcgaggagctggcgcagctggagacccttgaacaggggaaatcgattaacatttcccgcgcctttgaagtgggctgcacgctgaactggatgcgctataccgccggactgaccactaaaatcagcggccgcaccctcgacgtatcgatccccttcccgcagggcgcacgctatcaggcgtggaccaaaaaagagccggtgggcgtggtggccgggatcgtgccgtggaatttcccgttgatgatcggcatgtggaaagtgatgcccgcgctggcggctggctgctcgatcgtcattaagccgtcggaaaccacgccgctgaccctgctgcgggtagcggaactggcaaccgaggccggcgtaccggacggcgtttttaacgtggtgaccggcagcggcgccgggtgcggcgcggcgctgacctcgcatcctcaggtcgccaaggtgagctttaccggatcgaccgctaccggtaaacagattgcccgcgtggccgctgaccgactgacccgggtcacgctggagctgggcggcaagaacccagccatcgtgctgaaagatgccgatccgcagtgggttattgagggattaatgaccggtagctttctgaatcaggggcaggtgtgcgccgccagttcgcgaatttatatcgaagcgccgctgttcgatacgctggtgagcggcttcgagcaggcggtgaagtcgctacaggtcgggcccggtatgctcgagagcagccagattaacccggtggtatcgcaggtgcactgcgcaaaagtggcggcctatcttgatgaagcccgtcagcagaaggcagagctgattagcggtaacgtggggccgaatgcgcagggctactatattgcgccaacgctggtgattaatcccgacgccgggctgcgccttagccgggaagaggttttcggtccggtggtgaacctggtacgcgtggccgacggggaagaggcgctgcgcctggccaacgacagcgattttggcctgaccgccagcgtctggacccgcgacctgagccaggcgctgagctataccgatcgcctgcaggcggggacggtgtgggtcaacagccatacgctgatcgacgccaacctgccgttcggcggcatgaagcagtccggtaccggccgcgatttcggccccgactggctggatgactggtgcgaaacaaagtcggtctgcgtgcgctactag

SEQ ID NO: 178702 - DNA, 732 bp, Klebsiella oxytoca
atggcccgctcttatgaagaacagacgcgtatcgacctggcagcgacctttcgcatcatcgcccatctcgggatgcacgaagcggtggccaaccactttagcgcggccatctcggcggacggcaaaaaattcctgctgaatccgaagtggaaacacttttcgcgcatccgcgccagcgacctgctgctgctggacgccgatgatgaagcctgcgcccggcgagcggacgtggacgccacggcgtgggcgattcacgggcagatccaccagcgcctgccggaggtgcgggtggtactgcacctgcatccggtgtataccaccagcgttgcttgcctcgagacgccgcatatcccgccgatcgatcagaacacggcgcgctatttcaatcgggtagccgtcgataggttgtacggcggcatggcggacaccacggcggaaggcgcgcgtctggcgtcgctgctggccgacaagcgccggctgctgatgggcaaccacggcgtactggtgaccgcaccgtcgattggcgaggctttcgatgatatctggactctggagcgcgcctgccagattctggtgaccgcctggtcaacggggcagccgctgaaagtgctctccgctgcggtggcggagaaaaccgcgcaggactgggaggggatcgccgacttttcacgccagcattttgcagagatgaagcagatgatgatcgacgccgacccgtccttgctggagtga

SEQ ID NO: 178703 - DNA, 831 bp, Klebsiella oxytoca
atgaaacgttttaaagctttccgccctgctgccctgctcctttgcaccgccggcgccctgtcgtcctttagcgcccaggccttccagcagccggggaaaatcaccgccggttcggatatgacctttttcccgtatgaatatatggaaaacaacaagcccgccgggttcgatatcgagtttcttgccgggctggcgaaaaccatgggccgcgaggcggtgaatattgatacccggtttccgaatttgattccgggcttgcaggggggacgcttcgatatcaccaactcgtcgatgtacatcaccgccgagcgtctgaaggttatcgatatggtgccctatctgaaaagcggcgaagcgatcctcgcgctgaaaggcagcgactatcagccgaaaacgccggaagcgttttgcggccacaaaattggttcaatgggggcgacgtcatggctggcgcagctgcaaaagctctccgccgactactgcgtgaaaaagggcctgaagccgatagcgctcagtgaatacaccaccgacccgcaaaccacccaggcgctgctctcgcgtgcggttgaggcgcaaatcaccgatgcggcggtggcgcgcggcgtgatcgacaagcttggcgatcgggtgaccatctcttccgaaaccttgatctatccggtgctcaacggctttggggtgaaaaaaggcaatagcgaagtgaaaaccgcgctggaggaagggctgaagaaatacagcgcgacgccggaatacgccgcgctgctgaagaaatataacttccaggcgccgacgccagaggatctgcaaactctgatgccgaaagcggagtaa

SEQ ID NO: 178704 - DNA, 873 bp, Klebsiella oxytoca
atgatcgcgcagtggcaaatcgaacagtttcatcagcagggttttctggttgtcgaagaggtgctttccgccgaggatgtcgcgctgctgcaggccgatttcgacgcctgggtcgaagagagccgacagcatagcgaggtgtggggcgaaaccctggacggtcggccgcgtttcgacctcgaaagcgatcacacgccccatcatccgtcgctgcgccgtgtgagttcccccacggagatttccgccgcctaccgccacgccgcgcttgattcgagaatggcggcgattgccggccagctgatcggcggcagcgggacccgcttccatcacagcaaaatcaactccaagctgccgcacaccgccacgcaggtgaaatggcaccaggattttctgtttaccccccacagcaatgacgacatcatcaccgccctgctgatggtcagcgaagtgacgccggagaacggcccgctcaacgtggtgccgggaagccatcggggaccgctgtggtcccactggcaaaacgatcgttttaccggcgccgtggatcgggaggttgaagcgacccactgccagcagccgcaggcctgttttggcccggcgggatcggtgtgctttatgcatactcgtctgctccacgcctccagccccaatgaaaccgacctgccgcggacgctgtttatcagcgtctacgcggcggaagatgccctgccgtacggcgaaaatccgctgcccagcgcgcacgccgggcagatggttgccggggaagagagcggcctggtgcgcagtaccgtgaatcatttacgcctgccgcaaaaaccgcgcggcgcatcctttttcgtccagcaggccggtaccgatcgcgccagcatgtaa

SEQ ID NO: 178705 - DNA, 1521 bp, Klebsiella oxytoca
atgacgtttaactggaactatatgttaagcctgctcagcgatatcgatttctggcaggccacctggaccgtcatcaaattaagtttgctgacctgggctttcagtattgtgctggggtttattctggcgctggccaaacagtcgccgcgcaagctgtttaacgcgcctgcccgcctctatatctggctgtttcgcagcatgccgctgctggtgctgctgatttttgtctacaacatgccgcaggcgctaccctccttcgccccggtgctgaacgacccgttctgggccggactgctggcgatggtgctgagcgaagccgcctatattgctgaaattcatcgcggcggactgctgtcgattcccaaaggacagagcgaagccgcccgcgcgctcgggctgcgctatgctggcacccagtggcgtgtggtgatcccgcaggcgctgcgcgtcgccctgccggcgctggctaatgagtatatcgccatcgtcaagctcagctcgctggtgtcggttatctccctgaccgagatcttaatggtcggccagcgcctctattcgcagaatttcctcgtcatggagaccatggcggcggtggcgttttactacatcctgatcgtcacggtgtttgatttcctgcttaagcgcctcgagacctggctcgacgtcacccagcgtaagaccacgcgactggtggatgaagaaatgcagcagctggccaccgcgcggcgtccggcaatggcccgcagcgttagcgtcgcgcaggaaccggcgctgcaggcgtcaaagctgcataaagcctataacaatgtcgaagtgctgggcgccgtcagcctgcaaattcagcccggcgaagtggtctccgtcatcggcccgtccggctccggtaaaaccacgctgatccgcctgctgaacggccttgagcagattgataacggcgagatcaaaatcaacggccagccttttattcaccttgaccgccaggggcagcagaagccgcgttttatggagaacagcgagcatcgccagaatatcggcatggttttccagagcttcaacctgttcccccacctgaccgtactcggcaacctgctgctggcgccgcgctatcaccatctggccagcgaaggcgagctgaagcagcacgcctgcgaactgctgcataaagtcggcatgctggaacacgcgtggaaatatccgcatcagctttccggcggccagcagcagcgggtagcgattgcccgcgccctgatgatgcgcccacaaattatgctgttcgatgagcccacctcggcgctggatccggaaaaagttaacgaggttctgcaggttatcgaatcgctggcccatgaaggcatcaccatggtgatcgtcacccatgaaatgaacttcgcctttaaggtttccgatcgaattgtgtttatggaaaaaggacgcgtggtctgcgacgacacgcctcaggcaatgcgcgacggccagcatccgcgcgtggacgccttcctgaaagatgtctctttggcttaa

SEQ ID NO: 178706 - DNA, 918 bp, Klebsiella oxytoca
atgaaccgatttaccctcaaacagcttaaatatttcgtgacggtggtggaaacggagagtatcgctgaggcttcccgtcagctgcacattgcccagccgtcgatctctattgcgattaaaaacctcgaaagtaccttcgaccagcagctgtttattcgtcaccacgcgcagggcgtatccctgacctcaagcgggcggcgcttctacgataaagccaaagagctgctgcggctgtcctatgagtttgagcagaactcgcgggcggataaagagctggtatccgggacgatttccgtcggctgctttgaatccgtcgcgccgctgtatatgccaaaactggtagcgggatttaaaaaaatgtatcccgaaattactctccagctctacgacggcgaacagcatgaactgatgcacggtctgcaccgcgggcgcttcgatctggcgctggtctacgacctggagctgggtcactccattcataaagagctgctgaacgccccgcataaaccctatgctttgctgcccgcttctcatccgctggcgcagaaaaaatgcgtcacgctccaggaattaagccgggaaccgatgattttgctcgatgcggtccccagcaaaaactattttgtctcgatatttaaagagaaaggttatcacccggaagtggcctacagttcgccgtccatagaaatggtgcgctgtatggtcgggcagggattaggcttttcggtactggttacccgtccgctgtgcgatatgacctatgacggcgaaaagctggtgcagctggatattgccgacgaaatgcccgcatcgacattaattatggcgcatcttgccaataatgaacccacgcgtccgacgcagctatttatggattattgccgcagcatagaattaacgccgcatcagcacgcgtaa

SEQ ID NO: 178707 - DNA, 1260 bp, Klebsiella oxytoca
atgacagagcagattacagagatcgataccctggtggtaggcgcggggcaggcgggcgtcgccatgagcgagcatctgacgcatcacggcattccgcatctggtgctggaaaaaaagcgcatcgctgaggcctggcgcagcggccgctgggattcgctggtggccaacggcccggcctggcacgatcggtttcccggcatgacctttcccggctgcgacgccgacagctttgtcgccaaagagcaaatcgctgactatttcgccgcgtatgccaaaacctttaatgcaccgatcaaaaccggcgttgaggtctttagcgccgagcgcttaaacggccgtccggggtttcgcgtggaaacgtcactgggcgtgattgaggcgcagcgtatcgtcgccgctaccgggccgttccagcgcccggtgataccggccatcgcgccgcaggatagcgctgtacagcagattcattctgcgcactatttcaacccgcagcagcttccggaaggcggcgtgctggtggttggcgcggggtcgtccggcgtgcaaatcgccgatgagctccgccgggcggggcgcgcggtatggctctccgtcggcgcgcacgatcgcccgccgcgccgctaccgccagcgcgatttttgctggtggctgggggtgttagggctgtgggatgcggcggccaatcagcccggcaaagagcacgtgacgattgcggtcagcggcgcgcgcggcggtcataccgttgattttcgccagctggcgcaccagggaattaccctggtcggacagacgcacggctttaccgagggcaaagccgttttccgtgccgatctggcggacaacattcgtctcggcgacgcctcctatctggcgctgctcgacgccgcggatgagtatatcgctcgcaacgggctgtcgctgccggaagagccggaagcgcgctttttcctgcccgaccccgattgcctgacccagcccctcaccgagctcgacctggcagccgcgggggtgagctgcattatctgggctaccggctataccaccgattaccgctggctgaaggtcaacgcctttaatgaacagcagcgcccgcagcatcatcgcggcgtttccagcgaaccgggcgtctatttcctcggtctgccgtggctctcccgccgtggctcaacctttatctggggcgtctggcacgatgcgaaatatatcgccgatcagattgccattcagcgccagtatcaacgctatcaaccttcctgctaa

SEQ ID NO: 178708 - DNA, 435 bp, Klebsiella oxytoca
atgccaacccatacccgtattcggatgtttaacaccaaagaaacctatcccactcagacactcaataacgatctgtgccaggcggtgcgcgcgggaaacaccgtgtacgttcgcggtcaggtgggtaccgattttgacggcaatttgatcggcctgggcgacccgcgcgcccaggcagaacaggcgatgaagaacgttaaacagctgctggaagaggccggcagcgatctgacgcatattgtgaaaacgacgacctatctgatcgacccgcgctaccgcgaaccggtgtaccaggaagtggggaaatggctcaaaggcgtgtttcccatttcgaccggcgtggtggtatcggctctcgcgcagccgcagtggctgatggaaattgacgttacggcggtgatccctgacgactggcatgcgcaggaggcaccatga

SEQ ID NO: 178709 - DNA, 675 bp, Klebsiella oxytoca
atgaccctctctatttccgccctgtgcccggagtcgggtcaactgggcattgcgattagctcatccagcattgccgtcggcgcccgctgcccgtggctgctggcgggcgttggcgcggtgtccagccagaacatcacgctgcccgcgctcggaccgcagatccttgccgggcttgaggcgggactcacgccgcagcaggccctgacgcaggcgctgggcgaagaccggtttagcgattatcgccaggtggcggtcatcgacgccagcggcgagagcgccgtgttcagcggcgagcatacgctcggcatctggcagctggcgcagggcgagaactgcgtggcggcggggaatatgctggccaacccgcaggtgattaccgccatgacggcggcgttcgaagccgccagcggcgaactggccagtcgcctgatcgcggctttgcaggcgggtatcgatgcgggcggcgaagccgggccggagcactcggcggcgcttaaagtcgtggaggattacgcctggccggtggtggatttacgcgtcgactgggcggaagaacgcccggtagcggcgctggaagcgctgtggctggcctacgagccgcagatggaagcgtacatcacccgcgcgcttgacccgcgcgaagcgccgacctacggggtgccgggcgatgaataa

SEQ ID NO: 178710 - DNA, 1170 bp, Klebsiella oxytoca
atgaataaccgcgtgcgtgagatcctcggcgcgctgctggcgtttgataccaccagccgcgagtcgaatctggcgctgattgcctggatcggcgactttctgcgcgcgcgcggcgtggcgtcgcagctgttttatgacgacgaagggcgcaaggcaaacctctatgcccgccttgggccaaccggccccggcggggtgatgctctccggccatacagacgtggtgccggtggatggtcaggcgtggacggtgccgccgttcgcccttaccgaacgcgacgggcgctactacggtcgcggcagcgcggatatgaaagggtttatcgcctgcgtgctggcgtcgctggaggcgtttcttgccgcgccgctgcggatgccgctgcacctggggttctcttatgatgaggaggttggctgcctgggcgtgcacagcctggtggattttctccgcgcctccgccgggaaaccggcgctgtgcattatcggcgagccgaccgacatgcgcccggtctacggccataaaggcaagctcgcggtgcgctgtcgcgtggaagggcacgcctgccactcggcctacgccccggaaggggttaacgcgatcagctatgcggccaggctgatttcccggctggacgcgctgggtgaaagccttgcgcagcagcaggatagccggttttcgccgccctcgggcacgctgcaggtggggacgattcacggcggcgcggcgctgaatatcgttccgcaatcctgctggttcgactttgaaattcgctatttacccggcacgcgcccgcaggccgtgaccgacgccctgggcgattatgcccgcgagcagctgcttccggcgatgcgcaaggtggcgcagcgcagcgatattcatttccagacgctgagccactatccggggctgctgagcgacccgcagtcagagttcgcccgctggctggcgcagtggtgcggcagcgacgatttcaccaccgtcgcctacggcaccgaaggcggcctgtttgacgaggcgggcgtcgcgacgctgatctgcgggccgggcagcatggctcagggccacaaggcggacgaatatatcagtatcccccagaccgaacgctgtatggcgatgctggaaaacctttgcgcctggatgcgcgccgatccctccgattctcttcgctga

SEQ ID NO: 178711 - DNA, 816 bp, Klebsiella oxytoca
atgcaaaacccgaactccccgcttattgatcaacagaccgtcgaccgctggcaggccgacggcgtcgtgctacttaaaggcgtgttcacgccgtggatcgagagcctgtcgcgcggcgtcgccgcgctgatggcgaaccccagcgagtacggtcacgcgcgaacggtgatccccgaggacggctcggcgccgttttttcaggactattgcaactggcaacgaatcccggaatttcgcgattttgtttttcagtcgccagcggcggagatcgccgcggcgctgatggggtcgcagacggcgaagtttttccacgagcacacgctggtgaaacagcccggcggcagtacggtaacgccatggcaccacgatcagccctattactgcgtggaggggcggcagaatgtcagtctgtggatcccgctcgatccggtagcggaggcgatttcgctgcgctgtattcgcggttcccatcgctgggacgatgagttcagcccaacgcggtttaacggttcaaagctctattcccattcgcgctttaaagagctgccggacattgatgcccatcaggaggattacgatatcgtcagctgggcgctggagccgggcgatgcggtcgcttttcatttccgcacgctgcatggggcaaagggcaattcaaccgcccgcgcgcggcgggtattttccgcccgttgggtaggggatgatgcgacattcgccgaccgcggcggcgtgacgtcgccgccgtttccggggcttaagcttcgcaacggagagccgcttgtcgccgatgagtttccgcaggtctggccgcggtag

SEQ ID NO: 178712 - DNA, 492 bp, Klebsiella oxytoca
atgggtactgacaaaatagctacgctgtttagatacaaacgctggatagatattgaaacgttacaagcgattaaaagaattgatgcgtctgcgaatgcagaaaaacgccatctgacgctcagattaatgaatcacatacatgtggttgatatgatcttccgcgctaacattaccggccagaagcactcctacaccgcactgaacacgccagagacgccctctgccgatgaacttctgagaacgatgactgaatgtacagactggtatattcaatacgtcaatgctatgtcccccgttgaccttgctgaaaccattaaattccagtttgtcgatggcggacctggtgagatgaaggcggtcgatatgctcaatcatgtgctgtttcacggaacatatcatcgcggcgctgtaggttggctactttcagaaattggtgtaaccccacccaaggacgtactgaccgtctttctaagagatcataaccacgagtaa

SEQ ID NO: 178713 - DNA, 537 bp, Klebsiella oxytoca
atggtcaccacacatgtttttatcgcggtcagtcttgatggttatatcgcccgacaggatggcgatatcgactggctgttgcagcgcgatgacccaacagaagatcatggctatgccgcattcatcgcggacaaagattggatcgttatgggccgggggagctatgagaaagcgctgacttttgaccaatggccttacgatcgacccgtgctggttctctcccgacagctaaccgataccgccattcccgagacgctgaagggcaaagtgcagctctcaagccgcacgccgggcgaagtgcttgctgacctggcggcgcaaaacgcgcatcgcgtctatctggatggcgggcaggtaatacagtcgttcctgcgcgaaggtctggtcgccgatatcgttatcacgaccgttcctgtcctgctcggttcgggaaaaccattgttcggatccctgaccagggatatcgatttgacgctgttatcaagccgcagcttcccttcgggactggtgcagtcgcactatcggctgacgtcataa

SEQ ID NO: 178714 - DNA, 1119 bp, Klebsiella oxytoca
atgaagcaggttggcattgttggttggcgaggaatggtcggttctgttttgctacagcgaatgatcgaagagaacgacttcgacaatatatcagcgcattttttcagcacctccagtgcaggagccgccggtcctgtcattgatggtgtcggctacacacttaaagatgctaattccgtaagtgcactggccgaaatggacatcatcataacctgccagggcggggattataccaaagcaatatatcctgctttgcttaaccatggctgggaaggctactggattgacgcggcctcagcgctacggatggatgagaaagcctgcattattctcgaccccgtcaaccgcaacaatatcgatcgtgcaattaaagaaggtattaaactttttgtcggcggcaactgttccattacgctgagtcttatggggctggctgggttgataaaggctgatttgatcgaatggatgagtgtgatgacctaccagtccgcatcgggtgctggtgcacagtatgtacgggaactcattgcgcaaagtgcctacataagccgccatttatctccggatgagctggcatcctcaggttcagtgcttccgttagttaataaggtcagtgaattgattaacagcgctgatatgccgacccagaacttcggtgcacctttgatgggcagcatcattccctggattgacagcgatttaggcgatggcaatagccgtgaagaatggaaaggtgaggcggaaaccaacaaaattttaggcctgtctcccggtacgatcccggtaaacggcttatgcatacgcgtcggcgtgatccgctgccacagcgctgctataacccttaagctcaagcgtgaagtcaacgaagaggaatttgcagaattagtgatgaattcccacccctgggttaactatgtgcccaataacaaggaagagagtgtcagtaccctgacaccggcctgtatcagcggttcgcttaaggttggtattggccgttacaagaaaatgtcgctaaacaatgaacctatctactcggtcctgacggttggcgatcagctattgtggggagcagcggaaccattacgccgcatgttgaatattttggctggaaaagcttga

SEQ ID NO: 178715 - DNA, 801 bp, Klebsiella oxytoca
atgcttagtacgttacccgatttacacagaagttttgcagagcaactcaagcttaacgttcagtctgacgcccggattcactccctgctcgggggcggatcgcttattcatggcggatttgatcaatactccgatttggattttgtcgttgtggtagaccctctctactacgatgaaatcatggcgcagcgtgtggcgttcgccggaacagcaggcaacctgctgcatgcgttcaccggggaacatgtcggagagcctcgcctgctgatatgcctgtatggccctgaactcctccatgtcgatctgaaatttgtcaccctggacatgctcactcaacgcgttgaggagccggtagtgttattttctcgcgatcgccatgccctggagcgacatctggcacaatttcgggcccagtggcctgacatgacgccggagtggtttgagtcccgagcctggatctggcttcattatgcggtggttaaactgggaaggggcgaacttttcgaagcgatgggtatgctgtcattcttccgggagcaagtgctgggaccgatgctgtaccgccgcgccaatctaccgcagcgtggggttcgccgcattgaatgccacaatatcgatcctgagggcctgctgacctccacgctgaccacgcacgatcgtgactccgtcagcatcgccatcagcaaggcggttgacgcttatatcaatctgcgcgctgatgcgctgcctgaaaatatcgcggacgatgcggcacgacgggcgctccttgccatgctgaaagcgtattctgaacgggtttaa

SEQ ID NO: 178716 - DNA, 924 bp, Klebsiella oxytoca
atgaaatcttttttctctttgctgggccgttacgcgctgacgttaatcgcagtagcggtagcggcctgcgtggcgtttattttctggaaacagtatgcgcagacgccctggacgcgcgatggccgggttcgggcagatgtggtgcagattgcgccggatgtttccgggccggtgagcagcgtggcggtgcgggataatcagtgggttaaccgcggcgatgtgctttatgccatcgacccgcgctggctgaagctggcggtgctcagcgcgcaggccgacgtcgaagcaaaacgtcatgaaatgctgatgcgccaggatgccgcccggcgacgcgcgctcatcaaaggggtcatttccggcgaggatatccagcaaacaggcagcgcagcgcgcgtcgcggcggccaattatcagggggcgctggctgcgctggaactggcgcagctgaatttatcccatgcaacggtgcgcgccccggttaccggctacgtgacgcatcttcggctccgccccggcgactacgccgcggcgggagagacaaagatcgccgtggtcgatgcgcacagtttctgggtggtgggctattttgaagagactaagctgcgtcatattcgcgtcgggagcgccgcacacatttcgctgatggggtttgacccgctcatcaccgggcacgtggagagtatcggccgggggatcgatgatagcaatgacgagaccggcgggctggggctgccggatgtcaatcccaccttcagctgggtgcgacttgcgcagcgagtccccgttcgtattcagttagataagataccggaagggattgaactggtggcgggactatccgccagcgtttccatcctgcctgaaagccctgacggcgggcgtagcggaggatcgggctacgtggctcaggctatccacccatag

SEQ ID NO: 178717 - DNA, 216 bp, Klebsiella oxytoca
atgatagatgacatcaatatcgggggtgtttttatccccggactgctgctgaccgcgctcattgccctggtctgtacgctgctactcgtaccgcttttctcctgcagcaggctttaccgccgcttgcccttacgcccgctgcttgatgtttcaacctatatcgtgacctttttcctgcttttgcagggcctgaccacactggggttattcgcatga

SEQ ID NO: 178718 - DNA, 2040 bp, Klebsiella oxytoca
atgagcacattaacttcccatcacagccgttttttacacgcgataagccgttggtcaggccgcatagcctctccctcgctgctgagcgacgcccatgccctgctctattccgtcaggagttttgccgccgcgatgctcgcctattacgttgccctggcgattggccttgaacggccctcatgggccatcatcaccgtctacatcgtgtcgcaaacctcggtgggcgcgtccctgagcagaagcctttatcgcctggccggtaccgtggccggcgcgggggccacggtattgattgtgccgacgtttgtgaatacgccaattctctgtagcgtgattctggcaggctggatcaccttctgcctctatttatccctgcttgaacgcacgccccgcgcctatgcctttgtgctggccggttataccgcaagcctgattggttttcccgccgtcgccgatcccggcacggtgtttaacatcgccctcatccgggtacaggaaatcgcgatcggtatcgtctgtgccgcgctgattcaccgctacattttacctgcccggatatcagggctgttcaacagcaaattagcccagacgctgcacgccgcgcgccagcggattgccgacaccctggcaggcaaggccgacgcgcagtctgagccgctgcatctggcgctggcgctacagtttttgcagggcatcagccaccatatcccgtatgattttgccctttcggttccggcccgccaggccaggaaagcgctccatgacaggctggcgcggttagtgattgtcaacggcgaagtacgcgatcgtttgcagaccatcgccgggatgcccgccgcgatgcagactctactgaatgacgtgcaggtctggctgacctgcgacgataccggccaacgcaaaaacgccgcagaagcgctgcaccagcgcagcgcgcagttagcgcggcggctcgcggcgcaggcgctgacctttgaagatgcgctgcgggtaaatttcttacgctacatcgctgagttgattaccctcctgcagcagtgtgagcggctttcggaggccattcatcacaccagacctgcgccagcgcaggcggaagatcgtgcggcgacaggatacgttttccatcgcgatcccctcagcgccgcccgcacggcgctgggcgcttttgtcatcattctgagcggctgtctgctatggatttactctgcctggcccgatggcggcacggcggtgtcgattctcggggtttgctgcacgctgtttggcagtttcgacacgccggccccgcatattgtgaaatatattatcggctctgtctggggcgtagtgataagccttatctatagcttcgccctgcttcctccgctcagcgatttccccgtgctggtggcggtgcttgccccggtctatctgcttgccggatcgctgcaggcgcggccccccacgacctttatggccatggggatcaccctgacgctgccggtactgtgcgagctgggcgcgcgctacagcggcgacttcgccgacgcggccaacaccgcgatcgccctgtttttcgcgaccggctttgcggttatcggcatgagtctgctgcaaaccgtacaggcggacgcggcgataaagcgtctgctgaatctgtgtcaacgcgatattcgccgcagcgtgagcggcgtatttaaaggcgatgaaacgcactggaccaatctgatgatcgaccgggccgctctgctgctgccacgcttgccgcgcagcgggcagtcctccgtccgggcgctcgatcgcctggtgcactttctgcgcataggcctctgcgtgatgcgcctgcgccgttgcgaaacgcccgccggcagcgatatccacgaggtgctttctcgtcttacccacacaacggagaccgaagccttacgcgagcgcattgccgccatggcgaaccgctgcttgcccgcgagggaggaacaatcatgccagtttgtcgaccgactggtcgatctgcactgcgcgttacggacgcagaacgaggaacccacccatgatagatga

SEQ ID NO: 178719 - DNA, 837 bp, Klebsiella oxytoca
atgctctattctgtcaaaaaatacctaaatgttgccaatgagatgccatccagacttgcccataccctgtttgatcccgatagcacgccgagccctgccgtcgcgcggcatattgatttcgttgattacgcggcagaagtgccggttcatacccaccgcaagggacaactgatcgttgccctctatggggcggtgatttgtcgtgcggaaaacgatatctggatagtgccgccagactgcgcggtgtggatccccggcgggatcccgcacagcgccaaagcgacctggaatgcgcatctcaactatttgtttattgaacccggcgccgccgcgctgccggagaaatgctgcacgctggcgatttcgccgctgattaaagcgttagttgaccgcttaacgaatgcggacgtcgattacgccgcggagagccatgtcggcaggctgaccagagtgacgctcgatgagctggccaccatgccgcagcagaaactgagtctgccggtttcggcgcatcctaagatccgcgccatggcggatgcgctggtcagccacccggaggatcgcagcacctttaaagtttgggcgaaacggctggcgctcagcgagcgctcattagcgcgcctgatgctgcgcgaaaccggcctgaccttcgggcgatggcgtcagcagctgcatttgattattgccctgcgggagctggcaagcggggtatcggtgcaaaacgtggcggctaatctggggtatgagtcggtcaacgcgtttatcaccatgttcagaaaaacgatggggagcacccccgcgcactattttgccggtcgaagaacggcagatccctga

SEQ ID NO: 178720 - DNA, 621 bp, Klebsiella oxytoca
atgaaagtgatatgggtgaggcatgcagaaaccgagtggaatcatagagggattattcaggggcatcgcgacagcttcgtaacccaccgcggtatgcaagaaacagcggcgttactgacagcgctgacgaaagaggcatatccgatagaatgtgtttacagctccccgcttgggcgcgccttgcacatggggctgaagctgtctgaaggtcttggctgcccgttaaaagttgaagaatctcttaaggaacagtcgtttggttgctttgaagggatatcttttgagcacttcaggcgagacaatccgcgtgatgcagatgcgttgctcgcccttgatgcagcctattgtcccccggagggagagtcgttagcccaggcaactcgacgcgtgataaatttcttacaacacctgcaaaataccaatgcacatcagatcgtcggtgttgtttctcacgggcatgtcagtcagggcgtgctggcgttacttaaagaggggactctcgataacttctctcgctatgcgcaccccaatgcgagttactctgttttcgattttacggacggcaaatgcgccgcgctcagatgggggatggctacccatctcattcaacttcaacgataa

SEQ ID NO: 178721 - DNA, 690 bp, Klebsiella oxytoca
atgaccagaacagaaaggcttctcgaattactacagatattaagggcgcaaagatatccgatcacggcatccgctctctcagaaagattagaaataagcgtgcgttccctttacagagatataaaaacgctacagcagcaaggcgtgtgcattgaagggggggctggaattggttatatcgttaagtctgactttcatttgccgcccttaaatctttctcatgaagaaatcaatgctattatacttgggcttaattgggtttctcataatacggataatgatttcaaaaaaaacgcaaggaatgcgcttgccaaaatacatgccgttattcccggtgaattaaaaaatcttattgagagtcaatcctatctgaccggtcccacagaaaagaatgaggtgttttttgaagacttgcgtaatgcgattaaaaaacgaaagaggatcaaaataaagtattgtgataagagcaatgttaactcttctcgagtcatatggcccatcgcattggtatatatggagtcatgctggcttttggttgcatggtgtgaaatgagaaaggatttccgtcattttagaacggacaaaatacaaggcattgtgccgctggattccaggtatagtgaaagcaggttagttttattgaataaatggagaatgaaagaggggatcggcccggagaaagagtactga

SEQ ID NO: 178722 - DNA, 747 bp, Klebsiella oxytoca
atgaattttcaaaataaagtggctgttatcaccggcagtactgcaggtataggcgaggcagtcgcagagcagttacacaaacatggcgcgaaggtcgtcattgtatcccgctcgtcagaggaggcgaaacaaaaagcgaaacaattgtcttcacaggggcaaccagcaatggggatcggatgcgatgtgtcacagcccgaacaagtacggcaaatgatagatgacgttatcaactattttggcaggcttgattatgctgtcaataatgcaggcataacaggtgagcatggtaaaaagataacagagcagacagttgaaaactgggataaggtcattgccacctcattgagcagcgttttttactgcctaaaatacgagatacctcagatgatgaagatggggggcgctatcgttaatttatctgcagtaaatggtctggttggcattcctgggctggcgccttacaccgccgctaagcatggtataattggtttaacccaaaccgcagcgctggagtttgcatgtcaaggcattcgcatcaatgccgtcgctccgggctatgtccaaaccccacgaataagcgaattccctgaaaatatcgtacgcagtttcgcaaatagccaccctatgaaaaggatggcaaaaatgcaggaaatcgcagacttcatattgtttttgttgtcagataaatcagcgttctgtaccggaggcgtttatcccattgatggtggttttttagctgagtga

SEQ ID NO: 178723 - DNA, 807 bp, Klebsiella oxytoca
atgactgcaacaacgcaaccgctaacacaacagtgccgcgatagttttaccctggcacggcattgggtcaccgcagccaatgtcattttcctgtttgcaagcgcacatatccgggagccgctggagcggggaacgcccctgaaaaaaagcggcgggccggtcatatttgctgcgcgcttttccctcactatctgctacgggacagcataccgcgtcgtatgctgccttgccgttcttttcgttaacccggagttcactatgaacacgttgtcgtttttacattccgccattaatcaacgtctgctgctgcccgtggtgtttgctctgctgaccacgccggttttggccgcaggtgacaatagtaccaatagcaaaacgccggactgccccagcggacaggtgtatgacagcacgaaaaaacagtgcgtccctgaaaaaacaagccagctcagcgatgaagacaaaacgcgttatgcctatcatctggccaaaaaaggggagtaccaggcggccctggacctgctcaacaccctgaaaaatggcgataccgcggaagcctggaattaccggggctatgccatgcgtaagctgggccgtaccgatgagggcatcggctactatcagcgttcaatcgcgctcgatccgacctatgccaaagtacgtgaataccttggtgaagcatggctggcgaaaggccgtcctgacctggcaaaagagcaattgaaaactatcgccacgctgtgcggccatagctgcgaggagtaccgggatcttcaggcagcgatcgacggtcatcctgagtcctga

SEQ ID NO: 178724 - DNA, 1443 bp, Klebsiella oxytoca
atgacgatgtccgaaatatccccgccgacgccccactaccgccgtatcgccgatatgctgcggctgacgcttgcttcaggcgctttacgggcaggcgatcgcattatctccgcgcgtaaactggccgaacgcgaacaggtcagcctccccacggccctggaagcgctgcgttatcttgaggcggagggtctgattaccgcgcgaccgcgttcaggctattttgtccgccagccagccgcctcaggaaacgaacagcgcgctgcctctttgcccgggccggtaccggtaactatgtccgccattgcccggtcgctgttcggtagcgctgaagcgcgtctggtaccgcttggcgccgcgctacccgatcccacctggcttcccgtggatgcactacagcgggcgctgcacaccgccggtcgtcggcttgatgcgcgcgggcagagctacagcctgcccccgggaagagcggacctgcgcagaaagattgccgcacgcgctgcgcagtggggcgccctttttggcgcggatgaccttatcattacggcaggcgcaacccaggcgctacgtctggcgctccgcgcggtatgccagccgggtgatgctgtcgcgattgagcagcccgcctacttcggcacgcttctgctgctggaagatctgggtctgaaggcgttacagatccccacagacccgattgaaggcttattgttggcgccccttgaagaggctatccagcgccaccgccctgcggccgtgctcgcctcacccacggtgcaaaatccgctgggtgccagcatgcccgtggcgcgcaaacaggcgctggtggcgctgctcgccgataagggcatcccgctcattgaggacgatgtgtatggcgatcttgccggtggcgcgcagcgtccgcccgcgtgtaaagccttcgacagggacggaaatgtgatttattgcagttcgctgtcgaaaaccctggcgccgggctggcgaattggctggattgctgccggacgctatcactccgcggtattgcaggcccgcatggccggagaatgggcaggcgcgccgctgattgaagccgcggcaaacgagatcctcgccagcggcgattacgacaggcacctgcggcatctgaagctgcggattgcggaaggtatgcgcgctatcatcacccgagttgaagcctgcttcccaccgggcacgcgcgtcgcggctccggaagccggctttttgatttgggtacaactcccctccaggatagatgcgctggaggtacatcgtcgcgcactcgccctgggcattggcgtcagtccggggccgctgttttccccgggcgcggcggaactgcaaaactacctgcgcctgaacggtgcgaatgaacccacccccgcgcttttgcatgccgttgaacagctcggtatcgtatgccacgaattggccagggaacattga

SEQ ID NO: 178725 - DNA, 768 bp, Klebsiella oxytoca
atgcacagcgacagttttgacctttcactttacttccgccgcataggctatagcgggcctgcggcagcggataccgcaacgctacacgcgctcatgcgtcaccagctctttgccatccccttcgaaaatctggacgtacaggcaggtaaaatcgtgtcgatggcgcccgatgatattgccaacaagctcttacggcagagacggggcggctactgctatgaactcaacgggctgtttaccatggcgctggaagcgctgggcattgcctggcggtttgtcgcggcgcggcccatgttctatcccgcgcgccggcctaaaacccatatggcggtcgtcgcggaagtcgagggccgtcagtggctttgcgaccttggctttgggagctacggtattcgcgcgccgctggccctggatgaacttgatacggacattatccaggatttcgatacgttccggcttagccgcgatgcgcacggtgagtatctgctgcaggcaaaagttgagggaagctgggccaatcaatatggttttgacctgtcacctcaggaatggattgattttgctccggccaatttccttaactccacgcaccccgacgcggtctttgtacaaaagctgctggttatacagcatcagcccgaggggcgctttattctgctgggcaacacgctcaagagcattaccgcggatcgggtagaaaagcagcggctggaagacgatgagattgcgcatgtacttgagcagcgctttgcgttgtctgcccgctaa

SEQ ID NO: 178726 - DNA, 453 bp, Klebsiella oxytoca
atgataactgtagagaaatccgatccattttcttcagaatcccatcgcttaatcgaaatgctatcagctgaacttgccgctattacgggggatagtggcaaaagcaatttcaccgttgaagcaatgaatgatgacaaagccttatgggtattggcaaagaatactcatggcgaagcaataggatgcggcgctattcggccgataacgcaaaatatagccgagcttaaaagaatgttttcagaccgaagcgtgcctggagttgggggagctttactcacttttctggaaacatctgcaaaagatatgggatatagcgaactcagactggaaacccgacacatcaaccatcgggcagtaaatttctacgagaaaaatggatatattcgtattgaaaattacggcccctatgtcggtaggacagaagccgtgtgtttctcaaaagcattgcgctga

SEQ ID NO: 178727 - DNA, 186 bp, Klebsiella oxytoca
atgcagaaccatggtcatcgcggtttctgcatcgacgcggagctgccggaggagggcgtagaggccggcatgaccgaggagcgggattcctcccggagaaaacgcgcggagtatacaggcactttaaagggaccatttctccatggcgattcactgtgcctgtttctggctgatatattcctctaa

SEQ ID NO: 178728 - DNA, 912 bp, Klebsiella oxytoca
atgaatacatctatcccatgggagtggtaccgaacatttctggctgtgctcagggaaggctcgctttccggcgcatcacgcaggctttcgattacgcagcctacggcgggacggcatatcgctgcgctcgagtccgctctgggccaggtgttgttcacgcggtcgcagacgggcttgctggcgactgaaacggcgctggcgctgagggtgcatgccgaagcgatggagagcaccgcgaatacgctagcgcgcacagcctccaactttagtcataacagcgcgtccattcatggcgtcgtccgcgtctccgcgagtgacgttatcggcgttgaagttctgccgccgcttattgccaggctcagggagtctcacccacaaataacgattgaattagttctgtcgaaccgggttcaggatttactgcacagggaagccgatattgctgtacgcatgaccacgccagtacaggaacagcttattgcgcgtcgcgttggccgcattgaactcggtctccacgcatcgacgtcctatcttgcacgacatggcacgcctgaaaatagcgaagatctgctgaaacatgcgctgattggctttgatcaggatacgcctttcatccgtaaggccctggaaaaattccctcagctaagccggaatgcattttccatgcgcaccgacagcgacgtggctcagctgaatcttattcgcgccggggccggcattggcatatgccaggtgcagttggccaatggctctgttccactgcagagattactgccgaatttcttttctttctatcttgatacctggatcgtcatgcacgaagacctgcgcaatagtctgtgctgcaaattggttttcgatgttctggcaaagggattagaggaatatatcagccagaaacaggcacagtga

SEQ ID NO: 178729 - DNA, 990 bp, Klebsiella oxytoca
atggaaacccgaggcaaggtcctgatacttggcgcaaccggcggaatcggtggtgaaacggcgcgccggctcattcagaaaaaatgggacgttcgtgcactaaaacgaggacttcatggcagtgaacgacgtggtgacatccagtgggtagggggcgacgctctcgatccggagcaggtcgccgctgcggcagcagactgtagcgcgatcgttcacgccgtcaatccgcccggctacagaaactggaagcatctggtgctgcctatgctgcgcaacacgattggcgcagcagaacgaaccggcgccttgatcgtgcttcccggtaccgtttacaactatggtcctgacgcttttccgctattacgggaagacactcagcagacgccggtcaccaggaagggagcgatcagggtacaaatggagaaagaactggcggcctattcgcagcgtggcggacgggtattgatcgtccgcgcgggggatttttttggtccgcgcgccggtaataactggttttctcaaggtctgattaagcccggcaagctgcctggcgtcattgccaatccagcttcgtttgcaaccggtcaccagtgggcttacttacccgatgtcgcggaaacgatagctgcgctgctggcacgacgcgaggagcttgagccctttgcacgttttcatatgcaaggtcactgggatgccgacggcagcgaaatggtcagcgcgattcaacgcacagcggcacgctatggcggcatggccaaaatacaatcatttccgtggtggttgatgtacctggcagcacctttcaacgcaaccttacgcgaacttctggagatgcggtacctgtggcgccagccggttcgcctggacaatacgaaactggtgaattttttaggtgccgagcctcacacccctcttgatgaagctgtccatgcgacattacagggcctgggctgtattgatcataccgagatgcctcgtataacaatatag

SEQ ID NO: 178730 - DNA, 1023 bp, Klebsiella oxytoca
ttgagtatctgcaaaatagaaagtccgctcctcgtccatggcggattgcgcgtccgatggccgtctgctgcgtgccagaagcggacattgtcttaccagaagacagcatgcaggaaagcgcttcacctatggggtaaaatgcctgaatgcatacctgtttaccactttgattgtaaggatttcaaagaaagctttatggatacgttcaagttaaaaccctggctaagtcgctggaacctcattcctgatggcactccatttataactcatacatcacagttgtatccggtcaaaacagcagcacatggtattaaagccatgctaaaagttacggatgaccttgatgaacaagccggtaatgcactaatggcatggtgggaagggaatggtgcggcacaggtgattgcacatgaaaatgaagcaattcttctctcaagagccacaggttcctcctctttatcagcaatgtcccgtggagataaggatgacgtagcctgtcatattttgtgtatgactgcgaaccaacttcattcatgcgcaaaaagaccgtttccccagcttacgcctttacatgaatggtttaatcctctaaaaccagcagccttgaaatatggcggtatcctgacacgttgcgcagaaatttcagaggaattgctttcttctcctcgagatgtggtcgtattgcatggcgatttacatcacggaaatgtgcttgattttgaaacatctggctggcttgccattgaccccaaagggctaataggtgaacgggggttcgactttgctaatatttttactaatccggatcttggtaatccagtacctcctgttgcggctgtaccggagacatttaaacagcgtctaagcatcgtcaccagaatggctgacctggacagagaacgcctgctcaaatggataattgcatggtgtggtctttcaaccgcctggtccctctcaagtaacgatactgtttcaacaacaataaaagttgccgagttggcgatgactgaactggaacggtga

SEQ ID NO: 178731 - DNA, 606 bp, Klebsiella oxytoca
atgaaactctattacgccccggatacctgttcgttatcgccgcacattgtgctgcgcgaactgcaacttgagtttgaactggttagagtcaacaacagaagcaagatcaccgctgatggtcgcgacttccgcgccattaaccctaaaggttatgtcgcggcccttgagctcgatgatggtcagatactcactgagggcccggccatcgtgcagtacctcgccgatctaaaaccagaacacggcctggcgccgcgtgcggacagctgggctcgggtgcgtctgcaggaatggcttaactttatcactagtgaaatacatgctggctcggcaccgttgttcaaccccgcgctgcccgaagaggtcagagcgatttttcgtgagaagctgttccgacagttcgatttccttcaggcgactctcaacgaaaaaacctatctgactggcccatccttcagcgtggctgatgcctacctcttcactgtgctgggctggtgtaaatttttctcaatcccactggatcgctggcctgcgctattggcgtacagggaaacgatcaatgcccgtcctgcggtacaggccgcattactggccgaggcgtcgctttaa

SEQ ID NO: 178732 - DNA, 876 bp, Klebsiella oxytoca
atgatgaatcttttacattggcgcttactggtggccgtggcggatgccggcaacatctcgcgcgccgcagaggagataggaatgactcagtccggcgccagccaggcaatcgcccagctagagtcttcactgggattttcggtatttatacgtgagcgacgatatatcggcgtgaccgcgctgggcgggcaggttgttgaacacgcaagaaacatgctttcgcagctaaatgccatccgcgaactggccgatgagagccggggtttaaatcgcgggcgcattcgcctggccagctttccatcagtgacgtccaccttgttgcctggactgctgcgggactttaagcgcctgcatccgggtattgacgtcgtcatcctggaaggctcggacgaggaggtcgaggagtggctggccgcagataccgttgagctgggggtaatcatgaatcccgaacccggccgtgctgacgttgtattagggcaggatgcatgggtagcggtactgccagccactcatcggctggcacatcatgccaggacgtgtggcataacgctaaaggcgctggcagaccagccctttattctggcgacaggcggatgcgccgttaatggcaaaagcctgatggaaaaggcgggtctgcaacttgttgatatacgcgtgacggtacgcgactggattagcgcctgtaagctggtcgcggaagggatgggagtcgccattgtgcctgaatcagccctgccagaggcgttgcgcaatctgtgcgtggtgccagtgacgcctgccatacaccgtgagtttcggctggtctgttcgtcatccggaacgtcttccggcgcaacacaggcgctacttaacgcgctacgtaaacgaggatga

SEQ ID NO: 178733 - DNA, 864 bp, Klebsiella oxytoca
atgaacctgataacaatccctgtaaagcagggggatgttctggctgccacagtatgggagagaagcgatgctaaagcgctggtgatcctccatcctgccaccgcggtatcacaggcgttttacaaggacttcgctgagtatctttacgcaatgggattcaatgttctgacctacgactatcgggggataggtcattccaggtcaggcacgctacaacactgtcatgtctcaatgtccgactggatcgagcaggatgtcggctgcgttaccgcctgggcaaagctgcgtttccccagtcttctgctgatggcggtagggcacagcgttggcgggcacgctattctgctttcgacggccacccggtcgctgcatgcggcggttcttgttgcttcgcacgctggcgtcacccgcacaattcaacaaacgcaggaaaagctcagagtctggtttttattacgtattctggcgccggttctgtgtcgtacctttggctatatgcctgccagacgcctcgggctgggggaagatttacccgcgcccgtcatgctgcaatgggggcgctggagtgccatgcccgactatttttatgacgatcgcgcctgggatgcgcgccgacgggcaagcgaagccacgttaccccttctggtactcggttttgatgacgatccctgggctaattctgcagcgattacgcgcctgatggcgccggtggaaaacgcaaaaattgaacgccgcgagatccggcacgcggattatggtattccggccgtcggccacatgggctttttccgtacccgatgtgcggaaaaaatatggcctgaagtcggtcgctggctggcaagccagtgtcaaccccagggataa

SEQ ID NO: 178734 - DNA, 654 bp, Klebsiella oxytoca
atgccttccatcgaaacgtttatgactttccttctcgcgctgacgcttctggaaatttctccggggccagacatgatgctgaccatcgccagaggagtcggtcagggaagacgtattgcactgcttacggttctgggcaatgtctttgtcgcaggttttgtgcaagtttcttttcttgttcttgggctggtgaccgttgtgcatgcctggccagttgcgctggatctgctaaggtgggctggtgcggcttatctgatgtggctgggcataaaaatgatagcgacttcaggcacagatactcggctgcgaaaaaccgcaataatttctgactggaatgcggttaaggaaggtgccctgaacagcctgacgaacccaaaatccctgctgttcatgtttgcttttcttcctcagtttatcgatcccgccgcgggtcctgtctggctgcaattgcttgttctggggagtatccaaaagctggcaggaattgtttccctggggtcagtcgcaatggcatcagggacatttggaaactggctacgtaaacacccaggctttatcaaatggcaggaacgatttacaggcgttgtcatgataggccttggtatccgcatgttgtttagcgggtctggtgtagtctcgaaatctgcccggtaa

SEQ ID NO: 178735 - DNA, 327 bp, Klebsiella oxytoca
atggaaagtttatttgtttacgggacactcggacctggccggcctaatgctcatattcttgaaaatatcgggggaacatggcaggaaggccacgttgggggttctttattagagaaaggctggggtgcagagatgggttatccgggaattgtactggatgactcaggtcatcgtgtaccgggttttcttttcaagtcagagaatttacataatcactggcacctactcgatgagttcgaaggttctgagtatgaacgggttcctgtagaggtaaccacatcgaacggtcagacagtgcaatcatgtctctatatgctcaaagcataa

SEQ ID NO: 178736 - DNA, 900 bp, Klebsiella oxytoca
atgttcgatcgccttcccccattgcaaactctgcgcgcttttgaagccacagcccgcctctcaagcatgacgctggcggcagcggagttgcacgttacgcatggcgcgataagccggcaaatccggaagctcgaagagcatctggggttaaagctatttttcaggctgacgcggcagataattctgacggagcaaggggctgaatttcaccaactggttacccgtcttttgagtgatttaatgcgggagtccgagcgtctgcgaggaagaaacctgataaaaagtttacgaataagtacaacggtttcatttgccagtaagtggttagcaccgcgtttaagccggttcaggcagagatatcctgaatttgaaattgagctggatgttactgacgttaatgtggatcttaatgatggtcaggtagatgctgccattcgttacggccttggcaattatcgagatgtttcgtctgaacgtatgttcgatgaaacagtcactcctgtctgtagcccagattttcttgagaaacataatggtctgacagagattaagggacttttaaattgcgttcttctgcatgagtacagaatgcaggcgaactggaaggcatggtttgagatggccggagaaaaaaattttagctgccagcagggtcccttatggactcttggcagcatggcgactgaggcggctatacgtggcgaaggcgttgctctgggacgcagcgttctgattgcagatgatgtcgctgctggaaggcttgttgttccgtttccacagttcaaacttaaggctgagcgggggtacgatttagtctaccgttcagataatcaggactcatttaaaataagcattctaagacaatggctcgctgaagaattgagctcgttgaaagattga

SEQ ID NO: 178737 - DNA, 333 bp, Klebsiella oxytoca
atgtcgctttacgatctcagaaccgaagcgcaggcattgccggcgtcctggcgctcccggatcttaggccgcgttggggcaacgaatctcaaagtcctgcgcatggatgcccactcagtcgctgaggaggtacatgaatatgacgagggattactggttatagacggacgtctggaactgagcgtgcaggagaaaaaaatctccgtcgcgcccggccagctttatatagccaaagcgggaattcctcatacggtagaagcaggcagctttggcaccctggtgattatagatttaccaggccgcggtttcagcggcgcatcccctgctgattaa

SEQ ID NO: 178738 - DNA, 1458 bp, Klebsiella oxytoca
atgctggattatcgtctgattaatcaactggatagcgtctgcaccggcgcacatctggtgacctggcccggcagcacactgctggcccaggccccgctcaatgccgttcccctgctcgcggaaatggtggaacaggccgcccgcggcgaggtggcggatacccgcttcggctgctcccccttcgcccgcatcaccctcattccgccaccgctgtggagggagacgctgaacgatggcctggccgaggcgctgcggccgctatgcaaaaagccggtgagcgaaacgcttatcctcgacgcttcgctggaagagagcagcggcgcgttaaccaaagcgctgcgcgaactgtttaacctcgactggcagcttgatgatttgggcctgcatcaggtgaaagccgccaggccacgcctgcgccagctcgccctctacgccttacccgaacagcggtcggcgctggacaccctcgcccatcgtcaacgggccacggcgcacggcatgctcgccgcgcgccgtctggcggatctgcctgcggagcagtgtaccccgcagtacgtggtggaagaagcccggcgtctgtgcgcggatatccccacgctgcgctgcgaagttctggatgaaaaagcgatcgtcgaacaagggctcggcctgctgcatgcggtgggtaaaggcgctgaacgcccgccgcgcctgctggcgattcattatgatggcgtcagcgagggcccggttcgctgctacgtcggtaaaggcgtcacctttgataccggcggactgtggctcaaggaaggcgccgggatgtacaccatgaagtacgatatgtgcggcgcggccaacgtccttggcctgatgctgagcatcgccgagctggcgctaccggtgcgggtcatgggcgtactggcgctggcggaaaacgcgattggccccgccgctatgcagccgggcagcgtcgcccgggcctgtaatggcctgacggtagagatcaataataccgacgctgaaggccgcctggtgctttccgatgccattgcctgggcgagccagcggcatccgcaggcgcactatattattgatattgcgacccttaccggcgcggtggttaaggcgctgggttacgatttgagcggcttgatgacgcaaagcgacgcgctgcgggcggggttaacccgggcaggaataaaaagcggggatgaggtctggtcgctgccgctggatagcaggctgaagaagcagaccgaaagcgcaatcgccgacctgtgcaatacgcccggcaataatgcggccatcagcgcctccgccgcctggcttttgcaccatttttgcccgccagagatcccctgggcccatctcgacgtcagcggcacggcgctgtggcgcgaaggcggtaaaagcgtcgcttccggccggccgattccgctactgattcagcatctgctcgacgatatcgacgagagttaa

SEQ ID NO: 178739 - DNA, 810 bp, Klebsiella oxytoca
atggaggagagtttgacaaagagtggaaaagccgatgatcccgtgcttagcgtcaatatcgcatcattgccgcggcccggcggcggggaaatgctctccggcattcatttcagcgccggtaaaggagagtgtctggtcgtcattggacccaacggcagcgggaaaaccactttattacgcgcgatagattgccaactgccgtcgcgggaaggcgacgtacggttatatggccgatccattgccgcattaacccggcagcagcgagcccggcagatcgcggtgcttgcgcagaatgatacccccgacctgcgtctggcgcttgaggattatgtcgccctcgggcggattccccacgcccgggatatgtcgcgtcgcgaacacgacatcatcgtaacccgcgcgattaacgatacgggattgcagaggctgcgtaagcgaccgctctccgcgttatccggtggtgagagacaacgggcggcgctggcgcgggtactggcccaggcgccaaaactgctgctgctggatgagcccaccaaccaccttgatccccacggcagagtggagctgctgtcattagtgaaaagccagggaatcacggtcgttgcggtattgcacgatctttccctgattgacgcctttgccgatcgggttttgcttttatcgcaagggcgcgccgtggcctgggatgtgccggagcgcgtgcttgtttcacaacggctttacccggtcttcggcttgaccagctttaccgtaccgcatcccatgaccgggaaggcgctgcggatttttgaggtgccaggctatgcctga

SEQ ID NO: 178740 - DNA, 477 bp, Klebsiella oxytoca
atgaaacaaatgacgttgagtgaccttcggcaacaaagcgaacaggctgtagcttcgcctcgcttgcgtgcccatcgtaatttccaccctgacttaagcgatccggtgcaacgcctggccgtcgctatggagccgggtacctatgttcggcctcaccgccacccgcacacttttgaactgctgacatcccttagcggacgttttgtggtgttgacctttgatgatgctggcaacgtgaccgagcgcgtggtgttaggcgaagagtgtaaggtgctggagatggcggcgggtacctggcatgccgtgctgtcgatggataaaggcggcgtaatttttgaggttaaatacggtggttaccagccggtttctgagcaagacgcggccccgtgggcgccagctgaaaacgcgccgggaaccgccgagctaatgaagtggtacgcccaggcgcaagtgggtgatggcggttttaccctgtaa

SEQ ID NO: 178741 - DNA, 792 bp, Klebsiella oxytoca
atgtctaaagaacgtcgtctctctcgcattttcgcaaaagatggtaaatccgtcacgctggcgctggatggctactatttttcaagcaaaacaaatggtattgataatacgataaatcagcttccggcccttgttgaaagcggcctggactgcgcgctggtcacttatggcatgttgaaaaatttccgcgaagttttcaattgcgttcccgttgtattacgcgtcgatagcacagtgaatatttttgataataccgttcccgatacgactcccgtcttttccattgaggatgcgctgaaagtggctgcggaaggcgtagtgtgtatgaccttccccggcgcgttcaatgaagagaaaacgcacatcatggcgatgcagctggcgcaggccgccgatcgctggaacgtgccgctgatcgtggaatccctgccgtacggctatcccgtgaccagcgacgactccaacaacccggccgttatcgccgcctcggcccgcatcgccgttgagctgggggctgacgtgatcaaaacccgctttaccggtaccgaagatgatcggcttatcgtcgaagcggccggcgtgccggtactcgcgctgggcggcccgaaaaccggcatcgacggttattttaaatttgtgcagcactgtatgcaggtgggtgcaaaaggcgtggcggtgggccgcaatattactcaggacccacagccggcaaaagtagtagcaggtctgaacgccatcatccatgaaaatgccacagcggaagatgcctacagcctctacatggctaaataa

SEQ ID NO: 178742 - DNA, 141 bp, Klebsiella oxytoca
atgaaaaacaatccatggttcgtgcgtttgcgtaatacctctattccgcagcataagctgcgtccggcgaaatggctggcgctgattgccctgctgctgctgctggtgcagttgacgatagagtttttactcttagcataa

SEQ ID NO: 178743 - DNA, 954 bp, Klebsiella oxytoca
atgaccaaacttcgcaaagcatggctggctgtcgcggttagcgcggtaatcaccaccatgacagggtttattcccgcagccagcgccgcgccgcaggatggcaaaaaaatctcccgcatcggcttaatggtgcaggacatgtccaaccccttcttctcggcaatggaaaggaacgctaagcaggccgcggcgcaaatcggcgcaacccttaacgtacaggatgcgcaggtcgatctggcaaaccagaacacgcagattgacgcgtttattcagcagaaagtggatctcatcattatttccgccgtcgatgagtccgggatcgagccggccattcagcgggcaaaagccgccggaattatcgttatcgcggtcgatacgcccgcgaaaggcgcagacgcggcgatcatgaccaacgccatccaggccggggaaacctcctgcgaatacctgttcagccagatgggcggcaaaggcaaagtgctgctggtggatggcacgccgattcagaccattatcgaccgcatcaaaggctgtaaaaacgtcgcgcaaaaatacccggatatcaaaatcgtcggccagcaggcatcgcgcaacgaccgcgcttccggcctgatggtgaccaccgacatgctcacggccaatccggacgtcgccggtattttcggcatgaacgatccttccgcgctcggtgcggtactggccgttgaacaggcgggcaaagcgggcgcgatcaaagttaccggcgtcgacggtagcccggaagcggttgaagaacttaagcgcagcggctcgccgtttatcggtaccgcaacgcaaaatccgggcgaaatggtgcgccaggccatcacgcttgctcaggatatggtcgacggcaaaccgatcgcctctcataccgtcctgatccccagcgtactggtcacccgcgataacgtcgacagctatccgggctggtaa

SEQ ID NO: 178744 - DNA, 627 bp, Klebsiella oxytoca
atgaaaattacatggaacgtcaggccagtcggctatcagctgattagcaagtgctgccccgcctgtcatgggcagcaggatttcaccccatccggcgccttccgggtcaactcgcaaaaaaaagtgctcgatgtctggagtatctataagtgcgtgcgctgcgcgtatacctggaacatcagcctgttctcgcgtttgcccgtcagcaaaatcaatccgcagctctacgcgcgacttatcgctaacgataaatctgccgtcgaggcttactctcacgatccggtcgttctgcggcgtaatcgcgcggcgctatcgggtacgcctgactttgtggttcaggaacgctggcgcatcaaccttgttcgcgcttctcaggtgagggtggatgtcagagtcacgcgcgcctttcagaccagcctgctgtcggtcctgagacgagcgctgcggcttagcggtagcgcgatccgtcaacgtcttcaatcgggagatatcgtcggtattacgctgaaagaactgcgggcgcccaggctgcggccggagggatatacgctgtacatcacgagggaggttctcctggcgcgcaggcctatttcattaaacgcgggctcagcgcgcgggagacgatag

SEQ ID NO: 178745 - DNA, 609 bp, Klebsiella oxytoca
atgtctatggatacgcgtaaagaagtgctgtttgtcctcatccaggagtacgccgactgggagttcgcgctgctggcaccggggctgcgccgcgggtttggcgtatgggaaccgcgatacgaagtcagaaccgtggctgccgatgaggggccggtgaggtcaattggcggggtgcgctgcctgccggattataccttcgagacgatacccgatgattacgccgcgctggtgctggtgggcggaatgaactggtggggagaggaggcccggcgggttgtacctttggtagaacaagcgcaggcccggcagattgtggtaggcgcgatatgcgacgcttcggcctttcttggcgcgcatggctttctcaatgatgtcgaccacacctcgaacgggctggcctacctgcagagccgggcggggtcagcctacagcggcgccgcgcggtacagaaacgtgccttcggttcgcgacggtaacctggtgaccgccaacggcgttggctttgtggattttacctgcaatatgctttctgccttaaaggcggcccgccagcaagagatcgaagccatgagggagacgttcaggtcgggaatgtttacggaaggctga

SEQ ID NO: 178746 - DNA, 600 bp, Klebsiella oxytoca
atgttacctgattgcgataaagccatcgtcctgctgcatgaaatctacggcatcaacgcgcatattcagcgatccgccgcgacctggcgcagccgcggcttcgatgcgtacacgccagcgcttttccctcactctgcgccgttcgcctatgagcagcaggagcaggcctggcgccacttttccgataacgtcggatttgataccgccgccatcgtgtcgctgctggccgagctaagagcgaaatacggcacgctaatccttatcggctacagcgtgggcgccaccttagcctggctggccgccagaagcggactctgcgacggtgcggtttgccactacggttcacggatccgccagtactgcgatgcggcgcctccgtgcccaacgcaggtgattctcgcccgccatgagccggcgttcgatccccgcgccctgcaaaacgagctggagaaatatccctccgtggcctgccggatgttcaatgcgcagcacggcttttgcgatgccgacagtccggcgtgggatgcgcgccttgcgcagcaggcggacgaagacacgctgcggtttttaacgcttattcagcaaagacaggaggcctga

SEQ ID NO: 178747 - DNA, 597 bp, Klebsiella oxytoca
atgaactattcgcaccgctgtattcccggtctgttctggcttttggccgtcagcgcatttctgtttagctttacctctaccagctgtgccgcagagtcgaacacgctggttatcgtctctcatccgtatcctgagcaatcggtcatgaccaaaggtcttgaggccgcagcgcaaagcgtacccggcgtgaacgtacgcaatctcgaggcgctttacggttttgacacccgaaatatcaatgccgatgaagagcgacggctcatgcgggaacactcgcgcatcgtttttatcttcccgacccactggttcaacatcactcctatgatgaaggcctggctgaacgatacctggggcagcgtagggccgggagtatggcagggcaaagagatgctgattgtcacgacggccgcaggcggtgacgcgacatacggcgagaccgggcgaacgggcgtcagcctggccgacgtctttacgccaatgaaggccagcgcgctgcatgcgggaatgacctggctgcctccgctggtttttcagcgtgccagccgcgatcaactgcctgaataccagcgtcaactggtggaaaggctgaagaattaa

SEQ ID NO: 178748 - DNA, 429 bp, Klebsiella oxytoca
atgttcaactctcttagcgccacgctattgatttttattgctacgacgggggcggcatttgccgccgggcgggagaacgcggtgaagattcagtttgagttcaatggcgtcacggttgtcggctcgctggatgagagcgcagcggctaatgagttcctggcgcagctgccgatgacggtgaagctcgaggattatggttccacggaaaaaatcgcctggctgccgacgaaactgcgccgcgcggattctggcgcctcaatgaccccacggcgcggcgacatcgcctattacgcgccgtggggcaatctggccatttttcgcgaggattttcgccactcccccgggctgataagcctcgggcggatagaggagggactcgccgcgctcgaccaggcgggagccgaaacggtaaccatccggcgttattaa

SEQ ID NO: 178749 - DNA, 1056 bp, Klebsiella oxytoca
gtgaataagataccgcaacccaaaatcgccctggtcgccggcgccagcggcattattggcagagaactggtgaaaacgctgttacgcaatcgctgggaggttatcggcctcagccgctatgcatcgtcccacccggaaaacattcccttcattcacgtcgatttactggatgcgcagcacagcgcgcaaaaactgcattcgctcaacggcgtcacccacattttttacagcgcatgggccaacgccgggaagtgggcggaaatggttgaaccgaacgtcaccatgctgcgcaacctggtcagcaacatcgagcaaaccgcaccgctacggacggtaagcctgatgcagggatacaaagtgtacggcgcgcatcttggtccgttcaaaaccccggcgcgtgaaagcgatcccggcgtacccggggccgaatttaacgccgctcagctcacctggctcagccatttccagcgcggaaaaacgtggcgctggaacgcgatcaggccgggcgtggtcggcagcacggtgcccggcaacgccatgaatctcgcactcagcatcgcgatctatgcttcgctatgtaaagcgcaggatctaccgctgcgtttccccggttcggaaaaaacctggcacagcattgtcgatcacacggacgccgggttgctggctgatgccacgctctgggccgcgacctcgccaacggcgcaaaaccaggcgttcaacgtcaataacggcgacatctggcgctggtgcgagctgtggccgcgcatcgcgagctggtttgaactggcatccgccccgccggtcagactgtcatttcaccagctgtttgtggattaccgcgcgcactggcgcgaactggccgggcagagtctggtggaagcggacatcttaaggctcagcgacggtaaatttgctgatttcgtctttggctggaactacgacatgtttggcgatggcagcaaactgcgccgggcgggcttcactgaaatgcaggccaccgacgatatgtttttctgcctgttcgctcagctgagagccgcgcgcattatcccctga

SEQ ID NO: 178750 - DNA, 888 bp, Klebsiella oxytoca
atgaataataagctcaacgccattgccaccttcctgcgcgtggtagaagcgggatccttttcagcggcagcccgccagtgcgggatgaaacaatccgccgtcagtcagcagatcgcggcgcttgaggaggagcttggggtggtgttgctgcaccgaaccacgcgtgcgatggcgctgaccgagcagggagaaatttaccggcgcgatatgcagcttttgctggaagcgatgcatgaagcggaaagacgcttacagccaaccgatcgccagtggcaaggccgggtgcacgtgcagctgccgagcggcctggggcagctctttttgccgcatctgctggcgctgcagaaaatgcaccccgagctgcgtctgacgctttctcttgatgaccgcattgccgatctggttgctgaaggagtggatgtcgcgctgcggttgagcagtgaaccgccgccggggagtgcggcgcgcgtgctggcgcgtattgaaactgcgctctttgccgcccccggttttaaaacggtgcatgccgtcagcgagctggccgcccacccgcacgtgcggttcagcggcatcgcgcaggacgcgccgctgcggctggtctcgggtgataaaacggttgatatgaaagtcaataccgtgtttcgggctaacaccagcgaagcgctgctgcaggcgttagagtccggcatcggtatcggcggcatgcagttaccccttgcggcccacgctttgcagtccggcaggctggtaccggtattacccgcctggcgattacccgatcgcgttctctatgcggtctatccagacgcccgctttatcccaccgcgggtaagaagtattatcgacgtgattgaacaattgctgcctgagatgacggagcgtgtctga

SEQ ID NO: 178751 - DNA, 669 bp, Klebsiella oxytoca
atgaaccgctatgaaaaagagtatcggcagttgctggcaaatggcgctatcgcctgggctggcgaaggttatttccgggccaaagaacagcaggagcgcgtttttagctggcttcatttacagcactatttcccccaacccggcgcgcctgtccttgaactggggtgcgggaatggcgcgatggccgcgcagtattttgcggaacgaggctattcggtgtgggggatagattggtccgaaaccgcgatccgatgggcacaaaatcgttttcagcaagcgggtctcccggcaaatttttttgtcggagatgtctgccatattcatcagtgtcaggatgcgacgtttgagctcattgttgatggcagctgtgtgcattgcctgattgacgatgcccgccacctctgcttcgccgaagtcagaagattactgaaacccggaggacgactggtgatcggctccatgtgcggaaccccgcgtcatgccgaggatattctcgcgtacgatcctatccgccatcatttacttaaagagggcaaaccctggcgtacgttgcgaccgctccaggccctgctggacgagattcgtgcggagcaatttacggttcttgaggtgaatattaatgagaacgcatggtgggatcatgccaccgtggtatgtagagtcgattaa

SEQ ID NO: 178752 - DNA, 231 bp, Klebsiella oxytoca
atgcccttcgtcaatgtacaaaccattaaaggaataatgaacccggagcaaaaaaaagagcttttacgccgcatgaccgatctgattgtcgaaattgaagggaaaggcgatcccgagttccgccgttcagtctgggttcgcattgatgagcatgagccggaacagtggagtctgggcggcatacagcccacggctgaagcgatcgcggcaaaattttcgtctgctcaatag

SEQ ID NO: 178753 - DNA, 468 bp, Klebsiella oxytoca
atgtcaaaaaataattcagttgcctacctattaccggagctttgcgggctttctgcggcagcggaaatcctgggagatcggtgggttttgttgattttaagagaggctttctacggcgtgacgcgctttgaaacgatccgctcgcatacaaaaatgcctaagcagacgctggcaaaccggttaaagaaaatgacggaactgggtttactgagcaaaacgccttatcaggaagaaggcgtgcgcgaacgttatgagtatatccttacgccaaaaagccgcagcctggcaccgatcctgttttccctgatggcgtgggggcataaaaatatcctgcatgatgaaccgcatattgcgctggtggataaagagagcggggacgtcgtccacaatgcatttgtgacgacgaaaggcaccgttgttgaacctcggaacatccagatagtggctctgaaccttaaccagccgtag

SEQ ID NO: 178754 - DNA, 1071 bp, Klebsiella oxytoca
atgacatcacctgcgattacgccttctaaaccgacggataagcaggcgccaacggtagcggaagaccgggacaagttagtggctggggccagtaagaatccctctttacccgatccccagattttggggcgctggtttaaggcgttaaggcaacatgcgtcactgagtcccgcagagattgatttacgcgaaaatttccagctatcgcgcaatgaggtagagagattgaaggctcaactcgctttgcgacaccgtgaagtacagcagcagttcgttgccctccaggcggcttctgaacagctcgccgcggcaatggagaacaatggcaagcaacaacaggagctccaggcgctcaccgtgcgtgccaatcagctggaagagaaaaatgcgcagtggcaagtagtaaccagaaaattgcaatcgagccttaagcaagcacagcatcccgcactgccggcaaccgacgatgaactggccgattttgccgccgggatggcgatggggtttgacattttgggcgtactcgaacagcggaatgaacaagatgttcatgttgataaggcggcctttctggccggcattagcgaaacgatacgcggcgaacgccggttatctcaggaggaatttgagcgccatcttaaccgcgccaatcagcgagtcgaggttgcgatgcacaagatcaagcagcaaaaggaagcgcgggataacgcatggctggagaaatttcgccaggaggagggcatacaaactgcgggtgagcaggcctggtataaagtcatccatgcgggtgagccgctgttcgaggatgagcactctgaagcggcgctaaccatttcggtcaatcgccgtctgtcagatggtaccgtgattgcggacaccgatctgacgggtctggtattacaggaaaagttgtccgatcttcctgaatggcttcagattgtggtgaaggatattcgtcttcatggtgaagcagagttagccgttaaggttgatgagtatggcgatcctcgaaaatacgggaattatattgaacattggcgcatccgggtaattgaattgcatgcaatgtaa

SEQ ID NO: 178755 - DNA, 756 bp, Klebsiella oxytoca
atgaaacttaaattaacgtcttttctgggtattctactgtttaccggaagccagcattcagctcaggctgcattatctgtggaacgctcccgggttattttcaatgaaggggagaaatctgtcggattgagcgtgaaaaataataatacgcaggatccctatctcgcccaggggtggatggaaaacgagaaagaagaaaaaataaacggccctctgatgattttaccgcccgtacagcgtattgagcccgacggtagaacgatgatcagggtacagcaggttgcggatgcctcttcactgcccaacgacagagaaagcgtattctggcttaacttacgcgagatcccgccaaaatccgacaagcctaacgttctgatgctggctatgcagacgcgaatgaaagtgttctggcgaccaaaggggattaaggtggatcccctgcttgatgcggtgcccggcgtagaaacgctgaccctcgctcgtaagggggaccgctatgaggttaataatccgacaccgtaccatttttcatttgttgaagcgcgtgacagcctgaacggaaaagcgctggacgatttcgagcccgtgatggtttctccaaaagataaagcggcgctgacgctacccaccttgcggttgggaaataatccaacgctgatgtttattaatgattatggcagcgcgcgattattaccgtttacctgcaccgggacgctgtgccgggcgggaaaagtggcactaccaaaggaaggctga

SEQ ID NO: 178756 - DNA, 519 bp, Klebsiella oxytoca
atggcgcagggaaacaacatgatgaaattgagcggatatgcccccttgctgttggtcggcctgatgatgacgtcatctcttcaggcggcagacccggaaaacctcgagtttatcggcactctggtgacgccaccggcttgctcaataagcgaaggcggccctgtgtatgtggatttcggtgatgtccgaataaaaaaaatcgtggagggaaaataccgtgaaaccgttccactaaccctgaaatgtgaagacagcacccttgcatggcagctgcggcttagcgtacgcggtaacgcggccgggtttgatgccgacaatgccaccgtggtgacccctgagcaggccaatcttggcgtgaaaatctaccagaacggccagccgtttaagctgggcgaggccatcaacatcaatagcgtgacgctgccgagtattgaagctctccttgttcagcgcaacggggtggagttggtggaaggattatttagcgccaccgcaaccctgcgggccgaataccagtaa

SEQ ID NO: 178757 - DNA, 3066 bp, Klebsiella oxytoca
atggctaatttaacccgtcgtcagtggctcaaagtcggcctcgccgcaggcggtctggcgtctttcgccctgagctatcgcgaggtggcaaagcgcgcccttgacggcctgctcagcggtacatccggtaaagtgacccgcgatcgtattttcgctaatgcgctgatcccggaagccaatgcaaataccggctggcaacaaaatcctcggcaggttatctcgatgacccaatgttttggctgctggacgcagtgcggcgttcgggtgcgggtggatagcgagaaaggccaggtactgcgcattgccggcaacccttatcacccgctttctcatgagcaccacctcgactcttccattcctttttcaaccgccatggcgcagctggcgggtgaaagcggacttgatgcccgctctaccgcctgcgcgcgcggcgccacgcagctcgagggactctatagcccgctgcggctccttgagccgatgaagcgcgcgggtaaacgcggcgaagggaaatggcagcgcatcagctttgaacaactggtgaaagaggtggttgaaggcggcgatctgtttggcgaggggcacgttgatggtctgcgcgcgattcacgatccgatcgcccccgttgacccgcggcatccgggattcggcccaaaaaccaaccagctactggtcaccaacaccagcgacgacgggcgcgatacctttttacgccgttttgcgctgaacagcttcggcagtaaaaacttcggcgcacatggttcctactgcgggctggcctatcgcgcgggctccggcgccttaatgggcgatctggataaaaacccgcacgtgaagcccgactgggataacgttgagttcgccctgtttatgggaacgtcgcccgcccagtcaggcaacccctttaaacgccaggccaggcagctcgccagcgcccgcctgcgcaatgactttcagtatgtggtggtcgcgccggcgctgccgctcaccacggtgatggcagacgatcgcgggcactggctgccggtgatccccgggagcgattcggcgctggcaatggcgatgattcgctggattatcgaaaaccggcgctacaacgccgattacctggcgctaccgggcgcgcaggcgatgcggcaggccgctgaaaagagctggaccaatgcgacacacctggtcatcaccgatgaccagccggagctggccggacagcatttaacccttgctcacctgaatgcggagggagccagcgaaccggtggtggttaacgaaagcggtgacgttgtcgccgccagcggctgcccgcgcggcgcgctctttgtaacgcgccagctaaccctgccggacgggcgcagcgtgacggtcaaaagcggcttccagctgctgaaagagtccgctgaaaagctcaccctgacacagtacagccagcagtgcggcgtcgcggaagataagatcgcggcgctggcggatgcctttacccgtcatggtcgtaaagccgcggtcattacccacggcggcatgatggccggcaacggattttacagcgcctgggcggtcatgatgcttaatacgctaatcggtaatctcagcctggaaggcggcgtgtttgtcggcggcggcaaattcaacggcgcgacagacggcccgcgttacaacctggagagctttgccggtaaagtgaagccgaaagggctcagcatcgcgcgcagcaaaaccgcgtatgaatcctccgaagagtatcgcagcaaggcggcggcgggcgtctccccctatccggccagagccccgtggtatccgttcgtcgccggacagctgaccgagctgctgacctcggcgctcgaaggctacccctatccgctgaaagcgtggatttccaatatgaccaacccgctgtacggcgtgcccgggctacgcgcggttgcggaagaaaagctaaaggatccgcagcggctgccgctgtttatcgccattgacgcctttatgaatgaaactaccgccctggccgactatatcgttccggatacgcataatttcgaaagctggggattcagcgcgccgtgggccggcgtcgccagtaaggccaccaccgcccgctggccggtcgtccctgccgccaccgcaaaaaccgctgacggtgagccagcgtcaatggaggcattttgcattgcggtggcgaagcgtcttaatctgccaggatttggcgaaaacgccattaccgatgctcagggtaaccgctatccactccaccgggctgaggactattacctgcgcatggccgcgaacattgcgtttctgggtaacgcgccggttgccgaagccattagcgaggatctgacgctgaccggggtgcagcgtattctgccggttatcaaccagaccctgaaagcggacgaagtgagccgggtagcctttgtctactcccgcggcgggcgcttcgcgccggacacaatcggtcgagcggagaatcgcgtcggtcaattgtgggaaaaaccgctgcaaatatggaacgcggaggttgccgcccaccgccacgccatcaccggcgagcgctacagcggctgcccggcatggtatccggccagattgtccgacggacgcgctgtcgaagcgcttttcccgcgacagcagtggccgctgaagctgatctcgtttaaatccaataccatggccagcgcctcgacggtgatcccgcgcctgcatcaccttaagccgaccaatctggtggcgctgaatccgctggacggccagcgctacggcctggcgcacggcgaccgcgtacgaatttccacgcccggcggccaagctgaagccgtcattagcctgttaagtggcgtgatgcccggcgtcatcgcgattgaacacggctacgggcatcgcgaaatgggcgcggcgcggcacatcctcgacggtgagcccatgccgttcgcggcgcagattaaagccggcattaaccttaacgatttgggatttgccgacccaacccgcgaggtcagcaatacctggctggactgggtctccggcgcggcggtgcgtcaggggctgccggcaaggattgagcgagtgtag

SEQ ID NO: 178758 - DNA, 1023 bp, Klebsiella oxytoca
atgagccaaaccatgatcattgaggaagtgctggcccgtccgcaggaggtgagctggctaccgtgggcggtgcagtatttctttttcatcggcattgccgcctgcgcggcgctgtttggctgcctgcttcactggcgcaaaagacacgatgcgaagctggaacggctgacgctgctgattgctctgacctgcgcgattaccgcgccgctggcgctgacggcggacctgcatcaaaccgcccgcttctggcacttttacgcctatcccacgccctggtcgtggatgccctggggggcgctgtttctgccgctattcaccctctttctgggcctgtggtttgcggtacggcagttaggtctgctgcgcaatagaagtgacagcgtcacaaaatggctggcgctggccagcgcgcttaccgcgacggggctgctgctttacaccggacgcgaagtctccgtggttcaggcccgcccggtctggttcagctacgcctttgtgctggcgatgttctttagcgcgctgcaaacctttttcgccctgctgattgtcgcggtacgcaatgattttcaatgccaaaggcagttggcgatatggcagctctcagcgcttatgctgctggccgtcatcgtggcgatctgggtcagcggtgataccctttccggctcggctattcgtcagtggctggtcatttcgccttcagcccgtcattacgcgatcggctggctggcatgctggcttatttcattgatcttttgcgcgcttgccctgcgttatccactgacgctgcccgttcgtgccctgctggccgtcagcgccatggcgctgagctggctgatgcgctggacgctgctgattcaggggcaaaccatccccaaatttaatgcccagtttaatccctataccctgccggtcggtaccgacggctggctcgctatccttggcaccttcggcctgtggattgcgctgctcattattgtccgtgaaaccgtaaacggactcgcaaggagaaggcaacatggctaa

SEQ ID NO: 178759 - DNA, 729 bp, Klebsiella oxytoca
atggacagcagtaaacgacagtttctggcgcagctgggcgttctcaccgccggcgcgtctctggtgccgctggcggaggcgaaatttcccttttcgccggcccgccgcgaaggcgcctcacgccaccgctatgccatgctggttgacctgcgacgctgcatcggctgccaggcctgcaccgtcagttgcgcaatcgaaaatcagacgccgcagggggcgtttcgtactcacgtcaatcagtatcaggtgcagttgggcgatcgggtcaccaacgtcctgctaccgcggctgtgcaaccattgtgataacccgccctgcgtgccggtctgcccggtgcaggccacctttcagcgccaggatggcattgtggtggtggataacacccgctgcgtcggctgcgcctactgcgtccaggcctgcccctatgacgcgcgttttatcaaccatgagacacaaaccgccgataagtgcaccttctgcgttcatcgcctggaagccgggctgctccccgcctgcgtcgagtcctgcgtcggcggcgcgcggatcgtcggcgatatccaggaccgtcaaagccgtatctcgcagacgctcgccctgcaccatgacgccatcaaggtgctgaagccggaaaacggtaccgtcccccacgttttctatctcggactggacgaggcatttgttaccccgctgatgggacatgcccaacccgcgctctggcaggaggtatga

SEQ ID NO: 178760 - DNA, 1773 bp, Klebsiella oxytoca
gtgagagcgaaaaaggtgcagcgtctggcgctgctggtgacggcgctcctgctgaacagcagcgggtgggcggcgtcgtggaatatcggcgttctggccatgcgcggcgaggtcttaacccgcagccactggcagccgctggaggtgatgctcaatcagcagctaacggatcagcagtttcacattcagcccctcgatctgcagcagatgcaggaggcggtcaataacggctcggtgcagtttgtggtgaccaatccggcgcagtttgtccagctgaatagtcattcttcgctgcgctggctggcctctttgcgctcttcactcgggacaagcaacgttatcggcagcgtcattttgactcgtcgcgacagcggtatttcgtcgccggccgacctgatcggcaaaacggtaggggccatcgatcctcaggccttcggcggctatttattgggatacaaggcgctgagcgatgccgggctgcggccggaacgcgatctgcatctgcgttttagcggattccccgcggatgcgctgatctatctgctgcgtgaacgggcagtgcaggcggcgattgttccggtgtgcctgctggaaaaaatggctgatgagggactggtaaataaagccgattttaccgcggtcatcgaggggccggcggcgataccttgtttaaccagtaccccgctgtatcccgactggtcgtttgccgcgctgccggcggtgagcgacgcgctggcggatcgcgtgacccgcgccttgctcaatgccccggataacgccgtctttcactggggcgcgcccgcttcgacacgtcaggtggaagcgttgctgagcgaagttcaacagcaccctcagcagcgacggctgtggctggaggtgaaaaactggcttatccagcaccggttaatcatgggcggcatcgggctggcgctgctgttgctgacgctgaattatatctgggtgatgctgctggtgcggcggcgcggcaggcagcttgaacgcaacgctatccggctgcgcgagcaggagctggcgctgcaaacggcaagacagatgagcgtattgggtgagatgacctcaggctttgcccatgagttaaatcagccgctttcggccatccgccactatgcgcagggttgtacgatccgtttgcagaaacaggatccgcagcatcccttactgcccgcgctgggccacatcgatcaacaggctcagcgcggggcggaaacgctgcgcaatctgcgccattgggtcagccaggcgcacggggagccaggacgagcggagacctgggaacgtatcagcgttcgtcaggctattgaccatgtctggcagtggctgcgaatgccgcagcagtttcccgggctgttgctcaacagcgatgtcgatcgcccgttaacgctcgtcttaccgccggttctgcttgaacaggtgctggcgaatctgatcctcaatgcggcgcaggccggggcgaagatgctgtggattgatgccgttcgcgatgccggaggcgtgaagatcgtcctgcaggataacggcggtggtatcgccggggcgcagcttgctcaggcattccagccgtttgtgaccagtcgacaagaggggatggggcttgggctggttatctgtcagcggctggtccgctatgtccggggggaaataagcctggcaaatcaaacggcgcccgatggacggcccggtgtcaccgtggaactgacattcatgcaacaaggagcgcggagcggcaatggcgataattcatctactggatga

SEQ ID NO: 178761 - DNA, 588 bp, Klebsiella oxytoca
atggcgataattcatctactggatgacgacctggcggtgacccaggcatgtgcttttttactggaaagcctgggttacgaggtaatgtgctgggcagagggggacgtcttcctcgcgcaggccgatctcttccggaccggcgttgtcctgctggatatgcggatgccggcgctggacggtcaggcagtacatgaggcgctgcgtcagcgcggcagcaccctggcggtggtttttctgaccggacatggcgacgtacctatggcggtagaacagatgaaacgcggcgcggtggattttctgcaaaagccggtgtcggtgaagccgctacaaacggcgctggaacacggcctggcggcctcaggcgagcggtttgcgcggcaaaagaacgtggactgctatcagcagctaacgcccaaagagcgggagcttgcgctgctggtggtgaaagggctgatgaatcgggagattgcggagataatgaacattgccgtacgcacggtggaggtccatcgggcgagggtgatggaaaagatgcaggcggggagtctggcggagttagtcagcatcttacagccggttatcgcgtga

SEQ ID NO: 178762 - DNA, 1059 bp, Klebsiella oxytoca
atgtctaccgcatccctgaagcaggccgcgcgccgcgcgctggtcatttcgttttccctgcatgctctctccgcctcggctaaggatttcaccgagcgggacttccgcgctcaggctctcggccacggcgtttacgagctggcctatgataacggccagaagacgctctacgctgcctccgcgccctcgtttgataaagataaaaccgcgggactggtctttcgactggcggcggattctctgcggattgatgagaaaatcgttaccgaacgccgcgccttcgcgctctccctggatgaagaaaatcacatcctgtatttgggtaacgcgctggatggctcgctaacgcttctggatacgctgaccaataaggtgattaacactattcagctcagcgatgattcagatcctgcgaaacaggcccacgtccgcgaagtggtgctggataagctaaaccagcgtttgtatgtgtcagggatcgggcgcaaaggccagggcctgctctgggtggtcgatacccgcaagcagcagctgattgacacgctgaagaacatcgaccccgtagggtttgccgttgatgcatcgggcgaaaaagtctatgcggtcaccggcaacggggagttggctacccttgacggcaaaacgtcgacgttaatttcccgcgtgaaggtcgatccggctgacgctgagcactatttcctcaatatcgccctgaacagcgccgccggagtcggatatatcgccgataccaacacccgcgatgtgctggtggtgcggctggactccggcaagctggtcgatcgtatcgcttcgccaaactcggtcgctgtgctttataacgccatgcgcgatgaaatctacgtgacccatcgcaacgatcgctcgattagcgtcatcgatgcgcgaacccatcgtctcaagcacaccctcaaaacggcggctatgcccaacagcctggtcctttctgcggatggcggaacgctttacgccagcgtcaaacaggacgaaaaaagcgatcggcctgactacgttctcaagatcgatctcactcaattctaa

SEQ ID NO: 178763 - DNA, 1992 bp, Klebsiella oxytoca
atgaagacacgcatagacgtggcgatggcgctcgccttcgtcaatctgcccgcggcagcctacgccgctgatggcgcggggataaatgaagaacagatggtagtgaccgccacgggattcagccaggagaggcgcgaggcgccggcgacgatctcggtgctcgatgagaaggcgctgaatacccgttccaatcagaacgtcacggaagcgttgcgcgagatgccgggcgtgctggtgggcaacggccacggtagcctggcgaccggcgatgtacagatgcgcggtatggattcgacctatacctcgtttatggtgaacggtatcaagcagtctacccgcgaatcgcgaccttatgggcatcacattgggtctgaagccgcttttatgccgccgctggccgccattgagcgggtggaggtgattcgcgggcctatgtcatcgctgtacggctctgacgctatcggcggtgtggtcaacgtcatcaccaaaaaggcgtataacctcgaaaaatggacgggggtgctggaggataattacttcctgcaggagaaaagcgaatacggcaatactaaccagacaaacgccttctttatggggcccgtcgtaccgggcaaactcggcgtcagcgtgggggctgactatcttgaccgtcgcgatgatgacagcccgacccaggaacgttttgttaagcatcaggcggggaatctggacgccacaatttctctttcgccaaccgatacccagctctgggatctgaacgcctccaaaggcaatcaggagaaaacccataacgataaagcgtggtactggggctttgaccgcgatgcggtctcgctgtcacagcatgcctggtacggtgatgacctggtggaggtgaagaactttatcagctacgaaaaggcccgcacggagtaccgcgtgcccggcatggactcgcagtttatcaagcagaataattttgaggccaatagcgcgaacacctttacgctggccgatcacaagctgacgctaggcgtaaacttcacgcgcaatgagctgaatgacacctttggtattgcggacaagcaggcgcccggcgtcaccccggtgagtaaaatcacccgtcacggctgggcggtttttgctgaagacgcgtggatgattgtaccggacttcacgttgaccacctctgcgcgcctggatcatgacagctattttggctatcacgttacgcctaagctctacggcaactggaccattgacgaaagctgggcgctgaaaggtggcgtatccgccggctataaaaaaccggacctgcgccagaacaacgccggctttaccagcgtctacggcgcttatccctattctgagattggtatcggcaacgacgatctcaaaccggagcagagcatcaacaccgagctgggcgtgtactggcagcaggatgcgctggcgctcgacgccacgctttttcataccaaatttaaagacaaaatcagcgaccataccatctgtaccgcctcggctacccggcaatgccaatacaacggctataccgcggatagcgtgtcgcaatacattaacgtcggggatgcggagatctacggactggagctgaacggcgactggcaggtgaccgcagcgctgaaagcgaacgccaactatacctatacccacagtgaacaaaaaagcggtgagtataagggttatgcgctaagcgatttccccagcagtatggccaacgtttcgctgacgtggaacaccgcttccgatcttgaactgtggaccaaggcgagctggcgcagcagatcgccggatatcggcaagtccagctcaacggatgcctatgcgctggtagatctaggcgtgcgttatcgcctgagtaagcacgtcacgctgatgagcggtatttacaatctgtttgatgtgaacccggtttacactaccgcttaccggcagaaggcgatgctggaagggcgacgctataatttcggcggccgcgtggagttctga

SEQ ID NO: 178764 - DNA, 429 bp, Klebsiella oxytoca
atgtccgtgaaaatccgcccggtgctcatttgcactctctctttacttctttccgcctgctcgggtagtgcttctgcgccggatagcgccgaagacgcgaaagtatcggcagaagtggataagatgtttcgcgattatcaaacgggttcagatcaatcaccgcaggccaacgtctcacgctatctgacgcaggttcagagggctatcttcgcgaaaatagaccagccggcgtcctggcaggggcaaaaatgctcggtgcgcttaacgctacagcgtgacgggacggtgcataatccagcggtcgagagcggcgatccggcgttatgcgcggcggtaatgtccgcgctgaaagaagccaaaattccgcccgcgccagatgaaaaaacctatcagacattcagtcatgtggttctggacttcaggccctga

SEQ ID NO: 178765 - DNA, 1113 bp, Klebsiella oxytoca
atggccgccacccttgagctcgcccggcagctgctgggctttaacaccatcaacccgccgggcagcgaagcagactgcatgcggttcttcgccgactggcttaacgatcgcggttttgcggtttcgctgtcgtcgttcggcgagggacgctgcaatcttatcgccaggctgcccggggcgaagaccggtaaaccgctggcctttaccggtcatctggataccgtgccgctgggaaatgcccggtggcagtacgatcctttcggctcgcagatagaagacgggcgtctttatggccgcgggtccagcgatatgaaagcggcgatagcggcgtttgccgtcgcctgcgttcatcagcgggaaacgatcctctccggacgcggcgcggtattgctgattaccggcggagaagagaccggctgcgacggcgcacgggcgctgatcgcctccgcgacgttgccggacgtgggcgcgctgatcgtcggtgagcccaccgccaactatccggcgatcggccataaaggcgcgctctggctacgctgcgaaacgcggggaaaaaccgcccacggcgcgatgccggagctggggataaatgctatctatcttgcggcggatgcgctgggtaagattcagcatttttcccctggcgcggcgcacccgctgatgaagcagcccaccctcaacgtcggacgcatcgaaggcggactcaatattaattccgtgccggaccgcacgcgttttgatgtcgatatccgcagcgcgcccaatttacagcacgccactatccggcagcgcttgaccacgctgcttggcgaaagcgtcacggtatccacgctggtcgacctgcccgccgtactgagccgggaggatcatgcgtggattaagcaggtttatcagcgctgccagccgctgcacgctaagccgattgaaccgcgcgtggtgccctactttaccgacgcctcgctgctgctgcctgcattggccgatccaccctgtattattctcggtcccggcgagccgtctatggcccatcagaccgacgagtactgcctgctcagccggctggaggaggctgagcagctatacggagacattatccgcgactggatggcgtag

SEQ ID NO: 178766 - DNA, 756 bp, Klebsiella oxytoca
atgcagaaaaaaatcttactggtcggtgaatcctggaccagcacctcaacgcacgttaaaggcttcgaccagtttgccaccgccacctggcacaccggcgcaacggattttctggccgcgctcgcggacagtgcctacgccattacctatatgcccgcccacgcggcggcgacagactttccgctgacgctggaagcgctgcagcagtgggatgcgattattctttcggatattggcgccaatacgctgctgctgcatccggacacctggctgaaaagccgccgaaccgccaaccgtctgacgctgctgcatgactacgtggctggcggcggctcgctgatgatgattggcggctattacagcttccaggggattaacggcggcgcgcgctatcgccataccgcggtggagaaagttctgccggtccgctgtctggcgtgggacgatcgcattgaaaccccggagggttgctatgccgaagtgacggaatcccacgccctgttcaatgatattccgggcgaatggccgtggctgctgggctataacgaagtagaaatgcatccggaaggcaaactgctggcgacggtcgccggtaccggtcatccgctgctggccattcgcgagtatcagcagggtcgctcgctggtgtggaccagcgatatgtcggcacactggctgccggaagagtttgctcaatggcccggctatcgccagctgtggattaactgccttgactggctgacggaacgtcgctga

SEQ ID NO: 178767 - DNA, 1080 bp, Klebsiella oxytoca
atgaaaggatcaatttttcgccaccccactccgctgccgcttggcgtcagcagcggttacgtgatgacggtgcttggcccgctgccgattagcgaaatgggggttaccctgatgcatgagcatattctgctggatgcctccggcaaatgggtaccgccctgctgctgtagcgatcgccatcttgccgaaatgccggtgaaaatggaaaacctcggcgaactgtcgctgaacccgctaatgagtcgcgataactgccagctgtttgacgtcgacgtcgcgattgaagagctgacgaaatatcgcgcccttggcggagaaacggtagtcgacccgaccaatatcggtatcggccgcgatcccaaagcgctggcgcgcatcgcccgtctgaccggtctgaacattattatgggcaccggcctctatctggaaccttcgcaccccgagtgggtaagaaccagcagcgtcgaacagctgaccgaacggctgatttacgatctgggcggcgcggaggagaaaccggaggtgctcgccgggctcatcggcgaaatcgggatctcgagccgctttacgccggatgaggagaaatcgctgcgcgctgcgggccgggccagcgccgcgaccggcgtgccgatcgaggtccatctgcccggctgggagcggctgggccatcgggtgctggatattctcgaacaggaaggcgccgatttacgccataccgttctgtgccatatgaatcccagctttgccgataagcgctaccagcgggagctggcgcagcgcggggcgtttctcgaatacgacatgatcggcatgagctattactacgccgacgagtcggcgcagtcgccctccgacgaggagaacgcccgcgcgattcgcgaactgattgacgacggctatatccagcaaatactgctgtcgcaggacgtcttcctgaaaaccatgctcacccgctacggcggccacggttacggctacatactcaagcattttgttccccgcctgcggcgccacggcgtcagcggcgaacagcttgaaaccttgatgattggaaatccccaacgggtctttggcggataa

SEQ ID NO: 178768 - DNA, 1002 bp, Klebsiella oxytoca
atgaacttaagcagctcccgcatgatccagcattcgctgccgcgccgcctgctgcataaccactccggcgtggtcagcatcgcgctatttttcgtcttctgctgcgtggtgttttcgctgatcaccagcaactttctcaccggcaccaactggctcaacatcatccgtcagagcgccccgctgctgattgtcgcgacggcgatgaccctggtcattaccaccggcggtatcgatctgtcggtgggctccaccctcgcgctggtcggcgcgctttccgctatcgccctgaataactgggggctgccgtggccggtggttctgctcggcggcctgctgctcggcggattggtaggcgccatcaacggcttctttatcgcctatgaaggcattccggcgtttatcgtcacgctcgccaccctggccgtggttcgcggcatcgcgctgctggtcacccagggctactcgattccggttccggctgacagcctgtttacctttataggacgcgcgtgggtagtcggtatccccatgcccgcgctgatcggcattatgattctggttatcgggcatattgttctcaatcatatgcgctttggccgctacgtgaccgctatcggcgctaacgccgaaggcgcgcgacgcagcggcattaataccaaagcggtcaccatgaaggtctatatcatcagcgggatggccgccgcgctggcggggatgatcattaccgcgcgcctcggcagcggctcctccaaccagggcgaaggctttgaactgcaggttattgctgccgttgtgcttggcagtaccagcctgtttggcggcttcggtaccattatcggtacgctgctgggcgcgctgtcgattgcggtcattcagaacgggctgatcctgtcgcatatttctccgttttacacccagatagccaccggcaccattatcctgctggcgatctggctgaacacccgcattctcaaccccacgcgctccgcggcaaaaggatag

SEQ ID NO: 178769 - DNA, 783 bp, Klebsiella oxytoca
atgcagcagccacaaactaccccgccaagggtggagatgatcaatatcaccaagacctacgggtcgatacgttcattgcgcggagtcaaccttgagctggctccgggcgaggtgctgggcttagtgggcgataacggcgcggggaaatcgaccctgaccaaagtgctctctggcgcggtgatcccctccagcggcacgattcgtatcgacggtgaacagcagcagtttactaatccggccgattcgcgccgctgccatatcgagatggtgtatcaggatctgtcgctctgcgacacggtcgacgtcgcgggcaatctgtttatgggccgcgagccgatgaaatcactcctcggtatccccttcctcgatgaggcaagaatgcacgccgatgccagggagatgctaaaagggctcgggatctccattcccgatacccggctgctggtgcgaaatctctccggcggccagcgccaggccattgccatcgcccgcgcggcggcctttgacccgaaggtgctgattatggatgaacccaccgccgcgctggccgtcgcggaagtcgaagcggtgctggagcttattcgccgcgtttccgctcgcggggtgagcgtgattctgattacccaccgcctgcaggacctgttcctggtctgtgaccggatcatggtgatgtatgaaggtaccaacgtcgccgacagacgggtggccgacaccagcctgagcgatatcgttaacctgattgtgggcgaaaaattcaccgcccgctctgcggctgcacattga

SEQ ID NO: 178770 - DNA, 1023 bp, Klebsiella oxytoca
atggcgcaggaaatgagtataaaacgcgtattgttatccgatgtggcaaagctggcggggctgtcgaaggcaaccctgtcgcgctatatgaacaacagtattgtgctaccgcaggacaccatcgatcgcatcgaaaccgccattcgcgaactggactatcgcggcaatagcctggcacgccgtcttagcaaaggcggcagcgaaacgctcggcctggtgctccccgatattaccaaccccttctttgccgaactggccgatgccgccgaagaggccgcttctgccagcggttacagcctggtactgtgtatcacccgcaacaacccggaaaaagagtgccagtttatccgctggctggatacctgccaggtcgacggcctgctgttcaccaccaaccgccccgataacggcctgctgcgcaaagaagtccagcgtcacgaacgcattgtcctgctggatgaagatattcccggcagtaaggtgccgaaagtgtttgccgataacgtccagggcgggcggatcgccaccgaaaagctgatcgccgccgggcatcgccatatcgctttcgtcggcggcccggacaagctgatgagcgtacgcgagcgctatcagggcttctgcaccgcgatggagcaggccggcctgagctggccgcccgaatgggtgatgtacggtgactaccagcgcgagtttggccagcaagcgctgcggaccctgttcagccagccggttcgcccgaccgccgtcttcgccgccagcgactatctggtgctcggcctgctcgacggtctgcgcgccagcgggctccaggcgccggaggcgctatcgttagtcggcttcgatgacgccaactatgccgattttacccagccgcggatttccactatccgccagcccgcccgggaactgggccgcaccgcggtgaacatcatgatgcgtctgatgaacgacgatcgggatatcccggcggaaacccgcctgccggtagagtggattggccgcgactcgatcaagatctgttaa

SEQ ID NO: 178771 - DNA, 954 bp, Klebsiella oxytoca
atgatgttatttcacaccggaaaactgcgtttacttgctgttgccaccacgatgctggcatcaatgagttttatttctgccgccggcgccgccggtccgacttatgcgctggtacaaatcaatcagcaggccctgttctttaatctgatgaataaaggcgcgcaggatgcggccaaagccagcggcaaggatctagttatttttaactctaacgataatcccgtggcgcaaaacgacgcgatagaaaactatattcagcaaggcgttaaaggcattctggttgccgctatcgacgttaacggaattatgcccgcggtaaaagaagcggccgccgctaacattccagtgattgcgattgatgccgtattaccggccgggccgcaggcggctcaggttggcgttgataatatcgaaggtggcagaattattggtcaatacttcgtggactacgtgcagaaagcgatgggcggccaggcgcggctgggtattgtcggcgcgctgaactcggccattcagaaccagcggcagaaagggtttgaagagacgctgaaaagcaatccgaaaattaccatcgctaacgtcgtcgacggccagaacgtacaggataaagcaatgaccgcagcggagaacctgattaccggcaaccccgatctgacggcgatctatgccactggcgaacccgctctgctgggcgctatcgccgccgtggaaaaccaggggcgccagaaagatattaaagtctttggctgggatctgacggcgaaggcgatttccggtattgacggcggctacgtcaccgccgttctgcagcaggacccggaaaagatgggggccgaagccctgaatgcgctgaacgctatcacctcaggtaaaaccgtgccgaaaaccattctggttccggccacggtggtaaccaaagcgaacgtcgatacctatcgttcgctgttcaagtag

SEQ ID NO: 178772 - DNA, 873 bp, Klebsiella oxytoca
atgcgtgtttacgttactggtaatattaccgtagatgaaacctggtccattccggatataccgaaaaaaggcgcgtccattcacggcattaaagtttcgcaggatatcggcggtaaaggcgcgaatcaggcgattatattatcccgctgcggaatcgacacgcgattaattgccgccacgggaaatgacagcaacggcgagtggatccgtcagcagataaaaaatgaaccactgacgctactacccgacggccatttcaatcaacatagcgacacctcgattattttaaatagcgctgatggcgacaatgccatcattaccacgacggccgcagccgatacgctcagccttgatgatattattccgcatatggcggaggccgccgcgggcgatattctgctacagcagggcaatttctccctggataaaacccgggcgctgttccagtacgccaaagcccgcggtatgacaacggtattcaacccctcgcctgtcaatcctgacttttgccatctgtggccgctcatcgacatcgcggtggtcaatgaatccgaggccgagcagcttaagccttacggcgtgaaaaccttagtggtaacccagggcgcggcaggcgcctggctggttcaggcgggtcagcgccagttttgccccgccgtccccgccgaggcgctagacaccaccggcgctggcgacacgttcctcgcggtgatgctggcgtcctcgatcctgcgcggcgtcgcgccggataggctgtcgctggcgcacgccagccgcgctgccgccattaccgttagccgtcgggggacgctcagcgcgtttcccgacggccacgaactcaccgctctgttagccgtgaacggcgcgcgctga

SEQ ID NO: 178773 - DNA, 846 bp, Klebsiella oxytoca
atggttgctatctcagcagaaaaaacgaatgcaatacaagctattttttcacgtaataaagttgttattggtgttattcattgcgatccttttcccggtacgccgaaatatcgagggaaatcagtccccggtattgttgagcgtgcacttcgcgatgccgaaaattatatttcgggcggcgttcacggcctgattattgaaaaccatggtgatattcctttttccaaacctgaggatatcggtcatgaaacctctgcgctgatggcggtgattaccgagaaagttcgcgagcgttttggtgtgccgctgggcattaatgtcctggcgaacgcggcgatcccggcgatggccatcgccctggcgggcggggccgatttcgtccgcgtaaaccagtgggccaacgcctatatcgccaacgaaggatttattgaaggggcggccgctaaggcgctgcgctatcgcagcatgctgcgcgctgaacatattcgtgtctttgccgatagccacgtcaagcacggtagccacgccatcgttgccgatcgttcgattcaggagctcacgcgcgacgtggatttcttcgaggccgacgcggtgattgcgaccggccagcgcacgggcgatagcgcaacgatggaggaaattgacgagatccgcgcggcgacggagctaccgctgctggtgggctccggggtgacgcccgccaacgtgagtcagatcctcgggcggacccagggggtcattgtggccagtacgatgaaggtcgatggcgtctggtggaacgatgttgagctcgcccgggtgaggcattttatgtcggtcgctcaggctgcgctggaggaagcataa

SEQ ID NO: 178774 - DNA, 645 bp, Klebsiella oxytoca
atggaagcgtttagcgaacgcctgctgcgcgaacatcaaccggcgtggcaggcgatgcagcagcaccgttttgtgactgatatcgaacaggatcgtctgccgacagccgtctttaaccgctatctggcgtttgagggcaactttgtcgcgacggcaatcgcgatttttgctctcggggttagcaaggcgccgggtattcatcagcagcgctggcttattggcgtcctgaatgccctggttgacacgcagattgcatggtttgaacaggtgttatcagaacggcggataactcccgctgattatccggacgatctgcccggcgtgcagcgctttcgcgacggcatgctgcggacggcccggcagggaagctatgagcagatcgttaccctgatgttcggtgcggagtggatgtattatttctggtgccgacgggcgagcgaacatcgccagagcgatgctgacgtgcgtcgctgggtggaaatgcacgcggaggacgaattttatcagcaggcgctctggctgaagaacgaactcgatcgctgcgccatggcgctgagtgaaagcgaaaagcaggcgctgtcggcgctttacggcgatgtgctgcaatgggaaattgatttccatcatgccgcgtacgaggcgtag

SEQ ID NO: 178775 - DNA, 267 bp, Klebsiella oxytoca
atgctaccgcaccctaaaatcacggaaattctcgatgaggtaaacagctggacgacgtttacccgacatttttcgcatataaaaaatgacattacccatcccgatacccgcctgctcctcaccaccatccttgcgaatggcgtcaatattggtctgaccaaaagccccggaagcaccaaatcatcactggaagatatccagccatggtacatccgcgacgaaacctattcagccgcccttgcagagctggtaaacgcgcaggggtaa

SEQ ID NO: 178776 - DNA, 255 bp, Klebsiella oxytoca
atgtcattgatgtcggttatcacggcgcgggttattgggtcagcctgcgaaggctccttatctgacagagcctgctatgaggtgggcacatccaggctgacaatccgcagcacgtgttgctcgatctgctttttcagcctcatccagtacattaccagccgtatgcccctgcttcagtccagacttgaagaggtcaatgccatggctgcccttggtgagctgcccgatatggaaatatctgacaagggggggtaa

SEQ ID NO: 178777 - DNA, 522 bp, Klebsiella oxytoca
atggcaagagcactggcctgtttgggtgataaaacgagttacggagaaatcatttcagcgactgcgtcctggtttgaaggaagtaaagcaatagcccggaccggcgacaaggcatcatgcagcaaatgtaacgggtattttgaaattctggcctccgcgcaggactgggcagaagaaggcaaagcgtatgcggccacaggtgacagagtgctgtgccattgcccagatcactacgtgtacggttcagccacgcagtataccagcacagacaccggctctctgacctcccgcaataccagtcagtcccctgtcccggcgcaacaggcacaggattccggtgcccggaactgtattcgctttcagtgcgccggtgacgatggccagctaatggctggttgccgctacactctgatgttcccggacggacgttctgaagctggtgttaccgatgaacacggggttaccggatggcattatgctgaatctgctgaaaatattaacctgcatatattaatggattaa

SEQ ID NO: 178778 - DNA, 1179 bp, Klebsiella oxytoca
atggctgtttactatctcagtacccgtattaactctaatgtcccggctgatgctttgttatatgacctgtgcatttatcgcatggactccagcaggaataaatcgccccttgtggatgtgaagcaacagccgtttctgggaaattatgaaacacagagtcacatgaccggaaatataaatgagtcactctcgacaatttatattatggaaatgaatttttaccgaaaaaccatgttgcatacgcactgcgtaacgcctgttccgttcactaagatgtacacgctggaagaatttgcgtcgggcaaagcctggtctccggtgaagcgggagaacccctgttattttgagtcaaaagggacaatgaaacctgagagtcaggggggcgaaacaaagcagattaaaatcaccatcccggaacgtccatttattgcaaaggaataccccattggcaatcccagagacccttttgataaaaatttaatagaacgtcaaatagatgaaagatttaacggatttgatttccctaatcaaatagcagcaagtgtatgtgggcctgctgcatttttttactgtttgcaaaaggatcgccccgatgtgtatgcgcaagctgcccgtgaactttggcggtacgggaaaactaaaataggtgacttaatcatctcacctggtgaaggctgtcgtcaccctacaggtgcattttactatgatgatggcaggccaaagatagccggtactgactggatgacactagctgggctcagggattcagagaataccatgctgagctttgatgctcttgattcgccagtggctggcatcacaatgtggcaaacactgacggaatggtttgaaaaggccggttatgaaaaagtctttagtaatgtagggatcactcaggcgggtgtccagggaatcagagatttaaatcaatatattgagcgaggctataaagtcgttacgttaataaacgatggagttcttgtaaatagtacaaataaaacaattttacctacacactgggttgtctggaatggttcagtcacacaagatcccaacggatatattagtttggaattgttttcttggggaaaacaaagaaattggataaaacctaaaaaagatttgcaattttttatcaagagattttttggagggatggtttttaaaccattaaaataa

SEQ ID NO: 178779 - DNA, 561 bp, Klebsiella oxytoca
atgaaatatcaggacctcttacaaagcgtgttgttaaacgacccgataagaatgaacgcgctgtacgccgttcaggcgctggaactcagcgatggctggattggcgccggctttgtcagagatgcggtctgggatcatctgcacggctacgggcaaaggccagtttcgggtgatgtggatgttgtctggttcgacgcgaaaagcggcagcgccgccgacgatagggcgctggaagagaggctgagccagcaatcatccgcctttaactggtcggtgaagaatcaggccagaatgcatcaacgtaacggtaataaaccttatcactccacggagaatgcgttgctgtactggcctgaaacggcgacggctatcgcggtcagaatgggacgttcagggcttattgaggttattgcgccctacgggctggacgatctgtttgcactccgtctgcggcccacgccggtatttgcgcagcataagctggctattttcagccagcgcgtcgcggaaaaacgctggctgcagcgctatccaggcctgcagctgattgtcccgacctga

SEQ ID NO: 178780 - DNA, 1578 bp, Klebsiella oxytoca
atgcactcttcctttgattctctgataaaacagtatcccttccccattgctgaacagctgcgccactgggcggctcgctatccctcgcgaactgctgtcgttgatgccaaaggctcgttgacctacagcgcgctcgatcttcgggtcgatgagcttgctgcagggttatactcgctgggtttgcgtccgggagaacatgtgcttatccagctccccaacggcaacgcatttgtgatcctgctgttcgcgctgttaagactgggcgttatccctgttctggcgatgccctcgcagcgggcgctggatattgacgcgctgatcgcgctggcgcaaccggccgcttatgtgattcatggagaaagccacgcggacctggcccgccagatggcgtgcaaacacgcctgcctgcggcaagttctggtcgcaggtgagaccgaaggcgacgattttacgccgctcttctcgctgcgcggcgaacggcaggcgtggccgcagcccgatgctgccggcaccgcgctgctgctgctctcaggcggcaccaccgggacgccaaagcttatcccgcgacggcacgctgactatagctataacttcagcgcctccgccgaactgtgcggccttaagccacagagcgtgtatctcgccgtcctccccgtggcgcataactttccgctggcctgccccggtattctgggaacccttgcctgcggcggaaaggtggtattgaccgacagcgccagctgcgatgaggtgatgcctttaatcgctgaacaaggcgtgacccacgtcgccctggtaccggcgctggcgcagctctgggtgcaggccagagagtgggaagacagcgatctctcttcgctacgcgtcattcaggtgggcggcgcccggcttgacccaacgcttgctgagcaggttatctcgacgtttgattgtcccctgcaacaggtattcggtatggcggaaggcctgctctgctttacccggttggacgatcctctggccaccgttctccacagccaggggcgccctatgtctcccctggatgaaattcacgtcgttgacgaagaggagaacgacgttgcgcccggcgaaacgggacagttattaacgcgcggtccttatactattacgggctattatcgcgctcccgagcacaatgcgcgggcctttaccgcgcaaggattttaccgtacgggcgacaatgtcaggctcgatgaggcgggaaatctgtacgttgaggggcgtataaaagagcagatcaaccgcgccggagagaaaatagccgctgcggaagtggaatcggtgctgatgcgtctggaagacgtaaaggattgcgccgtggtcgccgcgccggacacgctgcttggcgagcggatatgcgcgtttatcatcgcgcaacgcactccctctgactatcaacagctgcgtcaaaagctggtccgaatggggatcagcgcgtggaagattcccgatcaaattgagtttctgacccactggccgctcaccgccgtcggcaaggtagataaaaagcgcctgacggcgctcgccattgagcgttatcgccattcagcccaataa

SEQ ID NO: 178781 - DNA, 801 bp, Klebsiella oxytoca
atgcaatctgccatgtgtataccgttatggcccgcccgcaacgccagtacggcgcatctggtgatgtgccccttcgcgggcggcagcagtagcgcgtttcgccgctggcgagaccaccccatggcggagatcgcgctttccctggtgacctggccggggcgcgatcgcctgcgccatctggcgccgctcagcagcattacgcaactggcgtcgctgctggcggacgaactggaagagagcgtatcgcctgacgccccgcttttacttgccgggcacagcatgggcgcgcaggtggcgtttgaaacctgccggcttctggaacaacgggggcttcccccgcaagggctgattatttccggctgccatgcccctcatctgcattcccggcgcaggctcagcgaccgcgatgatgccgactttatcgctgaactgatcgatatcggcggatgttcgcctgaactacaggaaaacaaggagctactgtcgctatttcttcctcttctgcgcgctgatttttacgctactgagcactatcactacgactcgctcgacgattttccgccgctgcgcacgcctgctttgctcgtgtgcggcagccgcgatcgtgaagcctcctggccggagatggaggcctggcgtccgtggctgaaccatatcgcaggcgaggtggtgattgacggcgaccatttttatctgctgcaacaatccagggccttttttacgcagattattcaccattttccccacgtattttctgcgacgaccgctttgcaaaatcggtcctgcacttcagaaaggtga

SEQ ID NO: 178782 - DNA, 1098 bp, Klebsiella oxytoca
atgatgtcgtccgccgcccctaagctacgcgtactgattgtgggcgctaaatttggcgaaatgtacctcaacgcctttatgcagccccaggaggggctggaactggttggtcttctgtcccagggaagcgcgcgatcgagagagctggcctatgcgtttggaatcccgctgtatacctcgccggaacagatcgccgagatgccggatatcgcctgtatcgtcgtgcgctcaaccgtcgccggcgggagcggaacccagcttgcccggcactttttgacccgcggcgtgcacgtgattcaggagcatcccctccacccggatgacgtccgttctttacaagcgctggcgcaggaacggggccgctgctattgggtcaacacgttttatccgcacgcgcgtgcgggtcgcgcctggctcggggatgcgcagcggttacgtcgcagcctggatcaggcgccgtcggttgctcacgctaccaccagccgacagttgctctactccacgctggatttgttgttgctggcgctagaggttgatgccgccagcgtggcgtgcgaagtggtcggtagctttagcgactttcactgtctgagacttttctggccggcgggagaagcctgtctgctacttcagcgctatctcgatcctgacgatcctgatatgcacagcctgattatgcaccgtttgctgctgggctggccggaaggtcatctttcgctggaggcaagctacggccccgtggtctggtcatccagcctgtttgtcgcagaacatcaggcgaatgttcgtagtctctaccgcaggccggagatcctgcgcgacccgccgggtcagacgcgcagcgcggctcccctgagctggcgtgattgctgtgaaaccgccggaccggagggggtcggcaggttgctacagcagctgcgctgccatctggggggtggaaatctgccggcggcctgccactccgctcatcagctcgcgttatcacatttatggcagcagattttacgtaagaccggccatgcggagatccgacatctgacgccgccgcgtcacgaccggttaccggctttctaccgccacgatgaggagtcccggtga

SEQ ID NO: 178783 - DNA, 6099 bp, Klebsiella oxytoca
atgatttctggcgccccctctcaggatccgctgttatcggacaacggcgaagcggccgattatcaacaattacgcgaactgttaatacaggaactgaatgtagcgccgcagcagttacaggaagagagcaatctgatccaggcgggcctggactccataagattaatgagatggttacactggtttcgtaaaaagggctaccgcctcacccttcgcgagctgtatgccgcccccacgttggcagcatggcgccagctgatgcgcagccgttcgggtgaaaaaccggatgatgcaagctccccggcggacgcggcgtggccagtcatgagcgagggtacccccttcccgctgacgccggtacagcatgcctatctgacgggccgaatgcccggacagacgctgggcggcgtcggttgccatctgtatcaggagtttgccggccatgatctgacggcgccaaagctggagcaggccatcacgatcttactgcaacgccacccgatgctgcatatcgcctttcgcgccgacgggcagcaggtctggctaccgcagccatactggaacggcgtcaccgttcatgatttacgccagaccgacgaggcaagccgccaggcctatctggaaacattgcgccagcgcctgagccaccgtcttttacgcgtggaaatgggcgaaacctttgatttccagttgacgctcttgccggacaatcgccaccgcctccatgtcaatatcgacctgctgattatggatgcttccagctttacgctgtttttcgatgaacttaacgccctgctggccggagagtcgctgccgcccggcgacccccgctatgatttccgcgcttatctgctgcaccagcagaagatcaatcagccgctgctcgacaaagcgcgcgcgtactggctggcgaaagcatcgatgctgccacccgcgccggttttaccgctagcctgcgaacccgccacgctgcgtgaagtccgtaatacccgacgccgcatgattgtcccgacaacacgctggaacgcctttagccgacgggccggtgagaatggcgtgacgccgacaatggcgctggtgacctgttttgctgccgttctggggcgctgggggggcctgacgcggcttctgctcaatatcacgttatttgaccgccagccgctgcacccggcggttgacgaaatgcttgccgacttcaccaatattcttctgctggataccgcctgcgatggcgataccgtcagcaacctggcgcgtaaaaaccagctcacgtttactgaggactgggatcatcgccactggtccggcgtcgagctccttcgtgaactcaaacgccagcaaagccatccccacggcgccccggtggtatttaccagcaatctggggcgctccctgtacagcagccgcgccgagtcgccgctgggcgaaccggaatggggcatctcgcagacgccgcaggtctggatagatcatctggcgttcgagcatcggggcgaggtctggctacaatgggatagcaatgacgcgttgttccctccggcgctggtcgagacgttgttcaacgcctactgccagctgattaaccaactctgcgatgatgaaagcgcctggaagaagtcgttcgcggacaggatgccccaaagccagcgggagatacgtcaacgggttaacgcaaccgacgctcccgttcctcagggcttgctgcatgaaggtattttccgcatcgccctccggcaaccgcaggcgctggcggtaacggacgcacattatcagtggaattatcgtgagctgaccgagaatgcgcgccgctgcgctggcaggttaatcgcgtgtggggttcagcccggcgacaatgtcgctattacaatgtcgaaaggcgcgggacagctggttgcggtcctcgccgttctgctgtccggggcggtgtacgttccggtttcgctcgaccagcccgccgcgcggcgcgggaaaatctacgccgacgccaacgtccggctggtgctcacctgccagcacgacgccagcgcctggtcagacgatatttcccacctgacctggcagcaggccatcgaggcggagccgctagccgaccaggcggcgtgcgcgccgacgcagccggcctacattatctatacctccgggtcgaccggcacgccgaaaggcgtggtcatttctcaccgtgcagcgctgaatacctgctgcgatatcaatacccgttaccaggtgggtcccggagacagagtgctggccctctccgccctgcattttgatttatcggtttacgacatttttggcgttctgagcgccggcggcgcgctggttatcgttatggaaaatcaacggcgcgatccccgcgcatggtgcgaattgatccagcgtcatcaggttacgctctggaacagcgtcccggcgctgttcgatatgctgttgacctggtgtgaaggtttcgccgacgccgcgccggagaaactgcgggcggtcatgctttccggcgactggatcggcctcgatctccctgcccgctatcacgccttccgcccccagggacagtttatcgccatgggcggcgccaccgaggcgtctatctggtctaacgcctgtgaaattaaccgggtccctgaccactggcgcgccatcccttatggctttccgctggccaaccaacgttaccgggtggtggatgaactgggccgggagtgcccggactgggtaccgggcgaattgtggattggcggtatcggggtcgcggaaggctactttaacgatcctgtacgcagcgagcagcagtttgtaacgcaatcgaacgcgcgctggtatcgcaccggcgatctcgggtgctactggccagacggtacgttagagttcctcggtcgtcgcgataagcaggtcaaagtcgggggatatcgcatcgagctgggtgaaatcgaaagcgcgctcagccagctggctggagtgaaacagtcaaccgttgtggcgatcggcgaaaaagaaaagaccctggcggcctgggttgtgcctcagggttcggctttctgtgttacccatcatcgggacccggcgctgccccaggagtggcgcgggcttgccggaacgctgccctgctgtgtctgccccccggaaatctccgccggccaggtcgctgattttcttcagcatcgcctgttaaaactgaaaccgggtcaaactcctggcgccgatcctcttcccctgatgaatgctctcgctatccagcctcgctggcgggccgtggtggaacgctggttagcctttctcgtgacccaacagcggctgcagcccgccgctgagggttatcaggtttgtgcgggggaagcgccggagaatgaccctccttctttcagcgggcatgacctcaccttaacgcagatccttcgcggcgctcgccacgaactgtcattactgaacgatacgcggtggtcgccggaaagtctggctttcgaccatccggccagcgccctgtatatcgaggaactggcgacaatctgtcaacagctttcccggcgtttacagcgcccggtacgcctgctagaggtgggtgtccgcaccgcccgcgccgcagagtgcctactaacccggctcagcgctgacgagattgagtatgtcgggcttgagcacagccaggagctgctgctgagcgcccgacagcggcttgcaccgtggtctgacgcccgtctggccctctggagtgcagacacgctggcggcgcatgctcattcggcggacattatctggctgaataacgccctgcatcgtctgctgccggaagagcccgggctcctcgcggcattacagcagctggccgttccaggcgcgctgttctatgtgttggagtttcgtcagttaacgccctccgccctgctcagcacgcttctgttaaccgatggtcagcccgaagccttacttcacaatagcgctgactggggggcgatatttaccgccgccgctttcaactgccagcacggcgatgaagtcgagggattgcagcgctttctcgtacaatgccccgttagccaggtacgccgcgatcctcgtcagctgcagtccgctctcgccgaacgtctgccggggtggatggtaccgaaacggatcttcttacttgacgccttaccgctgacggcgaacggcaaaattgactatcagacgctaaagcgctgtcataccccggaagctgaaaaccggactgaagcggatttacccctgggcgatattgagaagcaggttgccgtcatctggcagccgctcttgtcaatgggcgccgtcagcagagaaaccgacttcttccagcatggcggtgatagcctgctagccaccaggctgatcggacagctccaccaggcgggttatgaagcacgattaagcgacctgtttaatcacccccggctggctgattttgccgccacgctgcgtaaaaccgacctccctgttgaacaaccctttgtccactcccctgaagaacgctaccggcctttcgcgctgactgatgtgcagcaggcttacctggtcgggcgtcagccgggctttgcccttggcggcgtaggctcacacttctttgttgaatttgaaattgccgatctggatattcaccggctggagaaggtctggaaccgattaatcgcccgccacgatatgctgcgcgccgtagtgcgggatggacaacagcgggttctcgaacagactcccccgtgggtgatacccgcgcacatcctgcacagccccgaagaggcgctgcaggtacgcgacagactggcgcatcaggttctcaaccctgaagtctggccggtattcgatctccaggtcgggttcgtcgacgggatgcccgcccgcctgtggctgtgtctggataacctgttgcttgacgggttgagcatgcagatcctgttgtcggagctggaacaaggctatcgctatccgcagcagctgccgctgccgcttcccgttaccttcagggattatctgcagcaacccgcgctgcggacgcccaatcccgactctctggcatggtggcaaacgcagcttgatgatattcctccggcgcctgcgttaccgctacgctgcttgcctcaggacgttgagacgccgcgcttcgcacggctcaatggggcaatggacagcgcacgctggcgtcgcctgaaacagcgggcggctgacgctcatctcaccccgtcggccgtactgttatccgtgtggtcaacggttcttgctgcatggagcgcacagcccgatttcacgcttaaccttacgcttttcgacagacgaccgctgcacccgcaaatcaaccagatcctgggcgactttacttcgctgatgctgctgagctggcatcccggcgagagctggctgcaaagcgcgcggttattacagcagcgactaagcgagagcctcaaccaccgcgatgtgtcggcaatacgcgtgatgcggcaactggcgcggcggcaaaacgtaccggctgtcccaatgcccgtcgtctttaccagcgcgctgggctttgagcaggataacttccttgcccggcgcaatctgctcaaaccggtgtggggtatatcccagacgccgcaggtctggctcgatcaccaggtttatgaatccgaaggggaactgcgctttaactgggattttgtcgccgccctgtttcctgacgggcaggtggagcgccagtttgcacagtattgcgcgttgcttaaccgaatggcggaggatgacagcaactggcagctgccgctcgccgacctggttcccccgcttaaggtcacggagcgacgcgcccgccggctgcgccctgagcgcgctcagccgcggatcgcggcgaacgagagcagcgtcagcctgatttgcgacgcctttcgcgaggtggttggcgagcctgtcgcacccgcagagaacttttttgaggcgggcgccacgtcgctgaatctggtacagctgcacgtcttgttacaacgtcacgaattcgccgccctgacgctgcttgacctgttcactcacccttctcctgtcgcgctggccaattatctcgccggcgtagccctggaggagaaaaccaaacgcgtgcggccggttcgccggcgtcagcggcgcatttga

SEQ ID NO: 178784 - DNA, 1803 bp, Klebsiella oxytoca
atgtcatctcactcatccaacactgaatcgctgtcccgatttcctctttggcaggtgattaccccggttcgccggaaggtgctcctggctatggcgctggcggggctggcggccttcaccagcctgggggcgctgctttttctggcatggtgcctgcgcgatctgcgcggggcgcctgacatcatccccgtctggccgctgagcggcgtagtcggctgcgtgatagcgacctttatcctgcgcctgcaggcgttcaatacctctcattatgcggctttccatctggagaatattctgcgcagcagattagcccgcaagaccctacagcttgcgccgggcgcgttacagcaaatgggcagcggatcggtggcgaaagtaatgctggatgatgtgaagtcgttacatatttttgttgctgacagcacgccgctctatgcccgcgccataatcatgccgctggcgactgttgttctcgtattctggctggactggcgactcgccatcgcgacgctgggggtactggcgtttggttcggtggtgctggtactcgcccgtcagcgctcggaaaacatggctcagcgctatcatcaggcgcgtgaacgggtcagcgccgcggtgattgagttcgtacaggccatgccggtggtgaggacctttgatagcggcagtaccagctttttgcgctatcaacatgccctcgaagagtgggtcgatgtgctcaaaagctggtatcggcaggccggattttcagcgcgcttttcattctcaattctgaacccgctgccgaccatattcgttcttatatggtgcggatacggcctgctgcacgctggcagtctcgattttatcgcctgggtagccgttttactgatagccagcggaatggccgaagcggtaatgccgatgatgatgcttaataacctggtcgcgcaaacgcgtttaagcgttcagcgtatctatcaggttctcgcgatgccggaactctcgcgcccgcgagccgatcgacagccggaagaggcgagtatcacctttgagcaggtaagctttcattatccgcaagcgcggactggcgccgcgttgcaggaggtgagctttcacgtgcctgtcgggcaaattgtggcgctggtagggccaagcggcgccgggaaaagcaccgtggcgcggctgctgctgcgttacgccgatcccgacaaaggccatattcgtattggcggcgtggatctgcgcgatatgcggatagagaccctgatgaagcaaatctcgtttgtgtttcaggacaactttctttttgccgacacgatcgccaataacatccgtctgggcgcgccggatacgccgctggaatcggtgatagcggcggcgagagtggcgcaggcgcatgagtttataagcgcgttgtcggagggttacagcacgcgggtcggggaacgaggggtatttctctccggcgggcagcggcagcgcatcaccatcgcccgggcgcttttgcaggatcgttccattctggtgcttgatgaagcgacggcgtttgccgatccggaaggtgaagcggcgcttatcaaagccctcgcggcggccatgcgcggccggacggtcatcatggtcgcgcatcgtctctccatggtgactcaggccgatgtgatattgctgttttccgacggtcagctccgggaaagcgggagccacgggcagctgttggcgcagggtggcctgtatcaacggctatggcaacgctatcagcaggcgcagcagtgggcgccgggtggaacgcaggaagaggcggtgcaaaatgaaagacactaa

SEQ ID NO: 178785 - DNA, 1281 bp, Klebsiella oxytoca
atgagtgacgttccgtcgaatgtgaaatcgctgacgttaaccaccgggcgggtgattttcgccattgccggcatctatgtgacacagagtctggtatcggcgctctcgatgcagtccttgcccgcgctggtgcgcgctgctggcggatcgcttgcgcttgccggggcgacaaccctgttcatgctgccctgggcgctgaagtttatttgggcaccgtgggtcgagcgctggcggctacctcctggcagcccgcagcgccgttcccgcatgctgatcctgcgcgggcaggctgcgctcgcggcgatcctggcgattgccgccgcgattggcgggacagggcgagaaggcggattgcccgaaacgctagtcgtcgcgctatttgcgctgtttatggtggcgggtacggtcgcctccactattgatatcgccagcgacggtttttgcgtcgatcaactgacccgcgcagggtacggttggggaaacagcgtgcaggtcggcggcagctatctgggaatgatgtgcggcggcggggtgtttctgatgctgtcggcgaccgtcggctggcctgcggccatgctgatgatggcggcgctgatcctggtcttatccgtacccctgtggcgcattgccgaaccaacgcgcgcagcatctgttccgcatgttccggcattgggttatgcgcttagaaggcgacaggctcgtctgggcttaatgctggtattgatgctgaattccggcatgcggtttgtgctgcctcttctggcgccgctgctgttggatcatggtctgagcatgtcagcgctcggtgcgctgttcagcggcggtaatattgcggcgggcatagccggaacgctggcgggtggattgctgatgaaatacctctcacccggcagagcgctgtttgcggcttatggcgtgcagggcatcgcgctactggcggtagtgatgacgctgctgatagcgccgggtcctctactgctgccgattctccaggggttgatcgttgttcaatctgtttcgctggcctgcgcgttggtctgtctttacgccacgctgatggcgctttcttcgcctttgcaggctggtgtcgattttacgctctttcaatgtactgacgccgctatcgccattctggccggcgtagtcggcggcgttgtcgcgcagcgctttggctatgcggcctgcttcctgtttgccggcgtattcacgttgctggcggcgtggattgtttctatccgactgcgttcggcaaaagaactaatgacaagctcaattgattga

SEQ ID NO: 178786 - DNA, 480 bp, Klebsiella oxytoca
atgtctactcccgctcatttatggcttgaagatgaaaacggatcgccgattgttggcagttgtttaatgcccctgcgtttaggttctatcgaattaaaatcattttcgcatggtgtaaccattccagtagaccccagttggggcaaacttactggaacgcgcgttcatagcccgatcacgatagtaaaagaatttgaccaaacgacacctgttctgtatcgcgccgtatgtgaaggccgaacactgaaaaaagcaacaatcaagatgtaccgaatactggaatcgggcattgagtcagaatatttcaatatcatcctggaaaacgtcaaaataacgacggtttccccataccttgcccctaatggcatgagtagcacacatctggaaacactcgaattgcgttatgaggcgattacctggaagtatacggagggtaatattatttatcgtgattcatggaacgatcgttgttgtgcctga

SEQ ID NO: 178787 - DNA, 693 bp, Klebsiella oxytoca
atgtacaacaacaatgaagtcatcagttacctacaagccaacaagattcttgcgctgaagctcgatcatgctgtttctgctgtcggcgaaaaggtcagaaaccaggttgatgcattagggaagggggcaacccgcctgctgtattacacgtcctgtttcaccgatgaatacaacgatgtttgccagcagcaaaagacagaagatttgcgcttcaggaatgctgttatacgcattatccagcatggtgacgttgtctttgaaatgcttcgggtctactttgaggaaatattcaaatacaaaactaatgctcaattagagcatattaaaaaagcgcttatggccgtgaatgtccatatcgctgccagcacccttacaggtgcagggtacgctttagcggtcgctaccagcattcgtattggattgaatctaagtatgcaactcagtgcccttacgggacgcgctgcgggtacggttgcgggggttttggctacatatggtttggttcagaaagcggcggatagcgcccatcgtttacacgtccaatacccagcctattattcagcactttacatgcaacaactagaaatgatgtattttttgattgagcccctattcgagcgcgcaggtgcctttgaagcgcaatgggtgtctgattctggcatagcaaatattatcacccggatgattagataa

SEQ ID NO: 178788 - DNA, 489 bp, Klebsiella oxytoca
atgaatcttcgtgaaaatattgtgagccaattcagcctgctgtcgcccgaactccagcgcgcggcggaattttccctgcaaaatgccaaccaactggtggtgcaatcaatgcgcgctttcgccgcggaagccggcgttaagcctgccacgctgctacgcctggcgcagcgtctgggctataacggttggcgggagctgaaaagcgcatttatcgacgatctcggcttaggaaatgatacatatgtatctaaggctgaaaaattgatcgccaaagggacgcagcccgcgctgtacgaagaggtgttcctcgcgcatcaggccaatctggcattcactcaggcagagaatcaacacgctatgcagcaagcggttacgttgctggatgaagcgaagcaggtctatatttgcggcttccgcgccagctttcctatcgcctggtcgttgttttatgtctatcgattgttcaatcaaaccgttattcattcgtga

SEQ ID NO: 178789 - DNA, 354 bp, Klebsiella oxytoca
atgacgccaaaagaaatactttgccaatgggttgacgcatttaataatgcagatgtagaaactatttcagaattatatgatgataatgcaataaaccatcaggtagccaatgagccagttattgggaaagaggctataaagaaaatgtttgaacaagatttttcttttccagaaatggtttgtatcgttgaaaacattttcgaagatggacaatgggcaattttagagtggcgtgccccattaggtttgagggggtgcggtttttttcaaatagtaaataataaaattatatttcaaagaggctattgggataagctatctttcttaaaacagcacaacttacctattgaataa

SEQ ID NO: 178790 - DNA, 279 bp, Klebsiella oxytoca
atgcacatcaaagtcatgtcggggaactttggcaaagcgccggttatatgcaagcgtcggcccaaagtcggtatagcgatctcggattatattgagcgcgtactgtgcaaaaccatcaggcagctggttattgctcagggttcctcaacggcggttagccatacaaagcgggccagattcacggtaacgcgacagaagacgccggcactgacgagcggagataccgtggcgctgcgcggccatctgcgttgtcaggtgccggtcgacaacatgggttaa

SEQ ID NO: 178791 - DNA, 1083 bp, Klebsiella oxytoca
atgaacaagattatccgctccgccctgctggcctggggcctggcaggctacgcgctcgccgccgccgccgcgccggccgttccggtgcgcgtcgccaccgtggaacacgcgccgcatgccggtgaacggcaaatctccggccgcgtcgaggccattcactccgtcgatattcgcgcccgcaccgaaggaaagattgtgcagcgccacttccaggatgggcagtacgtcaaccagggcgatccgctgtttacgctggatgacgcccagccgaaagccgcactggcgctggcccaggctgaactgaaaagcgtgcaggcttcgctacgccaggcccagcagcagctgagccgctaccagcagctgaaaaataaccacgcaatcagccgcaacgacgtagacaccgcgcagatgcagcgcgatgtcgccgccgccgccgtcgagcaggcccgggcgcgcattgccgcccagcagattacgctcggctacacccgcattacctcgccggtcaccgggcgcgtcggccatagtccttttcacgtcggcggcctggtgaatcccgccagcggcgtgctggtcgatgtggtccagcttgatcccattcgcgtggcgttctcgctggatgagaccgcctttttcgcgaaagcgggacagcacacggatatcgccgcgctgaagcaggcgtggctggcgcaggtggatgtcgatggacggcgtgaagacggcgccctgacctccgtcgataaccgtattgatagccgcactgccagcgtggcgctgcgcgctgaatttgccaatccgcagcaccgtctgctgccgggcggcaacgtcacggttttcttccggccgcagcagcttaaggagagcccgatgatcccggcctctgcgcttcagcaggatgcgctgggcttttactgctgggtactgacggcggacaacaccgtgacgatgcgccgtttagcgcccggcggtcagcatggccagagcttcgtggtggccgatggtctgaaagcgggggagcgcgtagtgacggaaggcgcccagcgcctgcgtgacggcgcggccgttcagctgctgagtgaataa

SEQ ID NO: 178792 - DNA, 993 bp, Klebsiella oxytoca
atggtcacaatcaaagatatagcgttggcattgggtatttcacacgtcaccgtatcaagagcgcttaataaccctgaaaaagttcaagccaaaaccagagagaagattttggccaaggccaaagagctgcactatgtccccaatgcggcggcaagggacatgaaaaaatcccggctaccggttattggcgttatctcattaaatatgggaagaagtagctatggtagtgaaatgctgggttcgatcagtgaaaaagctaaggaaaccaactatcagttaatttttatccatgttgaagattcctctcccaccgaactggatcttaattttcttagagagaaacgaatatcaggtcttatttacctttcgcttgatccttgtgaaattgagtatcagtcaatatttgatgaggtcaagaccgtgtttgttaactgtcattgtgcgcgcggtaattattctagcgtgcaggctgataacgagcaaggattatataatattgctaatctggtttttcatcgcccatggtttacccgcagcctttttattaattttgatgaaagttatcacgccgcggttaagcgcaagcagggatatataaaggcgcttaatgataatcacattgcgttttctgctgatgattactttgttgttccggttagctatgattatgatttcacagtattagataatgatattcttggcgctattcagcgtggcgttaatgtcatcttttgcggtcgtgacgaaattgcgctggaagtatacttttctttgcaacggctgggattttctattccccaggacgtttcggtgatcggttttgataaccagagtattatttcgcagagagtctatcctaagcttactacggtagagttaccttaccgaaatatggtattaaaaggttatgatttaatcgtttcggaagattcacactccatctgtaatgtagcgattagttgtgatccgatcattcggggttcgttaaagtag

SEQ ID NO: 178793 - DNA, 1395 bp, Klebsiella oxytoca
atgaataccacaagccaagaacggatgtccgtgcgtgagcacgtggcatacggctccggagatatggccttaagtgtttcaattatttccgcctctctccttatttatacttttatgatcagcgtggtagggctaacaccgattgatgcgggatgggtactcctcgccgtgcgtttgatcgatgccattaccgatcctgtgatggggtggttgtcaggtaaggtgaaaactcgctggggccgctatcgtcactggatcgctatctgttcaattccctttggtatttccctctttatgttgttcaccgtggttggtgaaagttacagtgccaggctggggtggacaacaggggcatatattttaaatagcattatgtttaccatgattgcgatcccctatatttctcttgtcggggtaatgaccaacgaccctgctgaacgcctgaaggcgaatacgtttcgtttcccgatggcgaaagccgccaccattattgtgaccacctttgtaccatactatgtgacttctaaaggcgctgccgaggctggaaatgcctatgccctggcctttttggtcttagggattgccagcatcattgttcttatgttttgtgctttttatgttaaagagcgggttgaaattaatagtcccaacaatgtttcaacgaagaagcaaattctatcattaatgaaaaatgaccaatggttgattctctgtattactatggtcctgctactgattgctttcgccacgcgtggtaacattgccttcatttatggcactgaatttgcaaaagccgcaggtggatgggaaatcggtatcttcatggggatgtggtctgccggcggtatcgctggtgcgttgatatctaaatggttaacggatcgctataataagctggccgtattccgctggtctctttatttgtccgcgttaatggccgttgccatgtattttatcgtcggtatcggtgatttatatttggcaatcctcttctatttcctgtgttgcgccgtctcggagattaactcgcctattttatgggcctctatcgctgaggtgggtttttatggtgaaattaaaactggggtgaatacctcaggcttatcgattggctttatctcgtttagccaaaagctgggaatgagtatttctggccctattacgggctataccctgacctggattggatatgaagcgggagctaaattatctatggaaacattgctggggctatcgatggcggtaacatttattcctgccattttctttttgatagccagttttgtatttaaacgctattttattgataatgaatatttcagggagatgatcgttagcaataaattacccactgataagctatctcgtgaaaaagatcggatagtagattgttaa

SEQ ID NO: 178794 - DNA, 1704 bp, Klebsiella oxytoca
atgaaaagtttctcaataccctctgctgatgaaggcatcacgattgaattttggctgcgccaaaagaaaaataatgaaccgctacctctattagttattaaaagtgataatcaactgctatataaaatccaggaaggggctggtttttttaattattatcattatacccaccatcaaaagggggagttaaccttaagctatgatgaagacagggcagagatatcccttttttattactatgataaaactaacgtctatcatcaaggcgttatttaccttattgataatggcaccggtctgcaatgctacccaaaatcaaagctgaaagagtggtatacgcaagaaacattcagacctcaactgcatttttcaccttttcaggcatggatgaatgatccaaatggtttgtgtaagatagatgacacttatcatatgttctaccagttcaatccaaacagtaccgagtggggcccgatgcactgggggcatgccatcagtaacgatttgatttcctggacgcatttgccggtatttaaccatcccgaacatcccctggcttctctgggggcgaccggtggggctttctccggtacgacctttatcaataacgaaggcgaggcggaaattttctatacggaacgtctcccggcctacgatctctataaggattatattgaagtacagaagaaggccgcaattgatcgctatggtattaaagcaacgcatatccagactattctggagaaaaaaatagaattagtcggctgtgatattcgcgatcctaaagtttggtttgatagcgaaacgcagtgctatcgaatgatcctcggctccgtttatgacgggaacccgtccgtgcttcaatttgtctcacgggacagtgaggaatgggcgtttgaaaatgtcctgtatacggcgccgggatattttgctgaaaataaaggccgttgcgttgaatgtccggattttttccagctgggcgctaaatgggtactgactatcggtattgtcggttaccaggagccagagacaaagcgtcacaatcttctgtacgccattattggcacatttgacaacggcgttttcactgcggaaagcgagatgcaagtgctggacttcgcgacggagtattatgcattacaaacgttcaaggacggccagcgccaggttggtattgcatggctatttaattgggcaatgaaaaagccaattaaatcatcatataacggtgaaatgtctattccaaaagaaatcttcattaacgccaacaataaagtcgctatgcgccccgttaacgaacttgaaaaatacgttgacgaatattgtgacgtcaaattgaaagccggtgaggaccatcgtatcaacaagggaaaatcattaaggatccgcttagagcagggtttacagccgaacgaagacctcatattggccggagataagggggaatggctggcgatttcataccgcgatggctatgtgagcatagaagaaaccgtcgtgagtgaagcgcaataccgggctcgcgcagcagagataaaaaatctcgagattatttttgatgcgggaattgtcgagctgtttatcaatgatggtgaaatctgcgcaacgaaacgcagctataaactatcacactgtaagcaattaaaagtgaatactcttcgcgaaaaaaacatacgaatcgaaaccttacatacaagctggtaa

SEQ ID NO: 178795 - DNA, 1350 bp, Klebsiella oxytoca
atggctcaacaatacggtggttttttacaaagtctggcaacggttcgggatgcaaaaacggggcgtctttcaagctgggatcaaagcggtaagaatcaggattattggctaattggtcccggggaaagcgtaacgctagcagatattcaaggggctggctgtatcacccatatctggatgacgcaattttgtcgccgcgtgctgggggcgagtgttattgatcccaaaatgggccaatggattgcgccagtcaatgaaattcacaatgcgttgggcgtgtgttgggaagtggccgatccccattattaccgcaaagtgctaattaaaatgtactgggacaatgctgaagaaccgagtgtggttgtgcccctgggggactttttctgtattggtcactccatgcccggtaatattaataccctcccgattaatatttctaccaagcctgaagaacgctataagtttggcggcagcgcggcactgaactgtttctttccaatgccgtttaacacgcgcgccgtcatcgaaattgaaaatcagaatgatattccctatgggcagtatttttacatcgattatgaaatgtatgctgaagaacacaaggatgatatcgcgtattttcatgctaactggaagcgcgctaacccatgcaatggctggggacccgagctgcaaaccaatagcccggaagtcaatatctcaactttgagcgctgaagggaactatgaagtgcttaatgttgaaggcgaggggcattatgtcggctgtaatttatcggtcgctcatttccagggaagctggtggggggagggtgacgacatgatatttgttgatgatgatacatggccgccgagtatacacggtaccggcacggaagattactttaatcatgcctgggggatgcaggataacgcgggtttatataatggaacagcattacacgaaagcatcgttcccggcttccagacaagctataaatttcatattaccgatcctgtacatttcaagaaacgcattcgcgtaacaattgagcatggtcacgccaaccatctttgtgatgactgggcctctacggcttactggtatcaaaaaaagccaggcgctgtcactatccagcctttagatgaacgtattcctacgacccctggcgatattgaacgtcggggtattggtaaatcaacgtgcgaattgaccgcagagcagcaaatgcagaaggacacggctaaacggcgcttcgaagagtttatgaaaacccgacaaattgaaatcgaagccaaattaaaagccacccgagaaaaagaagccggcaataagaagcacgcgcaatttatcgcacgcaaggtgaagtaa

SEQ ID NO: 178796 - DNA, 1101 bp, Klebsiella oxytoca
atgaaccgtgtcactttcagcgtggtcgccatcatgttattagcgtcagcaacaactttgccgtttgtgttaaatgccggatttggtcaggcgccgcagggcgcgcagctcagcctggtggagcagtcgccgcactatcatgacggtcagtttcacaatcagcttctgacgcctggctttaccgggcaaaaaaatatgctggccgcatggtgggagtttctggtcgccaaacgtgaaaatgccagaccggcccagccgctgccgctggtgaacaccgatctggcgggcttaccgtcagggcaggacgtgatggtctggctcggtcactcctcctggtatctgcagctggcgggcaaacgcatcctgatcgatcccgtatttagcagctatgccgcgccgttctcgtttattaataaggcctttgccggggattacccgtggcacgctgagggcatgccggatatcgacctgctgattatctcgcacgatcattacgaccacctcgattacgccaccatcaaagctctgatgccgaaggtcaagcgcgtggtgacgccgctgggcgtggggtcgcacctgcgctactggggaatggagagcgcgataatcagcgaggcggactggaatcagtcgctgcaggtgagcgatgagctgacggtacacgtcctgcccgcgcgccacttttccggccgcggcctcaagcgcaaccagaccctgtgggccagctttatgttcgttaccccgcagcagaaaatttactacagcggcgacagcggctacggcccgcactttaaagccatcggcgaacagtttggcgaagtggatttggcgatcatggaaaacggtcagtatgaccaggactggaagtacatccacatgatgccggaagagacggcgcaagccgctgacgatgttcatgcacgcgcggtactgccgggtcacgccgggcgcttcgtgctggcaaaacacacatgggacgatccgtacaaaaggctggcggaggccagcacagggcgaccgtggcgactgctgacgccaatgttgggtgagccggtttgggtcgctgataaaacgcaatcatttaacgcctggtggcgctaa

SEQ ID NO: 178797 - DNA, 582 bp, Klebsiella oxytoca
gtggctcgtcctaagagtgaagataaaaagcaagcgttactggaggccgcaaccgccgcctttgcccaatcgggaatcgccgcctcaacctccgccatcgcccgcagcgccggggttgccgagggtacgctgtttcgctactttgccaccaaggacgatttgctcaacgagctttatctgaccataaaagcagacctggttcagacaatgatagcgggtctcaacccgaacgagacccggccaaaagagaacacgcgcaatatctggaatagctatatcggctggggcgtgcgtaaccccatggagcataaagcgattcgccggatggcgctgagtgaacggatcaccgacgaaacccgcaaccgcgtccaggagatgtttcccgagctcaatgaactgtgccagcgctcaatcaaacccgtttttcaatccgacgagtaccgtaccttcggcgatgcgttgtttctttcgctggccgaaaccaccattgaatacgccagccacgagccggagcgcgccgtccgttttgtcgagctgggctttgaagccatgtggcaggcccttgccgaggacaatagctga

SEQ ID NO: 178798 - DNA, 654 bp, Klebsiella oxytoca
atggatatcgtatcggttgccttaaagcgctactccaccaaggcatttgacgccaccaaaaagctaactgccgagcaggcggaaaacctgaaaacgctgctgcagtacagcccgtcaagcaccaactcccagccgtggcactttatcgttgccagcagcgatgaaggcaaagcgcgcgttgccaaagcggcgagcggcacctacgtgtttaacgaacgtaaaattctcgatgcctcccacgtggtggtgttctgcgccaaaaccgcaatggacgacgcctggcttgagcgcgtggtgaaccaggaagaggccgatggccgcttcgcaaacgccgacgccaaagccgcgaaccataaaggccgcaccttctttgccgatatgcaccgcaaagagctgcacgacgacgatcagtggatggcgaagcaggtttatctcaacgtcggcaacttcctgctgggcgtggcggcaatgggcctggacgccgtgccgattgaaggcgtcgatttcgcgattctcgatgccgaattcgacctgaaagcccagggctacaccagcctggtggtggtgccggtcggccatcatagcgtcgaagacttcaacgctacgctgccgaaatcacgcctgccgcaggcgacgaccattaccgagatttaa

SEQ ID NO: 178799 - DNA, 843 bp, Klebsiella oxytoca
atgacattattagtggctttttcatccacgtatcccatcatttggtggtttggtcttggggcgacaggcgctatcgtcgggagttttctcaatgtggtgatctgccgcttacccgtaatgctcgagaaacactggcagcgtgaggcgttgctgcagctgtcactgccttcatctgaacccacggcgcgctttaatctggtattgccgcactctcgttgcccatattgtcatactcctgttgccgcaagggataatatacctctgctgagtttcctgttgttaaaaggcaaggctcgctgttgcggcgcgcctatttccgcgcagtatccgctggttgaggcggccaccgccgcgctgtttgtcttaaccgcgcgtgtatttccgccggggctggcgctgtgtggcgcctgggtattcgtctcttttttattgatcctggccgttattgattatcaccaacagctgctacccgatgtcctgacgctgcccttattgtggatcggcttactgtttaatcttcagtcgtgttttgtttcgttgccgcaggcgacgattggcgcagtggcaggatatctctgcttgtggtgcctgttctggctcttcaagctactgacaggcaaggatgcgctgggctatggcgattttaagctactggccgcgctgggggcctggctaggctggcaagcattaccccatgtggttttactggcggcgataagcggattgctgtttgcgttcgtacagcgaggaggggcaaaaaaagatctcaatcagccgctggcattcggcccgtggctggcgttagccggtgtggcaaatatgctgctatttcagggtatttga

SEQ ID NO: 178800 - DNA, 741 bp, Klebsiella oxytoca
atgagccttaaactcaagaagctggtgcttgtattggtctgttatctgctgctgctggcgggaaatgcccctgccggggtagtgcgcgtttttatgcccgccgatattaaggccggtcgcttttccgggtctttatggcaaggtcgcgtgtaccagctcacctggtgcaacgttacgattgaagacgtccattggcagctcactttctcctcctggcgaccggcaataaaagtcgcgttgcgggatccccgtggcttgcagggaacaggaactttacgcggttggcacgatcttgaatggtatgagtggcaactttccgctcctgccgattttgtccgccagcagctgccgctggcgttagcgatgaccctcaaaggggggctgcagctgcaattgcaccagggggagtttacctcccatggctgccagcgtcttggcggcgtcatcaagtggcggcaggctcagatggcgacgcctctgggcgatttggatctcaccgatgttgacggagagttgagctgcaacggaaaaggggaactggcgttggtcctgaaacaggactctcctcatctgaacatcgagggaaggggagtcgtgggggctggcggcggctatcgatttaacggactggtgcggagcggaccgatgctgcctgaggccatgaaaccattgatagcgaaggttggccgggctaacgagcggggccagatagcctggcagacgcaggggcaattattttga

SEQ ID NO: 178801 - DNA, 495 bp, Klebsiella oxytoca
atgaatacatttaagcgctactggcaacagcttagcctacgggagcgtgccctggtattggggtgcggaggcctggctgtcgcgtgtctgttttattacatcctgtggttaccgtggcggcagcaggcggcgcaatggcagcgcacgattgccgatgaaaagagcacgatagagcggatgttgcagctggcgccacgtatacgccaacaggatacacggccgctatccgcccgtgacgaaaacctcagcgtgtcggcggttgttacgcagagcgcggcagctcagggggtgagtatcacgcgtattcagccgcagggacaacagctggcaataacgctggagcccggcgactttaacggattcatgcattggctgattactctggagcaacagcatcgcatccatattacggccctggaggtggcagcgtaccgcgataaaccgggatgggtagcggtaaataaactgacgctggagcgtaaagatgagccttaa

SEQ ID NO: 178802 - DNA, 1206 bp, Klebsiella oxytoca
atgaagagcaaaaaatcgcgtctacaggcccggttgatactgcatttgcccggtgatgaaaaacagcccgtgcggtggtctttccgttcgccagacggggatgagcaaggcgaactggcgacgggggaaaacgatgagagattaacgcatcttttcgcgacttatccggcacatatcctggtccctgcgagtgagtttgttttccatcaagtgacgcttccgcctaacgccgggcgccagcgtctgcagctactgccgttcatgctcgaggagcagctggcaacggaggtcgatgggcttcattttgccattttacaccagcgcggcgaggtatgtgacgttgcggtagtcgacaaacgcgatatgcatcagtggatcagccgttgcgatcggctaggggtacgggtgctgacaatgcttccggatgtgcttgcgctgccgcgggtcgaccacggctggagcgcggtgaacgtcgatgatcggtggttatttcggcgagaggctcacgccgggatggcggtggaatcgtcctggctacccgagtttttggccatctggagtccgaaggtgattgagagctattcccaaccacctgcgttaagccccccttgttgtgaatggcgagcgcatacgccgcagaattttctgcaactggcggccgggggcgaaccctatgatggcgccgatcttcgtcagggtgaatttgcccgcgtcgggactttgcgagcgggactacggccctggcggccggtgatgatgttattcaccggctatttactcttgtcgtgcgtgaatgccggtttatctcactatcagctgggacaacaggcagaccattggcggcaggaaagccgtcgggtctaccaggcgctgttcccggcggataaaaatgtgcttaacccccgtacgcagctgcaaaagcacctacagcagctacggccgaccgggcaggatggactggctgtacacatgcatcagttgcaacaactgatggcgaagcatccgcaaatcgagttgcgggcgttgtcctatgatgccgggcgtaaaacgctgaaaattgatctctatgccgcatcttttctggtgttagagcagttccagagcggcgcggggcaacattatcgggtgcagccgggcgaggttaaacagaatccgcatggggtcgagagccggctgacgctggaaataaaagatgaatacatttaa

SEQ ID NO: 178803 - DNA, 987 bp, Klebsiella oxytoca
atgaagcggcggcaaagaggtgtagcgttgctggtggtattgctgattctggcgctcatggtgaccatgtcgacaacgatagccgagcgtaatggccgagcctggcagcggacgatggctcaagtggagcgtctgcgggcgaaatggtatgcccggtcggcggaatcattggccgcaaaaatactacagagagacgcatctggttcaccgaataaaacggatttagcccaaaagtgggcgcagggacctcgccgttttaccattgatgatggcgaagtctccgggctgatcgttgatggacaggcctgttttaatctcaatgcgattaaccaggggggcgccggcgagggaaggcggtcgacgttaccttactccagacaggttttcagacaattactcatcaacctgggtgagggggcattacgtgcgacgcagataaccgcagccctgagcgactggatagacagcgataatgcgccgggaatcaaggggagtgaagatgcgcgcgacgggccgcaatcggcgccttatctacccgcgcatcaaccgatgcaggatatcagcgagctgcggaccgtttctggcgttgatgccgaactttatcgtcgccttttgccctatgtttgcgtactgcctgtccagacgctgtcgataaatatcaatacgttgagcgagtcgcaaagtcccttattcgcggcgctatttgtgggggaactggatcccgcgggggcgaagaagctgctacagcaacgtccgcacggcggctggaatagcacaacagcatttttggctcaggaggcgcttaaggacagggatacctctgcgatcaagtacgtattgaccgtaaagagcgatctgttttttgccgattttaatgtgcaggtgggggacattcactatagccagcgcagcctgttgagcaagtcgggtcatcgcttcctggtgatacgacgacagcctggattcagcatgctgagggagccctaa

SEQ ID NO: 178804 - DNA, 600 bp, Klebsiella oxytoca
atgagccgttgccgcgaacgaggttttacgctgctggaaatgttactcgcattagccatttttgcagcgttgagtctcagcgctttccagatattacagggggtgatgcgcaatgatgagatggcacagcgtcaggtacaacggttaaccgagcttcagcgcgccttcgtttacctggagggcgactttggtcagatcatcccgcgccctccgcgaggggatgaacgactgttctacgctgctcgttatcagcgccaaagtgcggactggagcatctccttcatgcgtaacggttggcaaaacccgatgggaatattaccccgctccgagctgcagcgggtggggtatcgtctgcgccatcagcagctggagcggctgaactatgttcatacggatccgcaggctggggaagagccaatcgtgaaggttttgctgaaagacgtgagcgcttttcgtttgcgcttttttgccaacggtatgtggcgcgatagctggaacgacacaacgcgtttacccgagggaattgaagtgtcgttagtcgtggccgacgtgggtgaagtgagccgcttatttttcgtcacgaccggagagcaagcatga

SEQ ID NO: 178805 - DNA, 366 bp, Klebsiella oxytoca
atgaataaacaaaaagggatgacgctgctggaggttctggtggcgctggccatttttgccctggccgggctgaccctgctgcaaaccaccgcccagcaggccagaaacgctggcatgatgaaagagaaaatgctggcaagttggctggccgataatcaacaggtcagattacatctcaacaaactatggcccgaaaaaagcgcgacgggcgcttcggtgacctatgccggagaagagtggtatctcagctggcagggggttgatacagagctcagccagctacgggcgctggatattgaagtgcggcgccataaacaagatgccgcggcgatattttctttacgcagctacgtggtgcacgaatga

SEQ ID NO: 178806 - DNA, 552 bp, Klebsiella oxytoca
gtgcgtcagcgtggttttaccgtgctggaaatgatgcttgttgtgctgctgatggggagcgcggccagtctggtcatcatgtcatttccggccatgcagcaggataccgcggagcaacagttgcaacgctttcaggcgcagctggagtttgccatggatagcggtatgcaaaacgatcggctactggggatccagattcggcccaatggctggcagtttcaggtgctgcaaagccaggcggcggaaacgcgttcttcggttgcgcattcggatcgttggcaggactatgtctggcaaatatggcaaccgcgtcaggctgcgttaggcggccaggttccggataaccagccgctcacgctacgtctccctcctctgcaggagtggcagccaaccgcggaaccggcggcggaccccgatattttgctattgcctggcggggagattacgccctttacattaattttcggtgagaaaaacgatcgctccgaagtctggctgcgggtagatgaaagcggcgcgatcgcgacatcggcaaagggaggcgcgccatga

SEQ ID NO: 178807 - DNA, 429 bp, Klebsiella oxytoca
atgcggcgacagagtcagcgtggttttacgctgctggaaatcatggtggtcattgtcattatgggcattctggcaagtttagttgtacctaatctgatgggaaataaagataaagccgatcgtcaaaaagtcgtcagcgatattgtggcgttagagagcgcgctggatatgtataaattggataacagccgatatcccaccacggagcaggggctgcaggcgctaatcacgaaaccgtcggtaccacccgaagcgcgtcattatccccaggatggttatattcgccgtttgcctcaggacccgtggggtggggattatcagctagtcagcccgggtcagcacggacagatagacatattctcctccgggcaagatggcgtgccgggtactgacgatgatatcggtaactggacgctgggtaagaaatag

SEQ ID NO: 178808 - DNA, 1221 bp, Klebsiella oxytoca
gtgttattccactatcaggtattagacgagcggggtaaaaagcggcgggggagcctggaggcagattccgctcgtcatgctcgtcaacgcttacgagaacaagggctggttccgctggcgctggtcgaagggctgaatgaggccgggcggaataaacgcgggtggcgtatttcctggtcgcgtggaataagcagcgccgatctggcgctgctgactcgccagttggcgacgctggtcgctgccgctttacctctggaagatgcgctggatgcggtggcaaaacaaagtgaaaaaccgcgccagcgtagcctgatggccgccgtgcgtagcaaagttcttgaaggtcattcgctggcggaagcgatggcaggatatcctgccagttttgagcggttgtactgcgcgatggtggcggcgggtgaagcttctggtcacctggaccaggttctgaatcgactcgctgattacaccgaacagcgccagcaaatgcgcgcgcgcatcatgcaggccatgatttatccctgcgtgctcaccgttgtcgctattagcgtcgttgccacgcttctttctgcagtcgtgcccaggatcgtcgagcagtttattcatatgaagcaggcgctaccgctatcaacgcgagtgctcatggcgatgagcgacggggttcgcacttttggtcccgggatactgttgctgctgttcgccgggctagtgctgattcgtcgattgctacgccatgaaagtcgacgtattgcttttcatcatcggctgctgcgcctgcccattattgggcgcgttgcccgcggcctgaataccgctcgttatgccagaacgctgagtattctgaacgccagttccgtgccgttgctgcaagcgatgcgtattagcggcgaggtgctcaccaacgaatatgcgcgtcaacagctgtcgttagcgacggaatcggtgcgcgagggggttagcctgcatcgcgcgctggaaatgaccgaactctttccccccatgatgcgccatatgatcgccagcggtgaacgtagtggggaactggacagcatgctggaacatgctgcggataaccaggaccgggaattgacgtctcacatgcaattagcgctggggctgtttgaacctctcttgatcgttggtatggcggcaatagtgttatttatcgtcatcgccattctgcaaccgatcctgcaattaaataatttaatcagcatgtga

SEQ ID NO: 178809 - DNA, 1500 bp, Klebsiella oxytoca
atgcctgttgccgacgtgaataaaccgcatccgcagcttccctttgcctatgcgcatgctcaacgcattttactgcagtgggagaatactgaatgccgggtgctgcgtgtcgtggaaacgacagccgcagcgttgcttgaaacccgtagggttgccgggtgtgccctgaatattcgtacgctatcgaatgcggagtttgagaaacaactgattagtagttaccagcgagactcaaccgaaacgcggcgactgatggttgatatcggcaacgaagtggatttttataccctggcggaagagttacctgacagcgatgatttgctggatgccgatgatgatgctccgataatccgtctgattaatgccatgctgaccgaggcgattaaggataaagcgtcagatattcacatcgaaacctatgaacgtcatttgcaaattcgctttcgggtagatggcgtactgcgtgaaatattacgccctcagcgccgtctggcttctttattgatctctcgtattaaggttatggcgcggttggatatcgcggaaaagcgtattcctcaggatgggcgcatggcgttacgcattggcggccgggcgattgatgtgcgagtgtcgactttaccttctcattacggtgaacgaattgttctgcgtttgctggataaaagcagcgtgaatttggatctgtcgacattaggcatgtcattatcgcaccagcagcagatcgatgaactgattcagcggccgcacggtattctcctcgtcaccggtccgacaggttcagggaagagcacgacgctttatgcggcgttgagtcgtctcaatgcgagtgaacgcaatattatgacgattgaagatcctattgagtatgagctcgaggggattggccagacgcaggtaaacgccaaagtggagatgacttttgcgcgcggtttacgcgccattctgcgtcaggaccctgatgtcgtactggttggggagatccgcgatagtgaaaccgcgcagattgcggttcaggcatccttgaccgggcatttggttctttcaacactccataccaacagtgcgttgggggcattatcacgtctgcaagatatggggattgaaccttttttactgtctacgtcgttattggccgtattggcgcagaggctggtgcggactctttgccccgattgccgccagccctacttagtcgatcccgcgttggcccatcagatggggattgcgtccggagctcgcttatggcagccgaagggatgtccgcaatgcggctttactggctatcgtgggcgtaccgggatacatgaattactgctgattgacgataggatccgtaccgcaatccataagggccacggcgagttcgcgattgcccgcttactggagcatgaatacaaaacgttacgctatgccgggctggaaaaagccctgtccggcgagacaagctgggaagaggtcatccgggtgactgaaaaccagtctcaggaaaaggagtga

SEQ ID NO: 178810 - DNA, 1980 bp, Klebsiella oxytoca
ttgttgaatataaaaataatcaaaagactctgtatcgtggtattggtgtttttttcgctggtcattcggcagggcgcggccgctgagttttctgccagttttaagggggtggatattcaggagtttattaataccgtcagcaagaacctgaataaaacgattattatcgatccggctgtacacggcacgattacggtgcgtagttacgataggctcaacgatgaacaatattaccagtttttcctgagcgtgctggatgtatacggctttgccgtggtggacatgaagaacggcgtgctgaaggtggtccgcgccaaagatgcaaaaaccgcggcggtacctcttgccagcgatgctcaaccgggaaagggagatgaagtcgtggcgcgcgttgtgcccgtcaataatgtgcctgcccgtgatttggtcccgttacttcgtcaattgaatgataacgccggggtgggcagcgttgtgcattatgagccttccaacgtcctgttgatgacgggacgggcgggagtgattaaacatttgatggaaatagttgagcgcgttgataaagcgggcgatcgcagcgtcgtcacgttaccgctggcctacgcgtctgctgcagacgttgtcaaaatggtgaccgaattaacccgggatgccggtaaatcagcgtcatcgggcttaatgatagcgaatgttgttgcggatgaacgcacgaattcggtattgattagcggcgagccgaattctcgtcaattaattatcgcgatagttaagcagctggatcgcgaacaatttgttcagggcaacaccagagtcatttacctgaagtatgccaaagcgaccgatttggtcgaggtcttaacggggatcggcgacactattcagggcgagcaaaagagtgctaaaccggccatcgcattacgcaaagacattactatcaaagcgcatgagcaaaccaactcgctgatcctgacggcggccccggacgttatgcgggatttggagggggtgatagctcagctggatattcgtcgcgcccaggtcctggtcgaagcgattattgccgaagtacaggatgctgatggtctcaatctgggcattcagtgggccaataaaaatagcggcatgtcgcaatttaccaatacgggcctacctattacgaccgcaattgccggagccaatcaatataaaaaagagggcgcggtggatagctcgattgccagtacgctcaacagtcttaatggtattgcggccgggttttatcagggtaattgggcgatgttattgagcgcgctttccagtaatagcaagaatgatattttggcgacgccgagcatcgtgacgctggataatatggaggccatgttcaatgtcggccaggaggtaccggtgctctccggctcgcaaacaacctctggcgataacgtcttcaataccgtggagcgcaaaacggtcgggattaagttgaaggtaaagccacagattaacgaaggggattctgttttactggaaatcgaacaggaggtttccagcgtggctgacgccgcctccagcagtagcgctgacctgggggcgaccttcaatactcgcacggttaataatgcggtgctggtgggaagtggcgaaacggtcgtcgtcggagggctgctggataaaagcgtgacggatagcgtggataaagtcccggtgctgggagatattccggttctgggttacctgtttcgctctaacagtaaaaaagtctccagacgtaatttgatgctctttattcgcccatcaattatccgcgatcgcgatcagtatcgtcatgcatccgctgataaatatcatgcttttaatcaggaacaaattcagcagcgtggtcatcaggataaccccgcgacgttaaacaatgacgtattaaagctgcctccggatcaaaatggcgccaccttcctgaaggttcgcgcggcgattagcgcattttattcgcaggaggggtaa

SEQ ID NO: 178811 - DNA, 858 bp, Klebsiella oxytoca
atgcaattatctggcaggttgctggcatgcagagaagcgacttcgcggtttttgactccgcgttggatgatatggggattatcgctcttgatattaaatcagctcgctctgctgagctggcggagctggctggctgacgatatataccatgtggacctggcgaaagcgaaagccaatcccgctccagcaaaaccagatcgcggaattgcggcggaaaacgatcgttttaccctctttgggacttcgtcgcccgcttcctccgcctcaggccaatcggtatccgacaatattctccgtcatgcgccgccgtcgtcgctcaaactccgtttggccggggttgtggtgagctccgaccctaaaaattcgatggcgattattgccaaagatagcaagcaattgacgctttttgtcggtgacagcctgccgggttattctgccaaaattatgtctattctttctgatcgcattgtgatttcttaccaggggcgctatgaatcgttattgtttaatgaacaatcggaggccggaagaagcatcaataaatcatcagtagcgcaaatcaagacccggttgcaaaaacacccgcaaaatattcttgattatatcaaggtggcacccgtcatggtggagaacaaacttgcaggctatcgccttaatgcaggtaagaatagggatttattttatcaatcaggtttgcaggacaacgatcttgctattgtgcttaatggtatggatttacgcgacactcaacaggctcagcaggcactgaaacagcttgctgaactcagtgagttgaatcttaccgttgagcgtgacggtaagcgacagaatatttattttgtgcctggagatgattaa

SEQ ID NO: 178812 - DNA, 2688 bp, Klebsiella oxytoca
atgaaacatcatttttttctgaaaaatagacttacccttattactctggcaagtttagcgttactggcggggtgtgataattcggatgattatagcgagaatcattcctcacatcagcagtcatcgtatcttgaaaaatatcgccctcagctacagtttactgcggctaaaaactggcaaaacgaccctaacggcatggtttattttgacggcgaatatcatcttttttatcaatataatccgaatggcaatagctggggagatctatcgtggggacatgccgtcagtcgggatctggtccattgggaggagcttcccgttgcgctgccggtggaaaaagatgccgatggtaacgtcacgcagatgtatttttccggcagcgcggtagttgatttcaataatagcagcggttttggcaaagcggatcggccggcaatggtggctatgtacaccagctattatccaaccgacatgacgctggataatggaaagaccatcgcggcgggaacccaggcgcagtctattgcttatagcctggataaagggcgaacctggacgcagtatgaagataatccggtcatccctttaccgccagcgggctatgagagtcagtttaaggagtttcgcgatcctaaaatattctggtatgcaccggaaaacaaatggatcatggtggcggtcattgcgactcagcataaagcggtattttattcatcgaccgatttgcgtgattggaactttatgagcgaatttggtccggcgaacgccgttggtggcgtctgggaatgtcctgatttatttgaactgcctgttgatggtgacagtaataataaaaaatgggtaatggtcataaatatcaatcccggcgggcctgctggcggatcgggtaatcagtattttattggtcactttgatggtgaacgtttcacgcctgatgatgatagcgtgttcaacggcgaggcgcccgtcggttcactcattgccgatttcgaggaaagcgagagcgaatccggctggacggcaacaaaagatttgcaggggacttatctgtctaaaggcgaccgcgccgggcagtctggcgttagccagtatctgggagagcagctcgtcaataccttcgttaatggtgatgccagcgtcggcagcgtaacgtccccggcgtttaaaattaccgatcgctacatcaatctgctggtcggcggcggcaactatccgcgtaacccggatgcggttgaagacagcgttccgccttccggcgatctgctgtttgccggtgccgattttgagggggaagatggcgcaacctatgatgatattggttggacctcaagcggcgattttgttggtcaggtcgttgccagcggcacgatagcgacgcagcagcaggtttccggttttatgggcgggaaactggtcaacagctattttggtgaattagtgggtaaagggggagatgcggtggtggggaccctgacctcagcgaacttcaccatcaataaaccctacatcaacttcctcattggcggcggtaatcatccttatggcgcggaaggcgcggcggccgtcgtgctgttggtcgatgataaagtcgtcaggtcggcgaccggtagcgacagtgaatcgctgaactggacgcactgggatgtgcaagagtatcagggtaagtccgcccggataatgatcgttgatgaaaataccggtggatatggccatatcctggctgaccagtttatggccggggatgagccggcgcagccagtatcaacggagaccacggttaacctgctggtggatggcaaggtcgtttatagcgcaaccggggataattcggaaacgctgggctggcgctcctggaacgtggccgcgctgaagggagagatggcgcaaatccggattgtggacaatagcaccgccggttttggtcatgtgctggtcgatcacatcatacagtccgatcggcccaaacagattgcgaactggggggacttcgggtcggatttttacgcggcagtgacctggaatgacgcacctgatggtaaacgctattggcttggctggatgagcaactggaactacgcgggcagcattcctaccaccccgtggcggggcgggcagactctggttagagagttaagtttgcagacgattgataataagattcgcctggtacaaacgccggtggatgcgctgaaatcgctgcgtgataacgccttgtttaccctgtccgaggagaaggtggttgcccctggtgacacgctattagcggatagccaggttcagggccaggtgtatgaaatcgaggcggaactgcagccaggcagcgcgagcgaagcgggctttaaggttcgcacggggagccacggcgaggagacgctggttggctatgatgccgcggccggcgaagtgtttatcgaccgtacaaaatcgggagcgaatgcgtttaattctggatttgcggcccgccatagcgctccgctgccgttgtcggatgacgcctcggtagcgctgcgtattattgtcgatacttcatctgttaccgttttctcagggaaaggcgaggtcgtgctgacggatcagattttcccggagccgaccagtcaaggcattgagatatacagtaaaggcggagatataaacgtaaaatcgttgactatctggcctctgaaatcaatctgggcagataaataa

SEQ ID NO: 178813 - DNA, 861 bp, Klebsiella oxytoca
atgaagaacactataatgacgagacacgccgccgctcagggtgaaaaaaaattaacccgcggtgatattattaacatgtttatccgttcaaatttcctgctcggttcatttaactttgaacgtgtacaggcgatgggctactgcttcatcatgatccccgccattaaacgcctgtatgggccgggcgcggaacgtaatgaagccttgaagcgtcaccttgaatggttcaacacgcagcctttctgtactgcaccgattctgggggtgacaggggcgatggaggaagagaaggccaacggcgcgaatattgatggtagcagcatcagcggcgtaaaagtgggcctgatggggccgtttgctggcgtcggagatccgatcttttgggggacgattcgcccggttctcgcggcgctgggggcttccctggccctgggcggaaatgtgcttggcccgttgttcttctttttcgcttttaacgctattcgtctggcggtgaaatatttcggtttgaaatacggttatgaaaaagggcgtgagatattaaccgatctcggcggtaatcgaatccagaaactgaccgagtcagcgtcaatcctgggcctgtttattatgggagcgctggtttgtcgatggacaacgatcaatgtgccgattgtcgtctcccgcattaccggcgcggatgggcaggtcgtcgtgacaacggtccaggggatattggatcagctattgccgggtatgttaccgctgctgttaaccctgtttgtggcaaagctactccgtaagaaggtgaacccgctgctgatgattatcgtcatatttatcatcggcatttttggctactgggccgggttcctggcataa

SEQ ID NO: 178814 - DNA, 801 bp, Klebsiella oxytoca
atgaccactatacaaattatattgctgctggtgattgcagccattaccgggatgggtagcgtgctggatgaagggcaaacgcatcgtccacttgttgcctgtacgctggttggctgggtacttggcgatatgactaccggtatcattcttggcggtacgctggaaatgatggccctcgggtggatgaacgttgggctggcgatggcgccggataccgccattgcctcggtgatatcgaccattctggtgattaatacaaatcaggggattggcgaaggcatcgcgattgccgtcgcgttagccgctgcgggtcaggcgctgacgatttttgtcagaacgatgacggtgttcttgattcaccgggcggatacctatgctgaaaagggcaatatgcgcggtatcgaaatcatgcatatcactgcgcttggtttccaggcgctgcgcgtgatgattcccacctttgtggtggtcatgatgagcgttgattcggtgcaggccatgttgaacggtattccgccagtagtgacgcatggtctgcaaattggcggcggtattattgttgttgtgggttatgccatggtcatcaatatgatgagcgtcaaatatcttatgccgttcttttttgccggtttcttgattgcggcttttaccagtttcaaccttgttggtttagggggaatgggattagtcggtgcgttgctgtatatacagctgagtccaaaataccagcctaaaaccctgaccgccgtggcggatggtgggccggcttctttaaataataacgacgatttggatgcataa

SEQ ID NO: 178815 - DNA, 477 bp, Klebsiella oxytoca
atgaatgttttattatcacgtatcgacgatcgttttattcatggccaggtggttacccgttgggtaaaagcgtatccagccgatcgtttaattgtcgtctctgatgccgtggcggcggatgaattacgcaagtctctgctcatctctgttgctccttcaggcatgattgctagcgtggtgtccgtggaaaaaatgattaacgcctggcatagccctcgctacgcaggggtcagcgcatttctgctatttgaaaaaccgggggatgttctgcggttaatcgaaggcggcgtcgcgattaaaagcgtgaatgttggcggaatgcgctttgagaacgatcgcgagcaaattaccaaatccgtcagcgtaacctcagacgatgttgcggcatttcatgctttgcatgcgttgggcgtaagtctggaattacgccaactgccgtctgatgccgccgtcgactttatctccaaattaaaataa

SEQ ID NO: 178816 - DNA, 432 bp, Klebsiella oxytoca
atgaatacagcaatcatagttgctactcatggcgcagccgcaggacctttgattaataccactcagatgatcgtcgggcagcaggaaaatatcgctacgattgattttctacctggggaaaacgttgatacgttggtcactaagtttgaaaacgttctccagacgttggatcaacgagatggcgttatctttctggttgatatttacgccggtagccctttcaatgcggccagcctgctatcgatgaaaaaagataactgggatgtaataaccggggtcaatgttccgatgctgatcaacgtgtttttagagcgagagagcgtgggggaatacctgcaattagtcgatatctcaaaacaaacggcaagagatggcattaagtctctcaaatacagtttaaataacaataatacagaagaggatcatctttga

SEQ ID NO: 178817 - DNA, 2877 bp, Klebsiella oxytoca
atgaaacgaattgaccgggtttaccattggctgctggaacacgcagacaaaatgagctggcatgaaatgtgtttgcagagagggttcaatacccatgatattgctgacggactgcgtattttgcgaaacaatgtcagtttcgaactgggtaatttgttacgtatgcagcagatcgttaaagtgaaaggaagaccgatagcctacattcccaaagtcagcgttgaacgtgcgttgggtatcgctctgtcagaggtggagtttgacagttttgatgcgctgaatgcgctggtttctcctggcgggggagtcgcggcgcaggcgccggccgattcgcgggtttctgagcaccggagcgccgatccttttagtttgctgattggcttcgatggcagcttaaaaacgcaggtcgaacaggcaaaagccgctatcctgtatccaccgtccagcctgcatacattaattaccggaccgacaggcgttgggaaaagcctgtttgcttctgtcatgttcaactatgcctgttttgttggccgttttgatgcgaaaaaacccttcattgtgtttaactgcgcagactatgcaatgaacccgcagctgctgatggcgcatatttttggtcatatcaagggggcgtttaccggcgccggcgaggacaaagagggattggttgataaagctaatggcggaatgttatttctggatgagatacaccgattaccaccggaagggcaggagatggtcttctactttatggataccggtacctacagccggctgggggaaacggaaagaagacgtaccgcgagcgttttattggtgggggccactaccgagaatttagaatctgcaatgctcaagaccttcattcgccgtattccaatcatcattcatctgccaacattcgaacggcgcagcacccaggagaaaatatcgctgttgaaattcttattgaatagagaagcacagcgtattcagaaaccgatcagaattgatgtggaagcaatgaaggcgctgatcggtaatacttcttttggcaatattggccagatgaaatccaatgtgcagctggtatgtgcgaatggctttttacactgtttgcatcaagatattattgatatccgcttccgcgatctgcccagcgaaattaaaaacggcctgtttcatctcggcgcacggcgcgatgaaatgcagcagatcaatgattatcttgaggattttttagttattcagccgggaggcgagccgtcgccgctacaggaagacgatcaatatgaacccactttcaacctgtataatattattgaagacaaagttacctttatgcaggatcatggcctgtcccatgaggaaattacgcgctttattttactggacatcagcattcatctgaatactttttatatgaagtttcagaacaatgccgggatgcaggaaaatatattaaaagtagtcaatgaggatatcctgcatttctcacagcagatgaaaaaaatcgtggaacgggaattgaatcatcatctgacggagcgctttttattggcatttagtttacatctgacatcttttttagcgcgaacggaaaatcgccataccgctctgcttccccgtattgagcatctactgatgaaccaggggcaggagtatcaggccgctaaaatagtcaagcagcacattgaagacaaatttggcattgatgtgcctgtcgtcgaagagatgtatttaacgttgctgattagttctttgttgaaaacccagcaggaagagcgtgttgcggtacttgtcgtaatgcacggaagccataccgccagttcgatggctagcgttgcccaaaagttactgggtgagggcaatattgacagcattgatatgcctttggacatcagtcccaaactggtactcgatcaaatgcgccagcgtattaaagagctgaattgcaacaaaggcgtgctgctgctggtggatatgggatcgttgaatggttttggcgacattatcatgcaggaaacggggatacagatacgcacattaaccatggcttcgacgcccacggtcattgaggcagtaagaaaatcggcggtcatgggaatggagctggatgatatctacttttcgctgtgcgatttcaagggatatggcagttatcgtaaaacgacgcagcagctggatacatccatgctttatcagaaagtgaaggcgatcctctgcgtgtgctcaaccgggcagggaacggcggagaagctgaaaacctttgtcgacggtatgctgtgtaatatggaacgttgcgatattaacgtcatcgcgatgccgctgaatgaagtcgaaatacaaagagaccttttactcaaacgttacgagttcattatgtctttggggatagcagatcccagaatcaatgcccctttcttacctctggaaacgttgttttccagcaacggtgaggcgcagtttacgcttctcgttcaacggagccatttacagtcggttattcggccgcatgcgatggtgcgcaaaattagcgaggagagtatgaccgagtttctgacttaccttaacccgaaaaaagtggtcgatccggtgctggagtatatcagtgagctggagaagctggagggattcccctttgataatggcatgaaggtcagcattagcgtgcatatcgggagcgcgctggagcgaatggtacaacactgcggcctgaagtatgatggtgaccttagcgaagacaaccagaaaaaactggatacctaccagacgattgctcgttgcttccagaaaaagctggcgattaccctggatcgcgacgagcttagctacatcctggagatggtcgcggaactctccgagcgttcggctgcacaacaggaagatttatcgtag

SEQ ID NO: 178818 - DNA, 864 bp, Klebsiella oxytoca
atgacgaccatgccgcaacgtgaatcgacgatcgccgcgcccgatgacggccgtaaacagctgggggcgtttctgcgcgcccggcgtgagagcctcgatccgcagcgcctggggttacctcgcgtcggccggcggcgcacgccgggcctgcggcgggaagaggtggcgatgctggcggaggtcggcgtcacctggtacacctggcttgagcaggggcgggaagtgaatccgtccgaggccgtgctggtgtcggtggcgaacgcgctgcagtgcagcccgctggagacccgacatctgtttgtcctggccggactgacgccgccggaagccgcgcaggtcacggtatgcgaaggcatcagcccgggcacccggcggatgcttgatagcctgatgccgcagcccgccagtattcagaagccgagctttgatattgtggcgtggaacgacagcttctgccgcctgatgggcatcgatttcgccatcattccggaagaggatcgcaactgcatttatctgtatctgaccaatgaaacctggcgcagccgcatcgagaatcgcgacgtgctggcgacgtttgtctcctatttccgcgcggcgatggcggagcaccgcggcgatccgctgtgggagaataagctggcgcgctttttcgccgcgtcggcggagttcgaggcgctctggcatcagcgctatgaggtgcgcggggtggaaaatcaggtgaaacactttaaccatccgcagctcggacgcttcagcctgcagcagatgtactggtactcggccccgcgcaacggttcgcgcctgctggtctatttgccgatggatgaaacgggcgagcgggcgctggcgtggctggataaataa

SEQ ID NO: 178819 - DNA, 684 bp, Klebsiella oxytoca
atgatgaaaaaaatccttgtcatcggattatgcgggctgtggatgccgcccgcgtctgcggtgtactttgactctattatctatgatatggatgccagtaaagattttatctcccggccaatagtcaatgatacaaaaaacaacaatttgtataccatatcggcttataaaatctcccgaccgggcaatggagatgaaagacccgttcccggccaggataaagatctggtctggtcgccgctgaagttcacggtacaggcgaatggccaggaatattttaaactctattaccgtgggcctaaagatgccgttgagagatattatcgggtaatttttaaggaaaccccggttacgattttcccctggcgtcaggatcagaaacaaatggatgtcgttccctcagtgtctatgagcaccattctcatcgtgcgcccgcgtaaaacgcagttcaagtatgagataaacgaagaaacaggcactattaaaaataccggtaacaccttttttagagttgttatccagaaaggatgcaatggtgatgatgaaagttcaacgcaattttacatgctgccaggggaaagctggaaagatcctaaggctcaatacggtaataaaaaatttattgtcgcactgggtaaataccatcgcttaggaagcagctgctttaccgatgcctctgactaa

SEQ ID NO: 178820 - DNA, 2238 bp, Klebsiella oxytoca
atgaaacgcactctcccggcgctggccgtctctgccaacttaagcggctgcgccgcaccggctttcccgctgcggaaaacgctgctggcgttaaccattggcgcaatctcccattcggcaacggcggcggaaaacgtcgccgaacgccagaaaagcgaagaaacgatggtcgttcaggccgcatccgccagcgattttaaagccggcggcgatttgatagtgcccgcctatctcgatggtcagatagccaacggcggccgtctagggatgctcggcgaacaaaacgcgatggacgttccgtttagcatcatcggctatacctcgaagcttatcgaggatcagcaggcgaaaaccatcgccgatgtggtcagcaacgatgccggggttcagccggtgcagggctacggtaactacgccgagacctaccgcattcgcggccttaaatttgacggcgatgatatgaccctgagcgggctggcgggcgtggtgccgcgtcaggtggtggataccgccatgcttgagcgggtcgaaatttttaaaggcgccaacgctctgcttaacggtgcggccagctccggcgtcggcgggatgatcaacctggagcctaagcgcgcggaagataccccgaccgcccgcgtgggcgtcgactatacctcggattctcaggtcggcggtacgctggatttgggccgccgctttggcgacgacaaccagttcggcgcgcgggtgaatctggtgcaccgcgaaggcgaggcggcggtggagagtgataagcgcagaaccacgctggcctccatagggctcgattatcgcggcgaacggatgcgcagctcgtttgactttggctatcagaaaaaaaccttccacggtagcccgatgggcatcaacatttcgggcgtcgattttattccgcgcctgccggataacacccacaactacacgcaaaaatgggcttacagcgatatcgaaaatgagttcggtatgctgagaatggaatacgacattgtcgataaatggaccgcctacgccgctctgggggcgcagcatgcccatgaaatcggtctctatagcgcctcgaagctgattgaccgggcgggcaacgccacggcggggcgcctggacaccaaccgctatatggataccgccagcggcatggccgggatacgcggcgaattcgccaccggttttgtgtcgcacaaggtcaacatcggctattcggcgaaaacccagaacgacaaaaccgcgtggcggatgtcgaaggcggcggataatccgctggtgaatatctacgatacccgtccggttgcgcccccggcgaacgcatcattcggcggcgactatggcgatccgctcaccagcggccgcacccgttcccagggctggctgctgagcgacaccctcggcgtgctggacgatacgctgctgttcaccgtcggcgcccgtcatcaaaaagtggtggtgcgcaactacgataaagtcaccggcctgcaaagcgatgcgtatgacgatagccgctggatgccgacctatggcgtggtctataagccgtggcaggttctctctttatacgctaaccataccgaagccctgcagccgggcagcaatgcgccaacctccgccgctaactatggggaaagcgtcggcattattcactcaaaacaaaacgaagtcgggatgaaggcggattttggccgcattggcggctcgctggcgctgtttgaaattaaaatgccttccgccttcctggatagccagaaacgctatggccttaacggcgagcagcgcaatcgcggcgtggaatttaacgttttcggcgaaccgctgtacggcctgcgccttaacgccagcgcgacctggctgaaagccgaactgtcgaaaaccaaggatggcgtcaatgatggtaaaacggccatcggcgtaccgggcttctacgcggtgcttggcgcagagtatgacatcaaacctatcgacggcctgaccgccaccgcacgcctcaatcactcgggttcgcagtatgccgaccaggcgaacagcaagaagattgatagcttcacgaccctggatctcggcgtgcgctatcgtctggcgcttaacgagaaccagaatcagatgacggtacgcgcgggcgtcgataacgtgacggatgagaactactggtccggcgcagacgacagcggaacctatctgttccgcggcgaaccgcgcacgttcaaggtttcggtcggctacgaattttaa

SEQ ID NO: 178821 - DNA, 483 bp, Klebsiella oxytoca
atgaaaaagattctttcactggcgattattctatcttgtgctttgacttccgtctcctgggcggatggtcctggcggcaacaaccgcggtcagcagcaggtctggcagcaagacgccggccgcggcggcccggacggcaaccgtcagcaggggccgggcaaggggccgcaggccaacaatcatcagggtaacgacgataaccgtggcccgtcgcgcggtgacaaggggccgcagggtaactctcatcaggagcgccatgagcgggaccatttcgcgtggaacggccatgattttcgcaaaggtcagccggctccggaacgttatcgcggcaatgattaccggataaacgactggaacgatcgcggattaccggcaccgccgcacggacaacactggtcctatattgacggtaactatgtgctgattgccgccgcgaccgggattattacgtcgatcctgattaacggcgcgctgagccactaa

SEQ ID NO: 178822 - DNA, 1119 bp, Klebsiella oxytoca
atggcaagaaaatcagtaggttcgtgcatccttactgccctgatttccactcctctctgtagctttgccgcgcaatatccgctcactgtcaccgatctcgacggccgcgcgattacgctccagcatgagccacagcgcattatcctgcaggatggtcgcgatattatggccatggctctgctcgaccgcgacaaccccttcaggcgcgtcgtggcatggaataacctggccagaaaacaggacatcaatacctggaaaatgctgcaagagaagtggccgcaatccgctcagatcctcgatatgggctttagcgataagggcaacgttgaccttgagagcgtcatttcccgccagccggacctgatgatcgcccagcttcgcgcgaagcccgcgctggaggagagcggtgtcatcagcaagctcagcgcgctgaatattcccgtgctgttcgtcgattatgaaatcaaccccggcaaagacaccgccccgagtatcgatctgctggggaaagtccttaaccgtgaagaaaacgccaaagcctataccgactattaccgtcagcagctggacgccatccgccagaaaaccgcgaacatcacgccgaaggctaacgtttttgtcgaggcgctggcgggtaatagcgatgcctgctgctttacccacggccacaacggctggggcggtctggtcgaagccgtcggcgcgaacaatatcggctcgcagctgctgccgggcgcttccggctttgtgtcgctggaaaaagtgattagcatgaagccggatgcctatattatgaccggttcaaaacgcgggaatagccaggtgctgccgctcggtttacaggccgatccccaggaggtcaatcgtcaggcggagcggctgctgtcgcgcaccggcgtgagcaacatcccgacgattgaagcaaaacgcgcttacggcatttaccaccacttctacaaccatccgtggaatatcgtcggtatggcgtatctggcgaaggatatctatccccagaccttcagcgacctcaaccctgacgatagctggcactacattgtccgtcatttcaccacacttcccgatctgccgtttgttttttcctggcaacaaggtgagtaa

SEQ ID NO: 178823 - DNA, 1083 bp, Klebsiella oxytoca
atgagtctctctcctgaatccgatatcgtcgcgttcggcgtcgatagccgtgacgtaatggcaaactaccgtcacattgtgcgccaccgcgccatcatgctgctgctgctgacgctgttgattgtcgcctcgctgctgctcgacttcgtgatggggccatcaggcctgtcgctgcaggcgctttggcaaacccttaccgacccggccagcgccagcgccgggacgcgggcgatcgtctgggatatccgcatgccctatgcgctgatggcgatcgtcgtcggcctggctctcggcctcgccggggcggaaatgcagaccatccttaacaatccgctggcgagcccgtttacgctcggcgtctcctcggcggcggcattcggcgcggcgctcgctatcgtgctggggatagggattcccggcattcccggccagtggtttgtctcggccaacgcttttatcttcgctctgctggcggcgctgctgctggacggtattacgcgctggacccaggtcgccacctccggcgtcattctgttcgggatcgcgctggtgtttaccttcaatgcgctggtatcgatgctgcagtttgtcgccaacgaagataccctccaggggctggtgttctggacgatgggcagcattgaccgcgcctcatggcaaaaggtggggatcctgcttgcgatactggcggtcgtcatgccgctatcaatgcgcagcgcgtggaagctgaccgcgctgcgcctcggcgaggaccgggccgtcagcttcggcatcaacgtgcgccgcctgcgcctgaccaccctgctgcgcatcagcgttctgtcggcgatttcggtggcgttcgttggcccaatcggttttatcggcctggtggcgccgcatatcgccaggctggttttcggcgaagatcaccgcttttacctgccggccagcgcgttaatcggcgccctcgtcctgtcgctggcttcggttgcggcaaaaaacctgattcccggcgcagtgattccggtgggcatcgtcacctcgctggtgggggtgccttttttcctgagcatcattttgcgccatcgggggcacgtatga

SEQ ID NO: 178824 - DNA, 792 bp, Klebsiella oxytoca
atgagccatgttgtatccggactggcgctgacccatttcagcgccggttatcccagacgtcaggtgattcgcgacctgacggtaccgcggctgcagcgcggtaaaatcaccgcgctgctcggccccaacggcagcgggaaatccaccctgatgcgggcgatggccgggctggggccgtccgcgggcgagctgtcgctggacggtgagaatctgcttgccctcccctttgcccggcgtgcggaaaaagtggtctacctgccgcagacgctgcccgccggcgtgcacttgcgggtgctggagtcgattattgtcgctcaacgcgccgccggaggagcgcacagcccggaaaatcaggcacaggtgatgtctctgctgcgccagctaggcattgaacatctggcgctgagctatctcgaccggctatccggcgggcagaagcagctcgtcggcctggcgcaatcgcttatccgtcagccagccctgctgctgctggatgagccccttagcgcgctggatttaaactatcagttccacgtgatggatctggtgcgtgaggagacgcagaggcgcaacatcatcacgctggtggtggttcacgacatcaatatcgccctgcgccacgcggatcacgtgctgatgttgaaagagggacaactgctgggggacggcgcgccggccgaggtgattaccccgcaggctctggctgcggtttacggcgtgcgcgggcgcatcgagccctgttctcagggggtgatgcaggtgattatcgacggtctggcggcgggggcttaa

SEQ ID NO: 178825 - DNA, 1005 bp, Klebsiella oxytoca
atgaaaaccaaacgcgtaactattaaagatatcgccgaactggcgggcgtttccaaagcgaccgccagcctggtgctgaacggtcgtggcaaagagctgcgcgtggcgcaggaaacgcgcgagcgcgtgctggcgattgcccgcgagcagcactatcagccgagcattcacgcccgctcgctgcgcgataaccgcagccacaccatcggcctggtggtgccggagatcaccaactacggctttgcggtcttttcccatgagctggagatgctgtgccgcgaagcgggcgtccagctgctgatctcctgtaccgatgaaaaccccggtcaggagagcatggtggtcaataacatgattgcccgccaggtcgacggtctgatcgtcgcctcctgtatgcacaacgatgccgactacctgaagctcagcgaacagctgccggtggtgctgtttgaccgctgtcctactgaaagcgcgctgccgctggtgatgaccgattcgattaccccaacggcggagctgatttcccgcatcgcgcctcagcatcacgatgagttctggtttttaggcggccagccgcgtctgtcgccctcccgcgatcgcctggccgggtttacgcagggtctgactcaggcgggcattgcgctgcgcccggagtgggtgatcaacggcaactatcaccccagctccggctatgagatgttcgccgccctctgcgcgcgcctgggccggccgccaaaggcgctgtttaccgccgcctgtggtctgctggaaggggtgctgcgctatatgagccagcaccatttactggattcagatatccacctggcaagttttgacgatcactatctctacgattcgctgtcgctgcgtattgataccgtccagcaggacaaccgccagctggcctggcactgctacgatttaatcagccagctgattgacggcaatacgcctgagccgctacagcgctacctgccggcgacgctgcagtttcggcatcggtga

SEQ ID NO: 178826 - DNA, 414 bp, Klebsiella oxytoca
atgaaaaaaataaaattaattgttggtggcgtgatctgtgcaagttatttatttacgtcagtgttatcaatggcaagtgataatatcaacaaccataccgttcattttgataaaggcagcaacggcacgataataaaaagcaccgtgaccggtgatggtgttaacgactatacgctggaggcgaaagcgggccagatgatgcatatcaatatgaacagccagcggccgcatccttatttcaatgttatcgctcctgataataattcgatttttaacggttctctgagcggtgatacctttgagcaacgtcttatgagcagcggtaaatatacggtgcgggtttatcagatgggcggcgcgcgcgatgaaaggaaaaccagcgcttacgcgctgacgtttaaaattaccgactaa

SEQ ID NO: 178827 - DNA, 543 bp, Klebsiella oxytoca
atgttatatatcgttgagtgcagctacgccgacccgcaaagcgaagccggctggaacaggttttacagcgaggacaagctgcctgcgctggtgtccgtcagcggattccgcgcctcgcagcgcttcagggcgctctcctccggctgcccggtctatcttgctattcataccatcgagcatggcgatacgctcgccagtgaagcgtatcgccagaaaggcggcggcagcttttcccactggcaggcgcatattcgcgactggcggcgaaacctgtatcgctacggcggcgtctttcctgccgtcgctgagggggatgttttgctgctgagccccgagccgctggacgtcgttgagtcggagctgggatatccgccgacaaacctttcggccgccgggctggataacaacccgccgcagcgcgtggcgtacgttctgccgcgccgggaggccatgctgctggcgggacgggaaaacgtctcgatgtatgagcccatggccggtcagttgcaaagcccgactgaaatacagcccccatcacgctaa

SEQ ID NO: 178828 - DNA, 828 bp, Klebsiella oxytoca
atgcacaaacccgcttttctctcccgccagattggcgattttcaggtgacgcccctcagcgacggcagcatggccgctggcctggcgctgctgtcgggtattaatatcgacgatgccgcagacattcagcgcagcgcgggcgtcattgaccccggcaatatcgacattagtggctatcttattcgcggtcggggaagaacgattctggtcgacgcgggtacgggaggcggcgtgctggaaaccagtctgcgagcggcggggagtgcgccagacgacgtggatactgtcctgctgacccacgctcacccggatcatatcggcggcctgctggatgccaacggcgcgccgcgctatcgccacgcccgtctttatctgcaccctctggaagccgaatactggcaggacgacgccatgctaaaccgggccaatgcgcgggggcagcgcaacttcacgctcgcccgccgcaccctggacgcctattcccgcagcctcggttttctggatgagcgcgaggccgtcgcgggtatccgcccgctatggctacccgggcacacgccaggccatagcgggtttcgcatcgacgccgcggcgcaaagcctgctgatctggggcgacatcgtccattttccgcatattcagaccgcccgacccgccgccgccgttgcttttgattgcgatcccgcgcaggccagagcgacgcgggaagcgatcctcgcccaggccgtcagcgaaaacctgctgattgccggtatgcaccttggcgggtcgggatttgcgcatatcgtaccgacctcgcacggctatcgtattcaatattccgcgccgtaa

SEQ ID NO: 178829 - DNA, 615 bp, Klebsiella oxytoca
atgtatacacctgatgcaatgaggctatcagataaaaagcatatttttgattttattgacacttatagctttggattagtcgtttcacccaccctcaacgccagccattttccttttatcctcgatcgtagttcttcatcgcagggaattcttctttcccatatggcccgtgcgaatcctctatggaaagactttgacggaaagagggttctcgccatatttcaagggccccatagttacgtttctccaacctggtatcaaacttctcccgcggtgccaacatggaactataccgccattcactgttatggcacggtaagccttgtacccgtcaatgaattgcgcacggtgatggatgcgttagttcataaacatgaaccaacccttcaggcgcagaaagacgttatgccaaaggcatttatcgaagaaaaattaaaaaatattattggattcaaaattgaaattgaggagtttcaggccaaagaaaagctggggcagcatcgttctcaggccgatcagcgaggaacgctgcaggggttaatcaacagccaatcttcagagtccgttgcgctggctgactatatgcttaaggtgaagaaaggcactggcgcttaa

SEQ ID NO: 178830 - DNA, 321 bp, Klebsiella oxytoca
atgggcccatttccatcaccggcagctgattacatcgagtctgcgttgacggtaaccgctgcgtgtgacattggcgctaactcgcaggttatccagactgaccgcggctatgttgttttggacttgtctttaaaggtgacgcaggggagtgtcgtgcttatccgttgtgcgggcgaactgcaattcgcaaagctgatgggacagtcgtttatcacagcggaaggagagagcatcgaaggtgaagctcttgacgatgttgaagtgctcggagtcgcaacacatgcgataaatgatttgagacaggatgtcagtcctgtttga

SEQ ID NO: 178831 - DNA, 240 bp, Klebsiella oxytoca
atgcttcgacaatcagacatcaaccaggcatttcgggaggcaattcttcggaactcgaaaggctatcaatatctacacacacgagacttcatctcttgtttgatgctgcggggcattcatttctcagagtcagaagctaaccgctggatagagcgctatcagagttgtttcgctgacaaaactccggaccacaccgaaaacaggctttggattttaaggaacatggggagggtgatgtaa

SEQ ID NO: 178832 - DNA, 1014 bp, Klebsiella oxytoca
atgacgcagccattggcgggaaaacagattctgatagttgaagacgaacccgttttccgctctcttatgcacacctggttagcttcacttggtgcgaccatcgtacaggcggaagatggtatagatgcactgcaaaaaatggcggagtcaaaacctgatttgatgatttgcgatatctccatgccgcgaatgaacggcctgcagctggtagaacatgtgcgtaaccagggcgagcagttgccgattctgatgatttcagcgacggaaaacatggcggacatcgccaaagcgttgcgcctgggcgttcaggatatcctgctcaaaccggttaaagatttcgatcgcctgcgagaaaccgtgtatgcctgcctctaccccaatatgtttaattcgcgtgtcgaagaagaagagcgcctgtttgaggactgggatgcgctggtaagcgatcctagcgcggcgtcgaggctgcttcaggagctccagccgccggtgcagcaggagatgtcgcgttgccgtattcactatcgccagcttgtctctgtcgataagccagggctcgtgctcgatattgcgccgctatcagaaaacgatctggcgttttattgtctggatgtcacacgagcaggtgataatggcgttctggcggccctattgctgcgcgcgctgtttaatgggttactgcaggagcagctcgctcatcaggggcagcgtttgccggagatgggtagcctgctaaaacaggttaaccaattgctgcggcaggcaaacttacccgggcaattcccattattggtagggtattaccacagcggcttgaaaaatttaattttagtctccgcgggtttgaatggcaccttgaatacgggagaacatcaaattcagattagtaatggcgttccgttaggcactttaggtaatgcatacctcaaccaaattagtcaacgctgcgcatcatggcagtgccaaatttggggggctggcggacgtttacgcctgatgttgaccacggagtga

SEQ ID NO: 178833 - DNA, 528 bp, Klebsiella oxytoca
atgcgcacggtggtttatacggcagagattgatgaccgctttggttcagggaaagtgagttcgaggatcggtctctcatcgccggcgcggttgtataatacccaaactgcgttatttaccgacattgcagacgaacataagcgtcaacccatccactgcgtattagttgatgagagccagttcttaacccgggagcaggtgcgcgagctgtccgaggtggtggaccagctcgatattcccgtattgtgctatggattgcggacagattttcgcggcgaactttttacgggcagtcaatatttgctcgcgtggtccgataagctggttgaattaaaaactatctgtttctgcggccgtaaggcgagtatggttttgcgcctcgatcaggaaggtaggccgtacaatgagggggaacaggtggtgattggcggcaatgagcgctatgtatccgtatgccgtaaacattataaagaggcgctgagcgaaggctctctgaccgcggtgcagaacaaacagcgcagctgctaa

SEQ ID NO: 178834 - DNA, 630 bp, Klebsiella oxytoca
atgccatctgcaaatcaacccttccgcggctccccttacgcacaggaatttatttctcatttgcagccctactgcacgacgtaccgaacgggccgcggcgagcagtttgatcttcaggttaacggtcaggggatgtgttatctccttctggaggggacgatagcgatataccgaagaagtgacaatatgatgctttccacggcgctcagtcccgcccttttcggcctcgctaacctgacggacatttactttgatgactattttaaaaccgtcacgccgtgccagattggcgtactcacaacccgtcgcgtcgaggaaatcattagagagaaggcgctatggggactgctctctaaacagctgatgtttgtctataaccgcctctatcataacgttatgccccagggcacgccaacggcgtacgagatgattcgccagcagctgatcaagctcatggaggaagaggagggttatcgctacagcgtgacggctgaaagatatatcagagagaaaacccggctttcccgcagcggcgtaatgcgcattctggcggcgctgaaaaccggtggttttatcgaaatggaagaggggaaactcataaaaatcaacaaacttcctgctaagtactga

SEQ ID NO: 178835 - DNA, 660 bp, Klebsiella oxytoca
atgaacacgagaattattcctgaattcggcaacgaaccagcggaagtacttgagataaaaccctttaagcacattgagaaattaattgataatgtcctgccgtacgccgagagacgaatagtctcgaaaggggagatcgtccattattacgataataacgttcgtcagtgttttttacttatccagggcagcgtcgcgctgcatcggcgcggagacgggattgttttaaattctgagtcatcgccatttcttctcggcgtgtgtagccagttttcctctgaacgactttacgtcagggtactggaaacatcggaaattgcggccgtttcgctggaaacgtttaatcgcgtagtggcgcaacagaacttatgggagcatttttcaaagctgctgatctataccgcatcgcgggtttatgagcactgcgcgcaaatatcgcaaatgtcagcctatgacatcattcgttttcaacttgttgaattaatgcaagagcccgaagctatccggcaaagtatcaccgcggcggcctatatcaaaagtcgaacctatctttcccgcagcggcgttatgcgcatcctcgcagagctacgaacgggtaaatacattaccatggagcgcggagtgctgattgacatccaccacctgccgcgaaagtattga

SEQ ID NO: 178836 - DNA, 531 bp, Klebsiella oxytoca
atgaaaaagaaaattgttattgcgatacttgcagcaggttctgcattatcaatgactcaggctttcgcagcagcgggtaccgttaattttaatggcaatattttggatgccgcctgcgacattgatgtcgcgtcaaaggaccaggtggttgttttgggcgattattataaaactgaatttccggtagccggttcgagaaccgccgcgacgaaattcgatattattttgaagaactgtccggtgacggttaacaatgccaaagtccgctttgatggcacgcctgatttaagtaactccagcctgctggctattgactcgtcggtcgctggcgcagcctccggtgtcgcgattaatctgatgacggcggataaagccgatctgcctctgcacggcagcaacggttactcctacccgctcaccagcaccgctgataatacgctgaatttctatgctcagtatgtgtcgaccactgcgacggtggttgccggcccagctaactcggtcgcgaacttctcagtggtttacaactaa

SEQ ID NO: 178837 - DNA, 678 bp, Klebsiella oxytoca
atgcgttttatcagaacaattggcctggcgataacaatgttaacgctggtgcaggcaaccgccactgccggggtaattattggcggcacgcggatcattttcgatggtgcaaaaaaagaagcgtcaatcagcgttaataatcctgatgcgacgccttatttaattcagtcatggatagatgagcaggaaggtggttctggtaaagcgccttttattattacaccgccgatgtatcgcctcgacagcggacaaaaaaatattgagcgaattgtcgcgacaggttcactgcctcaggccaaagaaagtttattctggataaatattaaagcgattccctcggcatcaaagcagatgaactccctgcaaattgccgtaaaaacgcgtatcaagctgatttatcgtcccgttacgcttcgcgcctcaacgccggaggaacaggcaaataaactcacctggcaaagaagcggcaatgaacttcaggttaataacccaacgccttacgtcattaatttcaatgaaattaccgtgggcggaaaaatgcttgcccaggtgacctacgtcatgccgggttcgaccacccggttccgcttgccggacggggcctccggcaatgccctgacatttaaagttattaatgactacggcagccccggtccgtcacatcaagccagtttgtaa

SEQ ID NO: 178838 - DNA, 2538 bp, Klebsiella oxytoca
atgacaataaaaaataataagttgcgacctgctcgtctggctacgcttatcgccatagtgttgagcggtttctctccggaactgtatgccagtgattcgtttaatacggccctggtagagctggataatcccggcgtgggcaaagcggatttatcggcttttgaatcgggctctcaggcgccgggaacataccatgtggatattattcttgatgaccagttaatggacacccgggatattcctttttcgatggcaaagaccgggggcggtaatgaggtattgcagccctgtctgagcgtggaacaattaaaacagtggggagtgaaaaccgaactttttccccagctgtcggtagaaaatagtaattgcgccaatctccaggctattccgcaagccagcgctgattttcagtttggcgcccagcggctggttatcagcattccccaggcggcgatcgacctgccggccaggggctatgtaccgccggaaatgtgggatgaggggattactgcggcattgctcaattacagcctgagcggagcgaacactcgagcgaaaacgggccagggcggcagaagcgacagccagtatgcgaacctgcgtccggggatcaatatcgggccgtggcgttttcgcaactataccacctggtcacgggagtcctccggccaggataaatgggataccgtttatacctacgcgcagcgggccattattcctctgaaagcccagcttaccgttggtgacagctccgcgcctgccgacgtgttcgatagtatgccgtttcgcggcggccagctggcatccgatgacgacatgctgccggattctcttaagggctatgcgcccgtagtacgcggcattgcccgaaccaatgcgcaggtcgtggtgcgccagaacggctaccagatctaccaaagctacgttgcgccgggcgcctttgaaatcacggatatgtatcctaccggcggggcaggcgatctcgacgtgacgattaaggaagccgatggcagcgaacagcacttcacgctgccctacgcctcgctgccggtactgcagcgggaaggccggttcaaatacgccatcaccggcgggcagtatcgttcatataacagcagcgtggataaaacccctttcgggcaggcaacggcaatttatggcctgcagcatggctttaccctctatggcggcctgcaggagtcaagcaaatatcagtcgctggcattcggcgtgggtaaaaatatgggggcgttaggcgctatctccacggatgtcacgcaggcctggtcaacgccggataaaacggaaaaatcgcgcggccaatcctggcgagcgcgatacagcaaaaacttcatcgataccgggaccaacttttccattgcgggataccgctattccaccagcggctattacgggatgcaggaagttctggactcatatggagacagcagcgcgctgcaggaccgcaggcgtaaccgcgcggagctgacgatgagccagacgctgagccgcgaactgggatcgctaaccctcagcgcggcgagggaagattactggaactccgccaggtcgatggcttcgtggagcgtcggatacaacaactactggcgcaatatcagctacggcctgacctggacatacagcaaaaatggcagcgcgacgtcaaacgacagcgcgaataacagcgcccacgaccagctgctggcgtttaacgtcagcgtaccgttggataaattcctcccgcaaacgtgggccagctatggcatgaacgccagcaagaatggtggaacgacgcataatatcggcatgaacggggtcgcgctggagaacaactcgctgaactggaacgtccagcagggttacggtacggatggcgtgggttacaccggcaatatgaacggtgactataaagggacgtacggcgaagtgacggcggggtatagctacgacaaaaacagcgagcggcttaattatggtctgcaggggggcgttatcgcccacgccgatggcatcacgctttcccaaccgctcggtgaaaccaatgccctgataaaagcccccggcgcacacggcgtgaatattcgcaaccaacccggtgcgcgcacggactaccggggatatacggtcgtcagcaatatttccgtttatcgaaaaaacgacctgacgctcgatccgcaaaatatgcctgaggatgtagagctggagataaacaccgacacggttaccccgacgcgaggcgcggtggtgcgcgccgattatctttccaaagtggggcgcagggtcctgatgaccttaaccgacaataaccgcttcgtgccgttcggggcggtggtgacgcttgcggatgataataagagcagctttatcgttggcgatcgcggccaggtttttttaagcggaatgcgcgagcagggggcgatcgtcgttacgtggggccgccagtccagtcaacagtgccgtgctgatttcagcctgccgaaacaatcaacctacgctggaataacagaagttagcgccagttgccaccaggaacgttaa

SEQ ID NO: 178839 - DNA, 948 bp, Klebsiella oxytoca
atgagattgatttactctgttattttgctcggcttgatcgccggatggaataacgcgcgtgccggaacctgcaccaccattaccccgcagatctccactctgtccgtgggaacgattaccgtaccgcgtgatgcgccggtcgggaccgttattttttcggggggcgggacatatacgggctcttacctttccggctgtactaacccactcatgctgggtttcagcatgcgatataataatgcgacgctgagcagctacggtaatcacgtttacaacactaatattagcggtattggtattcgtttttcatcaaacgcttattttgaaaatccgagtaatacattctcctatagcgcgcagacctcttatgttgactggtacggcggcaacatacagctggtggtcaccgggccggtatcatcaggcgcattaacgccgggaacgatcggggtggtgacgctccagggcagcgacggcgtctaccgtgatggcctgaccgcaacgctgaccgatgggacaatcaacgccctggcctgcagtatcactacgcctcagttgaacttcatcattggcgatattcctgcttcaacgttcggctcgacggtaggcaccacgcccgctggcgcgcagaatacgcaaaatctggggttaagctgcagcgccggcaccaatatcaccgtttcgctgagcggcgtacaaaatcccgatagcgccaaccccagcgtaatggcattaacggggcagggcagcgccgggacggcaaaaggcgtcggcgtgcagcttttatataatggcgcgccgctggccatcaatagcccgctgttattaaaacggtcatcgggcgggcaagaaacgctgccgctgacggcccgttattatcagaccttaacttccgttgagtcaggctcggcaaatgcgaccgccacgcttaatttgacgtaccagtaa

SEQ ID NO: 178840 - DNA, 513 bp, Klebsiella oxytoca
atgaaaatacgccataaaaaattgcttattctgacgttgctgtgctggaacgttttttctgccgacagcgtgacgatgggggtgacgggaaatattgtcgcctcgccctgtatattcaatgggggaaacagcaacctcgatgtcaatctgggcgatattcaggcaaccaacatggccacgcccgggtcatcctccgaccctgtggcctttaatttgctgtttaccaactgtccggcgggaacgcgcagcgtaacggcctccttcaccggcactcccgatccgcttgccggtcctgactattatctgaatagcggtacggcaaccaacgtggcggtagcgatgagtgaagcgggcagcggcgcgctaaagggaacgggttccagcatcacccacaatatcgcggctgacagaaccgcaaccctggctatgcaggcctcggtaaaatcggtgtcaggcggtgcgacgcccggaagcgtcagtgccgttgtggtcatgacgctgcagtacaattaa

SEQ ID NO: 178841 - DNA, 1221 bp, Klebsiella oxytoca
atgacattttctgtggaacgcgtgcgcgcggatttcccgcttctcaatcgcgaggttaatggccagccgctggcctacctcgacagcgccgccagcgcgcagaagccggaagcggtgattaacgccgaggcggaattttaccgccacggctatgcggcggtgcatcgcggcattcataccctcagcgcggaagccacggcgagcatggagcaggtgcgccagcgggcggcgacgttcctcaacgcccgctcggcggaggaactggtgtttgttcgcggcaccacggaaggcattaacctcgtggcgaacagctggggaaacgccaacgtcggcgcgggcgacaacatcatcgtcagcgcgatggagcaccacgccaatatcgtgccgtggcagatgctgtgcgccagagcgggggcgcagctgcgggtgatcccgctgaatcaggacggtacgctgcagctggatgcaatccccggcctgtttgacgagcgtacccgcctgctggccattacccaggtatcgaacgtgctgggaaccgaaaatcccatcgccgctctgacggcgttggcccatcagcacggcgccaaagtgctggtggacggcgcgcaggcggtgatgcatcatccggtggacgtgcaggcgctggagtgcgacttttacgccttctccgcccacaagctgtacggtcccaccggcatcggcgtgctctacgtcaagcaggacattttgcaggagatggcgccgtgggaagggggcgggtcgatgatcgccacggtcagcctgacggaaggcacgacctgggcaaaagcgccgtggcgcttcgaggcgggaacgccgaataccggcggcatcatcgggctgggcgcggcgctggattacgtcagcgcgctggggctgacgcacatcgcggaatatgaacagaccctgatgcgctacgcgctgcaggcgctggagaacgtggcggatttaaccctttacggcccgcaagatcgcctgggagcgatcgcctttaatctcggcaaacatcatgcttatgatgtcggcagcttcctcgataactacggtattgcggtgcggaccgggcaccactgcgccatgccgctgatggcgttctacggcgtgccggccatgtgtcgggcatcgctggcgatgtacaatacgacggaggaggtggaccgactggtagcggggctacagcggatccacaaattattaagctaa

SEQ ID NO: 178842 - DNA, 858 bp, Klebsiella oxytoca
atgaaatcaatacttactgcgcttggtttgcttattgccagcagcgcctgcgccgcaccgcagctcattgcgcatcggggaggcaccggcgatgcgccggaaaatacccttccggcgataaaacttgcgctggagaataaggccgaggcgatttggataacggtacaattaagccaggatggcgttccggtcttatatcgcccgagcgatctgtccgcgctgactgaccatacggggaaaatctcaagcttcagcgctgccgagctgacccgtatggacgcgggatggacatggggcggtgaaactcacccctggcgcggtaaaaacgcaaccattccaacgctgcaatcggtactggaacagtggccgcagaccttcttttacatcgatatcaaatcacctgatgcagatccggccatcatggcggcgcgtcttagcgaagtactgcaaaagaccaatagcctctcgcgcgtacgggtgtattcaacggaagaccgctatatcgcggcgctgccagcatctatcccccatttcgtcagccggggcgaaacgcgaacgaagctggctaatatttcgcttagccaccagtgccagccaactgcggcgtcgggcaatgaatactggtacggtctggagctgaaacgcaaggtagaaatagtggagaagttcacgctgggcgaaggcgtatcgccagccacgctcacctgggataaagaagctatggactgtttccgctcacagggcaaagcccatattgtcttcttcggcattaatagtgccgatgattttcgtaccgcaagcgagctgggcgccgacggcgtgatggtagactcgccggcgaaagcgaaaacctggtaa

SEQ ID NO: 178843 - DNA, 552 bp, Klebsiella oxytoca
atgacaaaccacagcttcacttttcatatcgcctctgaaggcgataccgatgacattctcgacgtcgaaacccgggctttcggctacagcaaagaggccaggctggtggccgatttgctcaacgatgagagcgcctgcccgacgttatcgctgctggccaggcataacggagaggcggttgggcatattttattcacccgggcgacgttcaaaggggagccggactcgccgatgatgcacatccttgctcccctggcggtggtgccggaataccagggcgtgggcgttggcggagggcttatccggcacggcattgagcagttgaaagcaatgggaagccagatggtatttgttctgggccacgccgcttactaccccaggctcgggtttgagccatgcgcgggagataaaggctatccggcgccttatccgattcccgcggcgcataaagcctgctggatgctgcagccgatttcgtctcagccgctgggacgaacgggccagatacagtgcgcccgggcgttaatgaaacccgagcactggcgcgagtaa

SEQ ID NO: 178844 - DNA, 1629 bp, Klebsiella oxytoca
atgactattggcacgattattacaggttccaggcatatcgcgttgtcatcccgggagcgcaaaatcccctgggatgaaccggcttttagccagcgtatgctggagaaccatctgtcgcaggagcacgactgggccagccgcaggcgggcggttatcgaacaacaggtcgcgtggattgccggacagctacccgccggcgcgcgcattctggacctcggctgcgggccgggcttttacacccgcctgctggcggagcgcggcttttactgtacgggcgtggatttttcgccggcgtcgatcgcctgggcccggcagcaggcgcaggcggccgggctggatattacctatcaccagcaggacgttcgcgagtacgcgccggaaacccagtttgatttcattatgatgaccttcggtgaactgaacgtgttcagcgcggctgaggcccgctcgctggttcatcgctgcgcgcagtggctggttccgtggggaaagctgctcatcgaggttcatacctatgcagaggttaaacgtcagggaatggccgatcccggctggcagcgctgtccgcaggggctgtttcttgatgttccgcacctgcttctgacggagcacgcctgggatccggcggcgcaaaccagctccacgcggtttatggcgattgaagagagcggcaaggtgacgcgcttcggcagccggatgaccgcctggcatgatgatgcttatctcgacctgctgcgcacggcgggtttgaccaccattacccgcccggatgaggcggaatggccggtcagcgaaacctttaccggcaagctgtacgcgctgctggccgaaaaaaacgttcccgattctctttccgcaaaacccataaaaggaattcaaccattggatatcccacgtattttcaccattagtgaaagcgctcatcgcatccataacccgtttacgccggaaaaatacgccgcccttggccgggtgctgcgaatgaaggccggaacccggatactcgatcttggcagcgggtcgggggagatgctctgtacctgggcgcgcgatcgcggcattcgcggcatcggcgtcgacatgagcgcgctgttcagcgagcaggctaagctgcgggcagaagagctcggcgttgccgaccgcgtgacgtttattcaccaggacgccgccggttatgtggccgaggaaaaatgcgacatcgccgcctgcgtgggcgcgacctggatcgccggcggcgtcgccgggactatcgagctgctgagcaaaagcctcaagcccggcggtatgctgctgatcggcgaaccgtactggcgccaggtaccggcaacggaagagatagcacaggcctgtggcgcctcttcgctcgccgactttctgacgcttgccgatctggtctcctcttacgatgcgcttggctatgacctcgtcgaaatggtgctggcggaccaggaaggttgggaccgctacgaagcggcgaaatggctcaccatgcgacgttggttggaggaaaaccccgatgatgagtttgtgccagaagtccgggcggagctgacgatggcgccaaaacgccatacgacttatacgcgcgaatactttggctggggcgtgtttgcgttaatcaaacggtag

SEQ ID NO: 178845 - DNA, 1341 bp, Klebsiella oxytoca
atgaacaaactcatccacagcggcacgatgctgctggctttactacaccctttacagacgctggccaacgagacgcttttttctcccaccgcaaaaaacatgaccggagaatggggaggcgtgcgtacggatctgcgccgtcatggttatgattttacgctggaatatagcgcaatgacggccacgaatatctccggcggttacgatcgcgataaaaccctgcgctacagcgaccagtatattctcggcgtaaatatggatctggaaaagattttaggtattcacgacggtgaatttaaagcgtcggtgaataatcgtaacgggcgagatctgactcaggatcgccttcaggatccgcgcgcgccggtaataggctccggtgttcagagcaactacggtcgggggcaaacatggcacgcgacgcagttttggttcaaaaaaaccgggtgggataagaagctggatctcaaggtgggcctgatgccgccgggagaggattttgataacaacggctgcttttttcaaaacctgtcgctgtgcggctctttagccggccacggcagcggcgtctggtataacacccccataggccagtggggtggccgcatcaaatacagccctgccccggcgctttacgtccaggccggcgcgtttcagtacaatcctgcctacgccacccgccacggaagcttccagctggatggtaccgggcatctggggtacatgtacctttttgaactgggatatcgacctactctcggcgcggcaaaactccccggcatctggaaactcgggggatggtataacacggcggacgccaatgatgtgctggatgatgacaatggcgatccctatgtgctcacgcaccaggccgcccggcgacacgacggccgctacggaggttatctctatgtcgtccagcagctgacctactcgagcagccagcgccaacgtggccttagccttttcgggcatctggcaatgaatgataaagatacggcgacaatggactatcagattcaggccggcgccatttatcaaggccctttcgccagccgtccgcaggactttatcagcttcggcgtcagtaaaatgcacgccaacgacagagtcgcccgtcgggcgcagctcctgaaccagatgcgggggatcgatgattatgataaccctctgtatgttccggttcgcagagccgagtatgccgcagagctgcattatagctttcgcgcgacgccatggctgaccgtgcgccctaacctgcagctgctcgttcatccgggaggaagcgaagagattaaaaacgcctgggtgctcggcaatcaggtgaccgtcaaattctga

SEQ ID NO: 178846 - DNA, 1398 bp, Klebsiella oxytoca
atgtcaactcaggccattgcttcagattacgccgttgccagcggaacggcgtccacgccagacgcgctgctggcaaggctggaacgcctccccatcacccgacggctgaaagcgatccgcgttatcgtcggcttatcgacgtttttcgatgcctataccattattgcaatcgcatttgctctcccccagcttactcaggagtggggtctcacgccgacgtttgtcggtcttattattgcggccagctacgtgggccagctgtgcggcgccctgtttttcggctcgctggcggaaaaaataggccgtatcggcgtattgcgtatcaccatcatcatgttcgtactcatggatgcggcctgcctttttgcctggaacggctggtcaattcttgttattcgctttttacagggggtgggtatcggtgcggaagtccccgttgccagcgcctatatcaatgaatttgtcggtgccaaaaagcgcgggcgtttctttttgttgtatgaagtcattttccctatcggcatgatgtttgccggattggtggggtattttctggtgcccatctatggctggaaggtcatgtttttaattggcttagtcccctccgcgctgaccgttcccctgcgctggctgatgccggaatcaccgcgctggttgaccgcaaaagggaggctgaaggaagcggacagcatcgtatcgacgctggaatcagaggtcatcaggcgcgggatgacgttgcccgaaccggaaataaaagcccccgcggtgcaaaaagcggctccggaaggggttaaagccctctttggcggtatctataaatcccgcacctttatgctctggggactgtggctgacggtttatagcgtcaacaacggaatgatcacctggtttccaaccctctacaaaacctggtttaacctctccctcgataccagtctggcctacggctggatcacctcttcctgcggcgtcgtggcttcggtgatctgcgccttgatgatcgaccgcgtcgggcgcaaacgctggtacacatgggcctttttactggccatcgttccgctgattacgctctccgttctgggcgcgaaatccgccgttgaaattctgattctgggcagcctgacctacgccattctgcagaccatcgctttctcgctttatctgtacgcggcagagctttaccccacccgactgcgcgctatcggcaccgcgtattccagcgcatggctccgggcggggtcatccatcggcccactgatggtcggttttatcgtcagcggcttcgggatccgctttgtgtttatcactttcgcggtcattgcgctgattggtggcttaattacctggctttttgccattgaaaccaaaggaaaatcgttagaagagctgtcgccatag

SEQ ID NO: 178847 - DNA, 876 bp, Klebsiella oxytoca
atgaatatgaaaaaacgtattttgacgctgtgttcagcgctgctgctgtcggcgacctcatcggcctgggccgcgccgaaagtcattgtcggttctgcagacttcccggaaagccaactgctgggcaccatttatgcgggtgcgttagaagcgcaaaatatcccggtggagaaaaagctgaacatcggcagccgcgaagtgtatatcccggcgctgctggacggttccatcacgctgatcccggaatacagcggcgcgctgttgagctatctggatgcgaaaaatgcggcacacggtagtgaggatgtcgccagagagctggccgctaagctgccggagaaagttaaaatgctgcagatctcccaggctcaggatatcgacgttctggccgtgacgcagaaaaccgccgataaatataaactgaaaaccatcgccgatttacagcctgttgccagccaactggtgctgggcggcccggcggaatggaaaacccgccatgaggggctctccggcctgcgcgacgtgtacgggctgaactttaagagttttaaagtgctggatgtcggcgggccgctgacgctcagcgccatgaaaaataaccaggtccaggtcgccgatctgctttcaacctcgccagcaatcaaaaaagatcgccttgtcgtgctggaagacacaaaacatctgttcgcggcgcaaaatattgtgccaatcgtcgccagtgaagcgctgaatgacgccgtgaccaccacgctgaataaagtctctgctcagctaacgactgaagatctgatcgacatgaacgagaaaattgccgaatttgtcagcatcgacgatatcgcgcatcagtggctggtaaaacacggatttagccaataa

SEQ ID NO: 178848 - DNA, 681 bp, Klebsiella oxytoca
atgcttacctggtttatggatcccatccactggtttggtgagggcggcattttcccccttctggcgcagcacatcagctatagcgctgtcgctctggcgatcgcctttatcatcgcgtttcccgtcggctgctacaccggccataccggcaaaggggaaggcctgctcatcggtaccaccaacgccctgcgctccctgccctcatttgggctgattattctgctggtgattttactttccggcgagtttgagtccgatatggcctttattctgccctgtattctggtgctggtggcgctggcgctcccgccgattgcgctgggtgtgcatgcgggtattcgcgcgctcgatccctatgtccttgatgccgctcgcggcatggggatgacgcggctgcagatcctgctacaggtggagttgccctgcgcgcttccgctgatcctctccggcgtgcgcagcgccacgttgcagattatttccaccgccaccatcgcagcctatgtctcgctggggggattcggacgtctgattattgacggacgcgcggcgaacgatttcagccagatgatcgccggcgccatgctggtggcgctactggctttactgatcgactgcttgttctctttctcgcaaaaaatagtcgtttcacccggtattacccggcgtattaaaaacccataa

SEQ ID NO: 178849 - DNA, 645 bp, Klebsiella oxytoca
atgagattcgattggctatgggcgcagagcgataaaatcttcaacctgtttctctggcacagctatctcgcaattgtgccggtagtgatagggttaattctggcgatccctgtaggctggggcattcaccacctgccatcggtcaagtcggcgatcgttaacctgtttggcctactctataccattccctccctggcgctgtttgtgctgctgcccccgctgctccacacgcagattctggaccccattaatgttgtggtcgcactgaccatctacagctttgcgctactggttcgcaccgtctgcgacgggctggactccgtatcggccgatacccgtcagtccgcggcagcgctcgggtataaacccgctcagcagtttttccagatcgacctgccgctggccgtgccggtgattggttccggcctgcgcgttgccgtggtgtctaacgtcagtatcgtttccgtcgcggcattaatcggcgcaccgcagctcggctcgctgtttaccctgggcttccagctgcaatttctgacgcccatcatcgccgggatcgcgctcagcatcattctggcgctgctgctggatatgttggtggtttacgccactcgtcaactcagccgctggcaacctcagagaggataa

SEQ ID NO: 178850 - DNA, 201 bp, Klebsiella oxytoca
atgaaccgtcttctgcaggatctgaggcggtcacacttgctttcctcatcgcctggctgtactgccaggtggaaacagaaaaccaagaatcttcgggtgattcaacttctgttgggtcataagaaactggaaagcacagtccgttatctgggcattgaagtcgatgatgcgttagagatttctgaatcgatagaggtctaa

SEQ ID NO: 178851 - DNA, 1263 bp, Klebsiella oxytoca
ttggaacatcttcttagagattctaatggtgttatccaaacaaaagtattaaacagaaaaaaagcattggatatgcttgtccttgagcctccaaaggaggatgaaacaaatttagccggaatatttccttcagaggacctaatttatacccgtttggatgtaattgagcatacatttaccgctcttatgatctgcaagaatgaagaaaaagtaattgagaaaaatattaaaccacttttgcaagcatttgattatgtcatcgttgtggatacaggttcaactgactctactttcaatctacttaagaaggtgcaggctgaaaattctaacctacttttgaaagatttcgcatggtgtgatgatttttcaatcgtgagaaattatgcattaagttttgttaaatcagagtggtgctgtttttttgatgcggatgaatatattgatgatgttgagatcaattctttgttttacttgttaaatcatttgtctaattataagtatatactaagttgttttttatgtcctgtgattataaatggcaataatacaatatcttggactgtgggtcggttttttttgaaagaatctaattttaaatataaagacagaatacatgaagaattatttagagataattattataaagacattcgactgtgtatcaaaataaagataatacatagtggttatgattttgatttgagaagaaagaaaatcaatcgtgatttacgtattctatcattagcattggaagaacaacctgataatttaaaatatcaattttactattcaagagaaaatttgttatatttttttgataagaaatcattgttgcttgccaggtcagtattggataaatgctctgatgctgggttaagcggttatgaaaaagacttgcttgtctcaataatgatttattattatggtaataatttttttgcactctttaagcgttaccaatctggttatagcaacgatcctgatttgttctatttcaagtgtctggttcttttgagatgtggtgaagaacctttaactgttttaaacgatgttatcgcctttaaaaataataaattcagctttggtaatagtataattaattttaatgggatgcatttggatgaaataatatgtcgatgtttgataatgttaaaatcctttgatcttgctaaaaagtatttcttttttattagacaagaattccctttaggctgtatcgacggtttcacaaatttcaacatgttggatatctttaaggagtaa

SEQ ID NO: 178852 - DNA, 873 bp, Klebsiella oxytoca
atgaataatacccataccgaattcgaacgctattaccagcaggtccgctcgcggcaaaagcgcgacacctttagctggtccctgctgctgctggcgctctattttgccgccggcagtatggccgagtttaatctctttactatctggcacgcgctgcccaattttctcgattacatgtttgagacgctgccgacgctgcacgtcgccgacctgtttgccgattcgcacactaaaggctctctggcttactggggctatcgtctgcccattcagctgccgcttatctgggaaacgctgcagctggcgctggcgtccacgctggtggcggtggcgattgccaccctgctggcgttcgttgcggccaacaacgcatggtcccctgccccgctgcgttttgccgtccgcgtgctggtggcttttctgcgcaccatgccggagctggcgtgggcggtgatcttcgtgatggcttttggtatcggggcgatccccggctttctggcattaatgctccacaccatcggcagcctgaccaagctgttctatgaagcggtagagagcgcccaggataaaccggtacgcggcctggccgcctgcggcgcgtcgcatctgcagcgtatccgctttgccctgtggccgcaggtgaaacccatctttctctcctacggctttatgcgcctcgaaattaacttccgctcctcaacgatcctcgggctggtgggcgcgggcggcatcggccaggagctgatgaccaatatcaaactggaccggtacgatcaggtcagcatcacgctgctgttgattattatcgtggtatcgctgctggatatgctatccggccgcctgcggcagtgggttctggaggggaaaaaatga

SEQ ID NO: 178853 - DNA, 588 bp, Klebsiella oxytoca
atgaaaaaaaaggttcttgcaattgctctggtaaccgcgtttgccggtatgggtgtcgctcaggcagctgacgttactgctcaggcagtcgctacctggtccgcaaccgccaaaaaagacactaccagcaagctggtggtgactccgctgggcagcctggctttccagtatgccgaagggattaaaggctttaactcacagaaaggcctgtttgatgtggctatcgaaggcgacgccaccgcgaccgcattcaaactgacctctcgtctgatcaccaacaccctgactcagctggatacctctggttccaccctgagcgtgggcgttgactacaacggcgctgcggtcgaaaaaacggctgacaccaccatgatcgacaccgcggcgggcatcctgggcggcaacctcagcgcgctgtctaacggctataacgtcgcgggtcgtactaccgctcaggacggcttcacgttctccatcatcagcggcaccaccgatggcacagctgctgttactgactacagctccctgccggaaggtatctggagcggtgacgtcagcgtacagttcgacgcgacctggaccagctga

SEQ ID NO: 178854 - DNA, 1644 bp, Klebsiella oxytoca
atgaaagctaaatggctggcatgtttagtgatgttcacggcggcgctgtgcgtgacgcgggtcaacgccgcggtcaccaaaaccacctggccggatgcggcgactatgcagtttgttttcgtggaaaacaactcggacgataacttctttgtcaccccgggcggcgggctggacccgcgcatgaccggggctaaccgctggaccgggctgaaatataacggctcgggcaccatttatcagcagagcctgggctatatcgacaatggctataacaccggtctgtacgccaactggttcttcgatatgtggctggataactctcccgcatctcatccgttacaggggctgcgctgtatcaactggtatgcgggctgcgatatggccaccagcctgattctgccgcaaaccagcgatgccagcggcttctacggcgcgacggtgacccccggcggacaaaagtggatgcacggcatgatgtccgacgctttctaccagtatctgcagcagatgtcggtgggcagcagcttctcgatgaccatcaactcctgcatgacgtcggtgagctacgacgccagcagcggcgcgcgctgtaaagatcaggcttcaggttactggtacgtgcgcaaagtcacccatactaaagcggcaaacctgaagctgattaacacccatgcgctggcggaagtctttatcaacagcgacggggtcccgacgctgggcgaggggaacgccgactgccgcacccagactatcggctcccgttccggtctgagctgcaaaatggtgaactataatttgcagcacaatggcctgagtaatacctcaattcatatttttccggcaatcagcaactcggcgctggcttccgcggtcggaagttatgatatgcagttcagcctggatgggaattcatggaagccggtgagcggcatctcccagtactatacgtttaatgagatgaaatcatctgactcggtttacgtatttttctcgagcaacttttttaagcagatggtcacgctgggcatcagcgacgtgaacaccaaagacctgtttaatttccgtttctataacaccacctcgccggagtcaggctggtacgagttttcgacctccaacaccctgattattaaaccgcgcgacttcagcatcagcattatttccgatgagtacatttcggcgccgacgcgcgaaggctacgtgggcagcggcgagccgtcgctggactttggctatattgtcaccaccagcggcaaaaccgccgccgatgaagtgctcattaaagtgaccgggccaacgcaggcgatcggcggacgttcatactgtatttttagttcacccgacggcacgtcgagagtaccgttcccggcgacgctggcgtttacgacgcagaccgggaccatcaaaacctacgatgccggatgcgatgatacctggcgcgatatgaccgacgccctgtggttaaccacgccgtggacggatatttccggcgacgtcgggcagatggacaaaacgacggtgacgttttccattccgatggataacccgatatcgctgcgcacggtggaagataacggctggtttggtgaagtgagtgcttcaggagaaattcatgttcaggcgacgtggcgtaacattaactaa

SEQ ID NO: 178855 - DNA, 969 bp, Klebsiella oxytoca
atgagcgatgtagtagaggttatcgttgacggcctctggcgccagggcagccagaacctcgccgtcaggctggtggcgcgggacgggcgaccgctccccgcctggcagcccggcgcgcatattgacgttcatctgccgtgcggcattatccgccagtattcgctgaccggcccggaggacgcagacgacggctacctgatctgcgtggcgctggagaaagcgtcacgcggcggttcgcgctatattcatcagcagctgcgccccggccagacgctgttgatttctcccccgcgcaatctgtttcccttacgggcggcggagcgggtgacgctgctggccgccggtatcggcattacgccgctgtacgcaatggcgctaaggctggaggcggagggcgtgccgtttacgctgcactattacctgaaaaatcgcgcccagggggcgtttgtccgcgaactgcagcggcgattccgcgccgaaagcgtggtgattcacagctcttgcgaaggagacagcgcccggcagcatttagccgccgcgctgaacaagacgcataccggatatccgatttatctctgcgggccagagggatttatggccgccgcgcgccgggtcgccatggaacagggctgggcggaaacgctgatccatagcgaagcctttcagcctgtcgcgatgcccgccggcgctgaggagggagaaacgtttagcgtgacgcttgcgtcctcgggagagcggtggccggtgcccccgcataagaccatcgcccaggtgctccaggagaacggcgtcgccgtccccctctcctgcgagatggggatttgcggcgcctgcctgacgccggttatcgagggggttgtcgaccaccgcgacaccgtgcagtcggaggcggagaaatccgccggcgcgcagcagatcgccctgtgctgctcccgcagccggtcggcgaatctgtgcattgatttatag

SEQ ID NO: 178856 - DNA, 1029 bp, Klebsiella oxytoca
atgcttgaactctcctcaatctcaaaatcttttgccggtacgcgggtgctcgaaaacctgaatctgacggtggccgcaggcagccggacggcgatcgttggcccctccggctccggtaaaaccacgctgctgcggatcctcgccggtttcgaaacgccggatagcgggcgcattgttatgcaggggcgcacgctgtttgcgcaggggacatttattcccgcccacctgcgcggggtgggctacgtgccgcaggaaggcgcgctgttcccccatctgaacgtcgcggacaatatcgcctggggcctcgacggcagccggcaggagaaatatcagcaggtggcggcgctgatggagagggtgtcgctggaccgtcaactggcgaaccactggccgcacgaaatctccggcggtcagcagcagcgcgtagccctggcgcgcgcgctggcgcagcggcccgcgctgatgctgcttgatgagcctttttccgctctcgataccgggctgcgcgcggccacgcgcaaagccaccgccgatttactggcgcaggccggggtcgcgtcgattctggtgactcacgatcagaatgaagcgctctcctttgccagccaggtcgcggtgatgcgccagggacgttttgcccaggtcggcacgccgtatgaggtctacagccgtcccgtcgatgaagagaccgcgctatttctcggcgatgcgctggtgctgcccgccgagcttcgcggcgggcgggcgcgctgtgcgattggcgaaatttcaatcgatgatccgcatgccgtcggccagggaagggtcatgctgcgccccgagcagctggttatttccccctctccggcggatggacagccgctcaccgtacgcgatgtggactttagcggccacctgtcaacgttaaccctggcgatgcccggccagggggagccgctgatcgtcaaaaccgtcagccggcagttatggcggccgggggcggcggtacgcattgaggtggtgggcgaggcgcgggtctttgcccgctag

SEQ ID NO: 178857 - DNA, 1575 bp, Klebsiella oxytoca
atgtcttctctgagtttcgcgctcggaaaaaaagcccaacgcctgcccgagcgcaggcgtcctgcttttccgatgatcgcgttagccgttctgttttctctgctggcgcttttgccgccgggttttgttattgccgtaggggtcgataccggctgggagacaatccaggcgctggtctttcgcccgcgcgtcgctgagctgttaagcaataccctgtggcttatcgcgctgacggtacccctgtgcattgcgctgggcgttggcctggcctggctgacggagcgcacgctgctggcggggcggcggctctggtcggtgctggcggtagcgccgctggcgatcccggcctttgtgcaaagctacgcctgggtcagcgcggtgccggcaatgcacggcctctctgccggggtgtttctttcgctgctggcctactacccgtttatctatatgccggttgccgccgttctgcggcggctggacccgacgctggaagatgttgccgcctcattaggtacgccgccgtggcggatctttttccgcgtggttttgccccagctcaggctggcgatatgcggcggcgcgctgctggtggcgctgcatctgctggcggagtttggcctgttcgcgatggtgcgttttgatacctttaccaccgccatctatgaccagttccagtcaaccttcagcggcccggcggcgaacatgctggccggagtgctggcgctctgctgtctggctattttgctgctggaaggggcgtcgcgggggaaagcgcgctatgcccgcatcggttcgggcgccgcgcgcgaacagcagcggcagccgctgggccggctggcggcgatccctctccagctcgcgctgctgacgctggtgatgctggcgctgggcgttccgctgatggtgctctgccgctggctatggctgggcggtgtggagaactggttaaacgccgacctctggctctccctgcggcaaacgctgctgctcggcgcggtgggcgctctcctcaccaccgcctgcgctattcccattgcctggctgggcgttcgctatccgcagcgtcttattcgactgctggagggatgtaactacatgaccagctctctgcccggcatcgtgacggcgctggcgctggtgacggtcaccattcactacgcgcgccccatctatcagaccgaggtcacgctgctgctcgcctggctgctgatgtttatgccccgggcgctggtcaacctgcgcgccggcatcgcgcaggcccccgtggagctggaaaacgtcgcccgcagtttgggccgcagccccggacgggcgctgtggagcgtgaccatgcggctggcggcgccgggcgcggcggcggcggcggcgctggtgtttctcggcatcaccaatgagttgaccgccacgctgctgctctctccgctaggtacccgcacgctgtcgaccggcttctgggcgctaaccagcgaaattgattacgtcgccgccgcgccttacgcgatgctgatgattctgctttcgctgccgctgaccggcattctctatatccagtcgaaaaaaatcgcaggcctgtaa

SEQ ID NO: 178858 - DNA, 1017 bp, Klebsiella oxytoca
atgcgttttcgtctggtgtcttattgctccgctgcattgatggcttcttccgcgtttattgccccgcaggcgctggcggcggccagcagcgacgggattgtggtctacaacgcgcagcatgaaaatctggtgaagtcctgggttgacggctttaccaaagagacgggaattaaagtgacgctgcgtaacggcggcgacagcgagctgggtaatcagctggtgcaggaggggacggcatccccggcggatgtctttctgaccgaaaactccccggcgatggtgctggtggataacgcgaagctgtttgcgccgctggcggccgagacccttcagcaggtcgccccgcagtaccgccctgagcacggccgctggataggcattgccgcccgcagcaccgtattcgtctataacccggcgaaaatcagcgaagcgcagctgccgacatccctgatggatctggcgcagccgcagtggaaagggcgctgggccgcttcgccatccggcgcggattttcaggccatcgtcagcgccatgctggcgctgaaaggcgagcaggaaaccctggcatggcttaaagcgatgaaaaccaattttgtggcctacaagggcaacagcacggtgatgaaagcggtgaatgccggtcagattgatggcggcgttatctatcattactaccgctttgtcgatcaggcgaaaaccggcgagaacagcaaaaatacccgtctccactactttaaaaaccaggatccgggcgcctttgtcagcatttccggcggcggcgtgctggcctccagcaaacatcaggaacaggctcaggcctttatcaagtggatcaccggcaagcagggacaggatgagctgcgcaccaataacgcctttgaatacgccgttggcgtcaacgccgcgtccaacccgaagctgacgccgctgaaagcgttagaggcgccgaaggttgagccgtcttcgctgaacagcaaaaaagtggttgatttgatgacccaggctggcctgctgtaa

SEQ ID NO: 178859 - DNA, 381 bp, Klebsiella oxytoca
atgcacaatcgtcggcttcctggtaaatggtttttgatactgacctgcctggtcatggcattctgccttgttcagcgggcggcctatctgcaccattttttggccgatgtcggcgccggcacgcaggcgatacccttcagcgcgcaggcccagcagccgtcttctgaggaggctgagccaggaccctcgccctgtcagctgagcgctaaatccctgctctgcgcgcagccgctattctttgatggcgccttacctgccgtcatactcttcctcgccctgcttcagctgctcaccgcagggcgtccggtggttttccgggacgatcccgtccggccgcccacgctgcgaatacaccttaaaaactgcgttttccgtgaatga

SEQ ID NO: 178860 - DNA, 2025 bp, Klebsiella oxytoca
atgctgaatatcttcaggggcttcgtcttcctgttgctggcctgcgcgggcgttgcccacggggcggacaccggatggctgacatccccgcaaaacgaccatgcccggatccgcttccaggcggaaaaaggcaacgatcggatcgacggactgctctctattgagctggcctccggctggaaaacctactggcgctcgccgggcgaaggcggcgtcgccccgcaaatcatctggaacaacggggaacaggcgcggtggtactggcctgccccgtcaagattcaagatttccggcctgacgacccagggctaccatgaccgggtcgcgatcccgatgacgatcgccgccgcctccggcgacgtgctggaaggcacgcttacgctatcgacctgcagcaacgtctgtctgctgaccgactaccggctgcgtctcgatttcaatcagcccgcggacggcgatttccgggacgcctttgcccgggccatgcgcactgtcccggcagataccggcataaccaacgatctcgccgcgcatcgggtcgggagccagctggtcatcaccgccaccgcgaccggcgaatggaaaaaccccgggatctattttgaccctatggacgggggaattgtggccggcgatccggacattcgcgccgagggcagccacctcaaggtgacggtaccggtcaccgacgaatggggagaaatccccgccacgctggcaggaaaagcgctgtcgttggtgctgacaaatggtgaaaaagcgcagcagataaaccttacgactggcgcggatctcgccccggcggcgacggttagtctcgggaaaatagtgcttttcgcgctgctcggcggcttaatccttaacctgatgccgtgcgtattgccggtgatgggcatgaagctcagcgcggtgctgcaggccggttcagaccggggcatggtcaggctgcgttttctggccaccagcgcgggtattctgacctcgtttgctctgctggcgctgatggtgacgatactgaagctcaccggcgcatcgctgggctgggggatccagtttcagaatccctggtttatcggcttaatggttgccgtcacctttctcttttcgctgaacctcttcggggtagtcgagatgctgcttccctcggcagccgtgagccggatggcgaccgccggcggcgccgggatggcgggcagcttctgcgagggcgtttttgccaccctgctggcaacgccctgctcggctcccttcctgggtacggccgtcgctttcgcgcttgccgctccgcttcaggagctgtggctgatttttctggtgctcgggctggggatggctgcgccgtggctgttcgtcgccctgttcccgcaaaccgccgtcctgctcccccgccccggccgctggatgaacaccctgaaaatggcgcttggcgtcatgatgctggcctccagcctctggctgacgacgctgctcggcctgcacctgggcgaaacggcgggcggcatgctgacgctggccctcaccgtggcggccccgatcgccttgttagtcgcccgtccgcgagcgacgccagcattctggctggtgattatcgcgctggcggcgtttgccggctttcaggttcgcggcctgctcgccgagggtgctatcgtctcgtcgccggaggctaacgctcagcaaattcgctggcagcctctcagcgaggcggcgatccagagcgcgctggcggatggcaaacgggtgtttatcgatatctcagccgactggtgcgtcacgtgcaaagtcaatgaacaccgggtgttaaatcagcccgccatcatcagcgcgttggctgagccggatgtcgttgcgctgcgcggcgactggagcaagccctctgagccgatcgcccgtttcctgcaaagccgaaatcgttacgccattcccttcaatcaggtctacggtccaggcgtgccgcaaggagagacgctcccgccgctgctcgatcaacaaagcgtcctgaacgcgctcactcatgccagaggttaa

SEQ ID NO: 178861 - DNA, 723 bp, Klebsiella oxytoca
atgaaaactacgctgctcacttttcttcttctctcggcgtcgttgacggcgtcagcctcgtcgccgctcacgccggcgcaggaggctcgcgtgcaggcactggtccaggagacgctgctcagccatcctgaaattttggtcgccgcggccgataagctcgatcggcagaatgcccgggcggaacaggaatcgctcaagcaggtgctgtcgcagtacggcgattttctctttcacgacccccactcaccgcgaatcggcgcgcaaaagccgaagctgacgctggtggtctttacggatcataactgtccgtattgtaaaaagtttgacccctatctggagaagattgtggaaaaatacccggatgttgcggtgatttttaagtttctgccctggcgctccgaaagctcaatgaccgcggccagggatgcgctcaccctgtggcgcacgcatcctgaacagttcgccaaatttaatgcgatcctgatggcaaaaaaggggtatcacgacggcgccagccttgagcaggcgaaaaaaaaggcgggcgtcatcgtggctaagccggatgcgcaaagcctggagacgattcagaaaagcttctctgtcgccgaaaagctcggcattcagggaacgccggccacgctaattggcgatgagatgctgtcgggctggatcccctgggagcaatttgatgccacaatcggtgatgcgctgaaaaaacagtaa

SEQ ID NO: 178862 - DNA, 336 bp, Klebsiella oxytoca
atggaacgtttatttgtctacggcacgctgcgtccgggccactccaatgcccatattatggacaacattggcggcgagtggctgcccggctatgtgcagggtctgttttatgaacgcggctggggagcggcggcggattttccggggatcgtgctcgacaacaacgggcctcgggtcgacggctacctgttcctgtccgcgaatcttagcgcccactggccaatgctggatgcgtttgaagagggctacgaccgcgttgccgttgacgttaccatggaagacggccagcgcgtgaccgcctggatctatcagctacagccaaaggtcgcagcgtaa

SEQ ID NO: 178863 - DNA, 1029 bp, Klebsiella oxytoca
atgaaaaagattggctttttgtcatttggtcactggacgccgtcgccgcagtccgggacgcgttcggccgctgatgcgctgctgcaatccatcgatctcgccgttgccgccgaagagctgggcgcggatggcgcctatttcagggtgcatcatttcgcccgccagcttagctcgccgtttcccctgctggcagcggtcggggcgaaaaccaaacgtattgaaatcggcaccggcgttatcgatatgcgttatgaaaacccgctgtatatggccgaggatgcgggcgcggcggatttaatctccggcggccgtttacagctgggtatcagccgcggctcgccggagcaggtgatcgatggctggcgctattttggttatgttcccggcgagggcgaaaacgagtccgacatggcgcgccgccacaccgaagtgctgctggacgcgctgcgcggagaggggtttgcgaaacctaacccgcagcccatgttccccaatccgccgggactgctgcggcttgagccatattctgaagggctgcgcgagcgaatctggtggggcgccggttcgaatgcgacggcaagatgggcggcaacgctggggatgaacctgcaaagttcgacgctgaaagacgatgaaaccggcgagccgttccatatccagcaggcgaagcagatccgcgcctatcgcgaggcctgggcagaagcgggccatacgcgcacgccgcgggtttcggtcagccgcagcattttcgctctgatgaacgatcgcgaccggatgtatttcggttcaggccgtgacgagagcgattcgataggttttctcgacgagaagacccgcgccatttttggccgcagctacgccgccgagccggataagctggtcgaacagctgaagcaggacgaggcgattgccgaagcggatacgctgttgctgacggtgccgaaccagctgggcgtggagtataacgcccacgtgattgagtccatactgaagcacgttgcgccggcaatgggctggcgcgacgcataa

SEQ ID NO: 178864 - DNA, 378 bp, Klebsiella oxytoca
atgagtcagatggtacggaaaaattaccctgaactgggcgaggtcaaggcgccctacgttcattcggttaagcacgggaacacgctctatatttcagggctcaccgcgtttggcacccgtgcgcagcaggccggtattggcgcacaggcggaggaggtttttacgcagatacgaaccgttgcccgcgtcgaaggcatcgatttttcgtctcttatcaaagtcacgatctttatcacttcttttgatgagatcgacgagttgcgcaaagtgctttaccggaactacagcgatcatctacccgccagctcgctcgtagaagtcagccgcctgttttctgcggatctcaaaattgaaattgaggcaatattcggcctgtga

SEQ ID NO: 178865 - DNA, 888 bp, Klebsiella oxytoca
atgaacaagctgaactactctcttaaatacgtcgaatacttattcagaaaatgccggggaatgatgacttcggatctttactttcatactgccaaactcaacaaagcgtcgcaaacctttgccaatctcaaaaaacctatcacgctgagtgagaagatatgccaccgcctcgtcttcgatcataacgccctttatactctgctggccgacaaactggcggtcagagaatatgtccgtacacgaacgcagcttgtgcaggtgataccgttaattggcgtttaccaccgcgcagaggatattgattttagcagactcccggcaaaattcgtgttgaagtgcaatcatgactgcggcagcaccgttatatgcaccgacagagacaattttaatccggccaataccttaaaccgactcaagctggcgctcaaaaagaatatgtattacacaacccgagagtggcaatataagcatattgccccggttattctctgtgagatatttatcgacttattttctgaccgagataagaacgttacgcctgaaatgttaagaatacactgttttcatggggtagcctgctttgtggaggctgatttcaccgataaacaggggcgcgaatatattaatgtctatgacagatcgtggcggctgcagccttttcagatggaatatccaaacacgccggggccggtacctgaacccgaatcctttcatcgcgccgtcactgccgcgcaggaattggcaaaagagattgactactgccgtgtcgatctgatgctaaaagaaaatgaaatctatttcagtgaaataacattaagtccgaagcgaggtaaacttaatatcacaccggcgatatgggatgctaagctcggggacatgtggcactga

SEQ ID NO: 178866 - DNA, 1071 bp, Klebsiella oxytoca
atgaacaaagaaacgattctgagccgtcagatattgacctatatgctgtcgttaaccttcattattatcgctatcgccgtggtgggctcttatctattttatagcttcttgattgactacctgccgggaggcgccgtctccgggagcgaagatgatatgaccttgctggactggctgtggatcatgatagcttcagtcaccagtctggtggtatcgctgttttttaccgtgaaactctctgccagaatattgacgccgctaaatgccgttgcccagagcctgaaacaaatttcgcagggcaatcttggcgcaagagcgtccggaaccagctctcagctgggcgagattaataatcttgttaatgatttcaatgaaatggcggaaaagctgcagaccctcgacgttcagcgaaatctgtggaacgcggccatcgctcacgaactcagaactcccgtcactattctgcgcggaaggcttcaggggctggtcgaaggggtgtttgagccagagcccgcgctattcagaaacctgctgagacaaacggaaggcctgactaatttaatcgaggatctgcgggtcgtaagttcctccggcggcgccggctatacgctgacgctcagcgaggtcgatctcgaagcgacgattaccagcgcgcttgacacttttttaccggagtttcgcagcaagcggttcacccttatcactgaactcaagcagcagttgtgcgtttgcgatcctttgcgtatgacgcagtgcctgacggtactgttcgataatgcgttaaaatattccacctcccgaactttgctggtaaagaatggaacctctggcaaagaaaattatattctggttcaggatcgcggtcccggaattcctgaagaactccagcggctgttatttgaaccttttcagcgcggagaatatgccagacatattaatcctcaaggctgcggattgggattatcggtcgtcaaagcgattatgctcgctcacggcggcagcgtgagctatcggttgtcacgagaaaatcactcgatttttaaattatcatggcccgtcaacctgccctga

SEQ ID NO: 178867 - DNA, 705 bp, Klebsiella oxytoca
atgaacaaaagcaatctgataattatcgccgaggatgacgatgaaattgccgctattctgacaggctatttacatcgggcgggaatgaaaacctgtcgggcggaggacggcgagcaggcgataaatcttacccgtctgcataaaccggacctcgtgttactggatatccatctacccgtttatgatggctggaacgtgctgacgaccttacgcaaagagactaacgtgccggttatcatggtgaccgcgcttgatcaggacgtcgataaactgatgggactgaggctcggcgcagatgactacgtgataaaaccgtttaatccctccgaggtgatcgccagagtggaagcggtactccgcagaacccggccgaatgccgaagtcgccaattcaaggccattaagattgccgtttctgaccatttatcccgatgaattttatgtggaaattaccgtcgagaataagattgtcaccccggtgttgaccaccaccgaatttaagcttttgacctacctggcgcgcagtccgcgaaaggtgtgctcacgcgaagagttactcgatgcctgcctgcccgagggggattcacttgatcgaaccgttgatagccatatgagtaaactgcggaaaaagcttgaacacgcggggctcaaaggcatcccggagagcatcagaggagtgggctatcggttaggtgagaaaaaatga

SEQ ID NO: 178868 - DNA, 387 bp, Klebsiella oxytoca
atggaaagcttaagtaatattcgtcgtgaaaaagttctcgctgcctttatattttccctgacagcatgggcgttactttatttatggttatacctggtacatgccattgatgaaaaggtagcttccacgacgctgtcatcgccattggtccatgccagcatcaccttctcagtcctggcgtttatattccaaaagaaacctggcgcgttaagagaattagcgattatcgtcttctggctggtattaatatttatttatagcattgttgtatttaatatacttttgaatatcatacccgacatatatgatattatcttttattatgagtgctttttgctgatcgttttctgcggttctccggcgtatttattgatgcggataatttga

SEQ ID NO: 178869 - DNA, 3120 bp, Klebsiella oxytoca
atgccgcacttttttattgaacgtcctattttcgcctgggtggtcgcgctgtttatcgtgctgacgggaatattgtccattccgcgcctgccggttgcgcaatatcctgccgtcgcaccgccgggcattattatttcgctcagctatccgggggccagcccggatgtgatgaatacgtctgttgtttcacttatcgagcgcgagatttctggcgtggataatttgctttattttgaatccaccagcgataccaccggcatggcttccattacggtaaccttcagaccgggaacggacgttaagctcgcgcagatggatctgcaaaaccagattaaaatcgtcgagccgcgtttaccacaggcggtaaggcaaaatggcataacggttgaggcggccaattccggctttctgatgatggtggggttaaaatccccgacgggagagtatcaggaggctgatttaagcgactattttgctcgcaatgtgatcgatgagctgcgccgcgtccctggcgttggcaaagtccagctcttcggcggggaaaaagcgctgcgtatctggctggatcctataaagctccacggttacgggctttccgtcacggacgtggtgagcgctgtcggccaacaaaacgtgattgtttctcccggcagaacgggagatgaaccaacgacgccgcagcaggccgttacttatccgataaccgttaaaggtcagctctcatcggttgaggcgtttcgcaacattaccttaaaatctgaggtgactggcgcacggctaaagttggctgatattgcgcgcgtggagtccgggttacaaagctatgcttttggcatacgagaaaacggcgttcccgccacggctgccgctattcagctctctcccggcgcaaatgcgatcggcacggcatcaggggtccgcgcgcggctggcggagctttcaggcgtgcttcctgaagcaatggcgttcacggttccgtttgataccgccccctttgtgaagctttctattttgaaggtggtggaaacctttgccgaagcaatggtgctggtgtttctcgttatgctgctgtttctgcacaaaatccgctgcacgtttatccccgcaatcgtagccccggtggcgctgctgggcaccttaacggtgatgctgtttagcggctattccatcaatatcctgaccatgttcggcatggtgctggcaatcggcatcattgttgatgacgctattgttgttgtggagaacgttgagcgcctcatggaagaaaaggggctctccccgaagcaggccacgcgggaagcgatgagtgaaatcaccccggccattatgggtattacgctggtgctgaccgcggtatttattcccatgggttttgccgacgggtcggtagggattatttaccggcaattctgcatttctatggcagtatccattttattatcggcattcctggcgctgacgctcacccctgccctttgcgctacgttacttcggccgcatcagcctgaccggagcaaaggcggctgtttttccgcgtggtttaacgcccgttttcaccgcctcgcctcattttacgcctccgggctcgggtttgttctgaaacggaccggacgcatgatgctgctgtataccgcgctctgtctcgcgctgtatgccggtctatcctcattaccttcgtcatttttaccggatgaagatcagggttactttatgtcgtcgatccagctcccttccgacgccacgatgcagcgtacgcttaaggtggtacaacgatttgaagatgaaattgccgcgcggcaggccgttgaaagcaacatcatgatcctgggatttgggttttcaggctcagggcaaaactctgccatggctttcaccaccttgaaggactggaaaaatcgcgagggcgcgaccgcccagggtgaagcagagtatattcaaagcagtatggaaagcgttcccgatgccgtcacgatgagcctgctccctccggctatctccgacatggggacctcatccgggtttacctggtatttgcaggaccgtggcggcaagggctatccggccctgaaaaaggcagcggatgagctggtaaagcgtgcgaaccagagtcacctgttgaacgatgtctatatcgatgggctccctgaagggagtagcctgatgcttaacgtcgacagggaaaaagcggaagcgatgggcgtatcgtttgatgagattaaccaaacgattaccgtcgcaacgggctccagttacgtcaatgactataccaataatggccgggttcaacaggtgatcgttcaggcggatgcgccctaccgtatgcaaccggagcagttattgaccctgtcggtgaagaaccgctcggggcggatgcttcctttggcggcgtttgtgacgctctcctggaacgttgccccgcagcagctcaatcgctatcagggatatccggccatccgcattagcggaagcgccgccgcgggcgagtccacgggtagcgcaataatggcgatggagaagctggcggaccagttgccggcgggtttcgccggagaatgggcggggagttcgttacaggaaaagcagtccgcgtcacagctgccggggctgataatactctcggtgctggtcgtattcatggtgctggccgcactctatgaaagctggtcgattcccttcgcggtaatgcttgtggttcctctcggcctgctcggcgcggttgtggccgtgacggtggcgaatatgaccaacgatgtcttttttaaagtgggcctgataaccctgattggcctttccgctaaaaatgcgattctgattgtggaatttgccagacaactgatgagccagggaatgaacgtggtggatgcaacattactcgcctcaacgcagcgcttacgcccaatactcatgacctcgctggcatttacattaggcgtcgtaccgctgatgctggccagcggggcgagcgacacgacccagcatgccctgggaacgggcgtcttcgggggtatgataagcgcaacggtgctggctatcttctttgtccccgtctttttcgtcatgattacgcggtgcattaaacaacgtcggaaaggggaaaacaccccgcgccatattaaatag

SEQ ID NO: 178870 - DNA, 261 bp, Klebsiella oxytoca
atggtcagacgctttttggtgtgtttcttcatgctgtgcgcatgctcagcctatgccgctaacggcgggaatggcggcgacggcgggaatgggaataactcggatgggggcaatggctctgatggcagcgcgaccgcgtctggacgcgatggttgccccggcggcacgcagcctgactcgtccggaaaattttatcttccaggcacaaaagagccgtgcaatccgggctggcaggataccatgaaaagcgcgcgccattag

SEQ ID NO: 178871 - DNA, 222 bp, Klebsiella oxytoca
atgtcctcaagaattaaaggtctggtcaagtggtataatgagtcgaagggctttggtttcatttcacctctcgatggcggtaaagatatctcggtccattgctcggcgctgcgtggtgataattttaataccctgtttgaaggccagaaagttgaatatgccatactccatagagatgacaaaggccctgccgccacccatgtcatactgtgcgataaataa

SEQ ID NO: 178872 - DNA, 1434 bp, Klebsiella oxytoca
atgttgaagtcaaagctaataaaaatagcggtgcttatttttattattatattagcaatcatcattccaccccccgagggattaacgaaagaagcctggatactggccggtatctacctggcatccattataggtctggtgagtaagccttatcctgagccggttatcatgctgtcggcggtaggcttgtcgtgcttaacggtggcacgatttgatgactcccccgtcaggtcaatggatgtactgagcggtttttcctcgggaacgacatggctggtatttagcgcgtttactttgagcgccgcttttgtcaccaccggattagggaaacgtctggcgtactggtttattttaaagttcggtgggacaaccctgcggctggggtatgtcacggcgctgttggatttaatgctgtcaccggcgacgccctctaacaccgcacgcgccggcggcgtcgtattcccgattatcaatagcattgccctggtgttaggttcaacgccaaaagagagtccgcgtcaggccggacgttatctgatggtgaatatctatatggtgactaaaaccaccagctatatgtttttgaccgcgtttgccggaaatgccttagcgttacagttaatttccgatatttttcatatccgcataagctgggtagggtgggctctggcgggggtaccgcttgggctattgatgttagccgtcattccttatatcacctacaaaatagtgcgcccgcaattaaaagaaatagacaatgtaaaaatagccactgcgggcctgaatgacctggggcccatcagttcgaaagagaaagggctgatcgtggtctttatctccgcactctctggctggatattttctcattatctggggctgaatgaatcctccgttgcggtgattgccatggctggcgctttgctcacgaatgtcatttgctggaatgatgtgctgcaaaataagggcggctggaatacgttaatctggtacggcggcattattggactgagtgcgaccttaagcaaagagggattttttaaatggcttgccgcctttatgtccgagcatctggatttcctcggcgccggtaacacgaccattgtgattattgtttttttaagcatcgtcgtgcgctatttattcgcctccggcggtgcatacgtcgcggctatggttcccgtcttcgccaccgtcggactggttaccggaacggcgcctgcgctgctggcgctcgccatcctgttttctaactcttacgggggctgtatcacgcactatggcggtgccgccgggccgattatctttgccgccggttataacgatattaaatcctggtggttaaccgggaccataatcgctttattaacgtttctgctgcatatggttgtcggcattccgtggtggggctttttgattcagcacggaatactctga

SEQ ID NO: 178873 - DNA, 2601 bp, Klebsiella oxytoca
atgttagaagcttataataagcatgtggacgaacgtgctgaaaaaaatattccaccgaagccgttaaccgctgagcaaacgcaagaattaattacattactgaccagcaagacctgcgatgataaaaatgcccttgtacagctgttagcgcatcgcgtgccgccgggcgtcgatccggcggcgaagattaaagccgattttctttatcagcagatcaaagaagaaaacccggcgagtattattgcgcctcagcaggctattgaactgctgggtaccatgcagggtggttataatgttcaaccgctcattcacttactggacgatccccgctgggccagcagcgcagcggaacaattaagcgccacgctgcttatttttgaaaaatttaaggatgtggaagaaaaggcgaaacaaggaaatgcctgggcgcaaaaagtgattcagtcatgggccgacgccgaatggtttttacgtcgtccggcgctgccggagaagatcacgctgaaagtattcaaagtgacgggggaaaccaatactgatgatttgtcccctgcgcccgaggcatggtcacgtccggatattcctctgcatgccttgtccatgttgtgtcatccgcgcgacggcgtcagcccggatgaaccgggaagccgcgggccgatacgacagctagagcagttaaagaaagagggctatccgctggtctacgtcggcgatgtcgtcggcaccggctcttcgcgaaaatcggccactaactctattttatggcaccttggcaacgatatgccatgggtgccgaataaacgaagcggcggctttgtttttggcggcaatattgcgcccatcttttttaataccctggaagattccggcgcgctgccccttgaaatggatgtttccgcgctatccacgggaatgctgattgatctctatccgtatcgcggggaaatttgcgaagcccacagccagcgtcctgtcacctcattttccctgaaaacggacgttctgctggatgaagtgcgcgccggagggcgcattccgctgattattggccgcagcctgacggccagagcgcggcaatcactgaaccttgcgccctccgacgttttccgccggccgaaagcgccggcaccctccgccgctggctttacgctggcgcagaaaatagtggggagagcctgcggcgttgccgggatccgaccaggacagtactgcgagccgcgagtcaccaccgtcggttcgcaggataccaccggaggaatgacgcgcgatgagcttaccgatctggcctgcctgaatttttccgctgatttggttatgcagtctttctgccatacctcggcctatcccaagccggttgatgtgaagctgcatgaaacgctgcccgagtttatcagccaccgaaacggcgtggcgctgaagccgggtgatggcattatccactcctggcttaaccgtatgctgattcctgataccgtggggaccggggcggattcgcacacccgtttcccgcttggcatctcttttcccgggggctccgggctggtggcctttgctgcggcaacgggcattatgccgctggatatgccggagtccgtactggtccgttttacgggagagatgcagccggggataaccctgcgcgatctggttcacgctattccgctctatgcccgcaagcagggattactgacggtggagaaaaaaaataagatcaatattttctccggccgtatcctggaaatcgaagggctcgggatgctgaaagcggagcaggcctttgaactggccgacgcctcggccgaacgctccgcagcggcgtgcgtgctgcgtctggaagaggagaacgtggcggaatacctgcgctccaatgccacattgctacgctggatgattaatcagggttatgaaaatgccgacacgctggcgcggcgaattgcggaaattgaggcgtggctggcgaatccgtcgctgctggtggccgatgagaacgccgaatatgccgcggtgattgagatcgatctcacggaaattaccgaacccatcgtctgtgcgccgaacgatccggatgacgcccggctgctgtcggaagtcgcgcgtacgccgatagatgaggtctttattggctcctgcatgacgaatattggccatttccgcgccgccggtaaaattattgccgacgcccgcgagatacccgtacggctgtggctggctccgccgacgaaaatggatgcgcgtcagcttgccagtgaaggctactttaatcagtttataaaaacgggcgccagaatcgaacccgccggctgttcgctgtgtatggggaaccaggcgcgggtacgtcagggcagttccgttgtttcaacatcgactcgtaacttcccgaatcgtctgggcaccgatgcgaacgtttttttagcatcggcggagctgagcgccgtggcggcgatgatagggaaaatgccgaccgttgaacaatatttctggcacatggataaaatcaaagcatcaagggacgatatttatcgttacctgaacttcgatcggctgccagagtatcagtcaacgaatgatggaaaaaatattattaaaacattcgctggctaa

SEQ ID NO: 178874 - DNA, 567 bp, Klebsiella oxytoca
atgactacccaacgtctggaacagctcagcgagaagttgacgattattctggtgccgggcctgcgagacagcgatgagcatcactggcaaagctgttggagtcgtcgttttcctttttggaagcggataagccagcggaactggctggagccggatatcgatgcctgggtatccgctatccgtcgggagctggctacctgtcagcggccggccgtgctggtcggccacagctttggggcgctcgccgcatgtcgcctgattcagacgcaaaaggtgaacatcgcgggtatcgtcatggttgcgcctgcggagccatcgctcttcgaactggacgaggcggtacttcccgagaggctgcgggtgcccagcctcctgtttgccagccgaaacgatccgttaatgacctttaagcgagcgcagtactgggcgcaatgctggggagggcggttaatcgatctgggtgacgccgggcatattaatgctgagtccggattcggggagtggaattatggtctggagcagttagcagaattttgtgaaggcttaccgcaatttattaaaagttaa

SEQ ID NO: 178875 - DNA, 873 bp, Klebsiella oxytoca
atgactattttcgcggtcaacgctgaacgggctgagcaacgggaaagcatcgcctggctggctgccgaggcgatgtatcgggaagtgagattaacgccaaagcccgggctggttgatggcgagaacaatggcgcgcatcgtgatatgaacatcgcgctgtttatggccagtattcgcgccgtctcgccctggtttccgcgcttttttgcgcagggaaaggcgacggcggatttgcctgccccgcagacgctattggcgataaggcccacaggactggcctgcgaacaggcgatgtttaacgccacggggggagtaaacacccacaaaggcggcattttttccctcggcctgctgtgcgccgccgctgggcgccttgttaagcgcaaccagatgcttagccagcgcaatctgtgcgaggaaacccgcgcgatgtgcgcgggcctggttagccaggaactgaaaagaaagggcctcgccaaaaccaaaggcgagcatatttttcagcgctttgggcttagcggcgcgcggggtgaggctgagaacggcttttataccgtcaggcagttcgggctgccgcagtggcagaaagcgcggcgggaggggttatctgagcaggatgcgctgctcaggatgctgctggccctgatggccttcaaccccgataccaatgtggtgtcccggggcgggctgagcggcctgcagtatgtgcagcgctatgcgcaacgcgttctgaatatagaacacctggcgggtgaaaagctcagaaaagcgctgagacacatggataaggcgttgattgacagaaatattagccctggcggcagcgcggatctccttgccgttggctgggtactttcccattacccggcctga

SEQ ID NO: 178876 - DNA, 549 bp, Klebsiella oxytoca
atgatcggcgaaacaacaaacgcttcctgcgcccctctcacccttgaggaagtcctcaaagccagagaagcgcgcgcgagtgtacaacaggcgtggctgcgccgcttcgaacaaccaatggtatccaccacgctcgtctggcccggagaggtaaaagatacgccgcttgcccggcaggttatggcggaggcgacggacgcgttcagccagctgctgcggaaacatcgctggggcgtttccagacacgacgttcgttttcagcccaccgggcccgaagcgttctggtccgtagcggcgccagcctggatgatcaagcacgtgacggcgcatcttgaagatcatcatcctctcgggcgtctgtgggatatcgatgttttttgtcccacatccggattaattaagcgcagcgcgatccgacagccgatgcgcaaatgcttcatttgcaatgaggctgcccacgtctgttcccgtatgcgccgccattctcagaatgaacttgcgcaagtgattgaggatttagcctatgactattttcgcggtcaacgctga

SEQ ID NO: 178877 - DNA, 1521 bp, Klebsiella oxytoca
atgaatcaattaaccgaagcccttcataatatatccggcgcccagcatcagtatgagatattttccggcgcaaatacccatacgccctatcttgctgatacccggcaaaaatatcagcgcaaactttttgacacgctggatgaagttttatcgcgctgcgatttacgcgatgggatgaccgtttcatttcatcacgccttccgcgagggtgatcaagtgattaactacgttatggccaggctggcggaaaaaggcctgcgagggctgacgctggcgtcaagttccctgatgacctgcaacgcgccgctgatcgagcatattaaacacggcgttattagcaaaatctatacctcagggatgcgcggtgaattagcggatgcgatttcacacggcctgatggaggagccggtacagatccactcgcacggcggcagggtcaatctgattgaaaagggtgaaattaatattgatgtcgcgttcctggcggtctcctgctgcgacgaatatggcaatgccagcggcagcggcggcaaatcccgatgcggctcgcttggctacgcgatggtcgatgcaaaatatgcccgcaaggtggttttgctgacggaaagcattgagccgtttccgtatatgccggccagcattattcaggatcaggttgattatattgtcaaaatcgacagcgtaggcgacccggcgaaaatcagcgttggcgccgcgcgcgtgaccagcaatccgcgagagctgatgatcgcgcggtctgctgcggacgtcattgagcattccggttattttcgcgatggtttttctctgcaaacgggatcgggcgcggcgtccaccgcctgtacgcgattcctggaatcccgcatgaggaaacacaatatcgtcgccagctttgccttaggcggcattaccggcagcattgtcgatctgcatgaaaaggggctgattactaagctgctggatacacaaagttttgatggcgcggcgggggagtcgctggcgaaaaatccgcaccacgttgaaatctcgaccagcgtttacgccaacccggcggcgaaagccgcctgctgcgaccgcgtggatatcgtcatcttaagcgcgctggaaattgatacggattttaacgtcaacgttctgaccggctccgacggcgtgatgcgcggggcatcgggcggacattgcgatgtcgcggcggcggcaaatttaactatcgtggtcgcgcccctgatccgcagccgcattcccaccgtcgtcaggcacgtcaccacccgcgtaacgccgggagagagcattgacgtgctcgtcaccgacctcggcattgccgtgaatcctgcccgtccggaagtcaaagagaggctgacggcggccggtttgccggtcgttgacatcgaagcgctttatcagacatcgctggtaatttctggcgagccgaaacctattgagtttacctcgcgcattgtcggcgtcgtgcgttatcgcgatggcagcgtcattgatgtggtaaggcaggtgaaagaatga

SEQ ID NO: 178878 - DNA, 879 bp, Klebsiella oxytoca
atgatgaaaaaattacgccgtagcatgctttttttaccgggttcaagcgccgctatgctttcaacagcctttatttataaacccgattcaatcatgtttgacctggaagatgcggtctcgttgaaagagaaagacagcgcgcggctgctggtgttccatgcgctacagcatcctatgtataaagatattgaaaccgttgtcaggattaatccgctgaatacgccatttggcttaaaagacctggaatcggcggtgcgcgccggcgtcgatgttatccgtttacccaaaaccgatacgccggaagatatttaccagcttgagcgtgaaattgtgcgtattgaagagagctgcggccgcccggtgggctctacgcagctgatggcggcgattgaatcggcggtgggggtcattaatgccgtcgctatcgccagatcctctcaacgcctgatggggattgcgctggcggcgtttgattacgtcatggatatgcaaacggaacgcggcgacggtaccgagctgttttacgcgcgctgcgcggtattacatgcggcccgcggggcaggtattgatgcgtttgacgtggtctatgccgatattaatgacgaggccggctttttgaaagaagtggatttgattaaacgtatgggctttaacggtaagtcgcttattaatccgcggcagatagagatcttacataatgcctatgcccccactcaggaagaagttgattacgcggagcgtgttattgccgcggccgaagaaggggagcgtagcggacttggggtgatttcactgaacggcaaaatgattgacgcgccgatcatcaaccatgcccgggtggttattgaacgtaaaaatgcctccggcatccggcaataa

SEQ ID NO: 178879 - DNA, 291 bp, Klebsiella oxytoca
atgaaaatattacatgcggcaatcgccgggacgctggaatccagcgacctggttgtcaaagtcagcccctacgatgatgggctcgatattactatcaacagcgaagtgtacaaacaatttggtgaacagattacggcagtggttaatgaaacactttccgcattaaacgttacgcaggggcaaattattgttgaggataagggcgcgctggactgcgttatccgcgccagaatgcaggcggcgattttacggggaacggccagcaacgaaattgcgtgggaaaaattatga

SEQ ID NO: 178880 - DNA, 1074 bp, Klebsiella oxytoca
atgtacaccgaccaaacgctagaattcgagaaagtggaaactagcaacggtaccttcagagacgaaattattctctttctgaagaacaatggattaggcatcgacggcgacattgagcaatttgttgtcgcgcgctgccagcggcagctggttgcctgcgccgggcttgcggggaatacgttaaaatgcattgcggttgccagagagtggcgcgggacggcgttaggcctgaaaatcattcatgaagcggagctgcaggctgttcagaacggcgaacatcagctttttctcctgacgtgtccggacaatgtgcggtcgttccagggatgcggattttatcctttggtcaccctcgataacagggcgacgctgatggagaattcgccggttggcatccatcgctactgccgccaactgcggggccagcatttggtgacggccggaaatatcggcgggattgtgatgaatgcaaatccctttacgttagggcaccagtatctgattgagcaggctgcaaaagcgtgcgactggctgcatgtctttgtcgttgaggaagatctgtccacgttttcctttcggcaacggtttgccatggttcaggaggggtcacggcatctgcctaatattacggtccatcctggctcaaaatatattatttctcgaggaacattccccggttactttctcaaagaaaaacaaattattaacgaggtgtatgccgcaatcgatttgcttatgttccgccgttacattgcaccggctttaaatattaatcagcgctttgttggtactgaacccttctgtaaggtgaccgcgcaatataatgacgcaatgcatcactggctggaggatgagatgacaatacctgccgccagtatcaaggtgaatgagattcagcggatgaccgatatgaataatcttcccatctccgcctctgcggtcaggaaattgttaagtcacgaagatatgcacaccgttaaaagtatggtgcctgcaactacgatgccctatttatataaatggttatcagcgaatcaatctaagcagcccgatttagatatggttgatgcttaa

SEQ ID NO: 178881 - DNA, 903 bp, Klebsiella oxytoca
atgaaattagcaagctatgttcatcatggtcgtaagagttatggaatattgacggatacaggcattattgacctgggtggcaagattggtcatcaatatcgtacgctgaaggacttactgcagtggggcgctattgagatcgccggccaatatgttaattatccggtcgatgtcatgatggctgatattacttttttaccggtcattgaaaatccagggaaaattttctgcgtcggtatgaactatgcggaaaaaagaaaagagttttctgaaaccagcgatgcgccgaccctctttattcgttttcctgactcgcaaaccggtcatgcaacaccgatattaaaacccgcgctatccaatgaatttgattatgaaggtgagctggccgttattattggcaaaccgggtatgaatatcgatactggcgctgccctgagccatgttgcaggctatagctgctatatggatggatcggtgcgcgactggcagcatgcctggtttaccgccgggaaaaactggcggcagaccggcgcgtttggtccctgcctgacaaccgttgatgaaatacccgatccccaccgcttgtctattcaaacctatttgaacggcattatggttcagaatgattcgacgagcagtatgatccataaagttgccgatctgattagctatatcagtacttttacggcgctcagcgccggcgatgtcattattaccggctctcctggcggcgtcggtaaaaaaagaacgcccccactctttatgcacgaaggcgatcgggtcgaggtggtaattgaaaatattgggcatctcatgaatacgattgtcgaatcaaaaccgcagcacgaattgcagatgtcgacgtctccgcgggctcagacaagattatttgacgctcattaa

SEQ ID NO: 178882 - DNA, 1239 bp, Klebsiella oxytoca
atggctataacccatacgaaagataatcagcttaattctgctcccgtcaaggtcagtaattatattcggatcatcctggccctggcgctatccggccttgcagaattagcctcactcttttttattcaacctctgttacccgttctcgccgtcgaatatgatgtgccggtgagtcaggtgagtatcattctctccgcagaaacggcgcttctggctatcggtttattattcaccggaacgctgtccgatcattacggcagaaaaaaattaattatcgtttcgctgctacttggcggactgctgacgatgctctgtcctctggtcgaatcatgggcgatgctggtggccctgcgtgcggttattggcctggcgctcagcggtatcgctgctgccgcaaccgcctatatcagcgaggaggtcgcgccggtggtggcgggggtggtcaccggatacttcgtttttggtaactcgatgggagggatgtccgggcgcattgtggccagccagctgatcgaccatatctcaataaataccattttctatggttttgcgatcagcctgattttggtggctttgctggtttactttttactcccggcgtctcagaactttaagccaacgcaaaacctcaacgttcttcgcgtggtgaaaggcgcggcatctcactttaaaaataaaaagctggcgttagcctttgtgattagcttcatcatctttggggtattcacctctctctataactacctggctttcttcctgaaaggcgaaccctttcatatttctccggcgaatgcgggcctgctctcctttagctttgccttaagctttttcaccgcccctcaggcgggacgactttccgcaaaatacggcagtatgagagtcctgcgcgcgctgtttgtgatgatggcgctgggaatgctgctgactttaacgtctaacgtcgtcacctttattatcggcgcggtcatttttaccggttgtttctttggttgtcactccgttggcttaagctgggtaagtaaaaatgcaacgcatgcacgtggccaggccgtcgcgctgtatctgttcttctactacatgggcggctcagtgattggtttcgtgaacggctttgttttccactctatgggctggcaggggatgacgggattcattattgcgctactggccgtgggggcggtggttgcaacgtatttgtcttccatcgaaacaaaagccatggttccggttgagtcttaa

SEQ ID NO: 178883 - DNA, 1089 bp, Klebsiella oxytoca
atgttaaagattccttgtgtactgatgcgtggcggtacttcgaaaggcccggtgcttctggccagtgatttaccgacaaaaattgaagaacgcgatgctgtgctgctgggcttaatgggcgcgggtcacgaacttgaaattgatggtattggcggcggcagcccccaaaccagtaaagtcgcgattgttagcccctcggacagtccggatgctgacgtcgactatttatttgttcaggtgatggtcaacgagcgccgcgtcgataccacgcctaactgcggtaatatgctctgtgccgtagggcccttcgcgattgaaaaaggcctggttaaggcgcaaagtccggtgacgacagtgcggatccgcaacctgaataccggtacgctggttgatgcggaagtacaaacgccgaatttttatgtcaactatgaaggcgatacgcacattgatggcgttcccggctgcgctgcgccgattggcctgactttccttaactccgccggatgcaagacgggaaagctgctgccaaccggtaacatcgtcgatgtgattgatgatgtggaagtcacctgcattgatatggcgatgccgatggtgctgattagggcagagcggatgggcaaaacgggagacgaatcaccggccgacctcgatgccgatcgcgcgtttatgaataagctggaaacgatccggcgcaaggcaggtgcgaaaatggggctgggcgatgtcgccgataaagtgatccctaaaccggttctgctgagcgcgcccggcgcaggcgggaccatcagagttcgttattttatgcctcatacctgccataaatcactggctattacgggctctatcggcatatccacggccacgataattgaaggatcggtggcccatcacattgtggccgaccagccgaggacgccgtataccaatattattaatattgaacatccgagcggaaaaatttccgtatctttactcaaagagggagatgatattgagaaaacgcgtgccgcagtgattagaacctcccgtaaattatttgaaggcacggtttgcgtcccggaatatgttttagcggaggaattataa

SEQ ID NO: 178884 - DNA, 927 bp, Klebsiella oxytoca
atgctgcacgatcttcaaggtatacaagcgtttgttaaaattgcagaaattggatgtttcacaagagcatcacattttcttcacacatcccaaccggcgttaacccgccggattaaaaaacttgaagagcagctgggagctacgctatttgaacggacaaccagaaacattaaactcacggctgtaggcagagagtttttacctaaggcaaagaatttaatagatttttatgaaagctcgatcctgagtattaaagaaatggccacccatcaaagcggcgttgtcaccctgtcctgtctccccaccgcggcgttctatttcctcccttcggtcatcagggactataacaatcactaccccaatatccgtatccgcatcctcgagcatagcgccagcgattgtcttgaagccgtcttaaacggtgacgcagatttcggcataaacatgataaacatcacacatcccaatatcgatttctcgccgctggtcaatgaacctttcgtattagcctgccgacgggaccacgaactggcgcagaaatcgctgatcttgtgggaagacctggccaacttcaggcttattggcgttagacgttcaagcggtaaccgctcgctgatcgatcaagcgctggagaatatggactggaagcccaactggttctatgaagtcaggcatctgtcgacgtcgctgggtatggtagaggcagggcttggcgtggcggtggttcccagtctggccatgccgaccgatgagcatcacattcttgtcagccgtccgctcgttgagccggttattcgccgcacgctcggtctcgtgctgcgcagagaaacggcgctgagccctgcagcggaaaagttcagggagatgctattacaactctggtcacaggatacaagcagcccgtggatagggaaatttacccggtag

SEQ ID NO: 178885 - DNA, 825 bp, Klebsiella oxytoca
atgccaacaaaaattcataaattgctgttgtcgctggcgatcgccgccgcgccttttttcagccatgccgaagagtccacctgggatcatattaagcaatcgggcgaactgcgcatcggcgtcgcgcagggagaaccgtggtatttcaaagatccagccaccggtcagtggaacggcattggctataacgtgggtaaagtactggcaaaagatttaggcgtaaaactggtgccggtggagaccacctggggaaatgcggtcgccgcgctgcaggccgggcagattgataccatgctggtgctggaccccaccgatgaacgccgcaaagccgccgacttttccgaccagcctttcctctggtatgcgcagggggtcctgatccgcgacggcgtgaaggccgagagctgggaagatctcaatcgcccggatattaagattggcgtcacgctcggcagcagcccggacctgatactgaccaaaaaattacccaaagtgcagcttgtgcgctttaccaatatggatgaaggcgtcgcagccttctacgccggacgcgtcgacgccctctcgtacgtccacccggcgctggctctgcagcaggcaaaagtgcacaaaggcaacctgattctgccaaaaccgattattgccatcagcaccggcggcgcgctgcgcaaagagagcgatccccgcttccgcaactttctgaatgaagagtttgccaaaatttaccagtcgggacagagcaaacagttttatgaagacgcccttaagctacgcggtgtggatatcagcaaagtgccctcggtgattaaagaagagtggaaataa

SEQ ID NO: 178886 - DNA, 1410 bp, Klebsiella oxytoca
atgccaaactctgattccttaaccgctacgctggcgcgttttgccggcgaactcaccccgtctgcgataccggcgtcggtgaaagccaggatcgctctgcattttatcgatagcctgggctgcggcgttgccggctgcgaagacagcgtgctgcggaaaagcgcgcgggttattcgtagccagtacgcgaccggcaaaagcgcggtgctcgacggtggaactccgctctccgccagcggcgccgcgttcctcaacgccgctgcgataaacgcgctggattatgacgatggttttgaagtcgccgggcgggggatggggcatcccggcgccacgctggtggccggggcgctggccgcggtgggccagggcggggcggtcagcggcggggcgttgctgacctctctggtggcggcctgggaaatcaacagccgcgtgattatctctcagcagccgagtcctgaacggtttcaacaagtgtacggcgtgtgccagcacgaatcgctgggggcggcggtggcgtatggtttactgcgcggctgcgatgccgcggggctggaaaatagcctgggactggccgcctcgttaacccctttgcccacgttgcataaatacaactggcaggcgcgtccactggtttcgtttaaggattacaacgcgccggcggcagaggccggcgtacgcgcggtggagctacacctcgcggggatagtggggccgcgcgagatactcgatggtgaacagggattctggcggatgtcaggctccgaccgctttcagccagaacggctgacggatcatctggcgatgcactggcagctcaggcacgccagtttcaaagactatccggtatgccgctggatgcatacggcgctggcgtcgtttgagcgtctgctggaccgtattccgtcgccagagtcgattgagcggattcgcgtttacggtagttttaccctggcgcgttttttcgccgacgcgcgtcccgtcagcaataccgatgcgcagttcagtctgccgctggcgatagcctgcctggcgtttaaaatcgcgcgtcatcagtggagcagcgatcggacgcgcggcgcggcgccactccttgccttcgctgaccgggttgaaatcatcgccgatgagacctttgaacagctgatgctgcagcatcgccgtcccgccgcgcgcgtggacattgtggtaaagggaaggacgatcgccggagagcgtatcgacttcccgccggggtgtgcagaaaatccgctgccggaacagcggatcgtggataaatgcgtggccaacctatcatcacgcctcagcgcgccgcgggcagcgcggctgattgacgctctgctggatatggaacgctgcgcggacattggcgcggcaatctcgccgcttctgtccgcgccaggagagtag

SEQ ID NO: 178887 - DNA, 672 bp, Klebsiella oxytoca
atgtcgtatcaatgggattttgccgccatctggccatatcgcatgctgttgctggaggggctgtggggtaccattcagatcggcgtcaccagtattttattcggcatgctggccggcattgcgctggcgttgatgaaggcctcgccgctaacgttcttccgtcttccggcgctgatactgatcggcttttatcgtaatactcccgctatcgtccacttcttctggatctactacgctctgccagtcgtcagcccgctgacgctctcgccgtttgctgccgcggtactggcgctctccgcccagtcggccgcgttttatgccgaagtttaccgcggcggcatccagtcgatcggcgccggacaatgggaaggcgcgaaggcgttgggcatgtcgcgcgccaccgcgctccgccgggtcattttccctcaggcgctgcgcagaatgattcctcctttccttgagcgttctttcgaactgctcaaatccaccgcccttgcttcgtctctggcgtacagcgagctgctgtatcaggcgatgcaaatcaacagtcagacttaccggcccctggaagtgtattcgcttattgcggtgatgtacttcaccctgctgctgattatcagccagggcagccagctgcttgaacgacgccttgccgtctccgactcacgttaa

SEQ ID NO: 178888 - DNA, 666 bp, Klebsiella oxytoca
atgcattatcagtgggacttttcccttgtctggcaaaacttgccggtactgctgaagggactgggcgttacgctggagctatggctgctggcgggaattgtcggcacgctgatcgggcttgccgttggcgtcgtccgtgcccgcgggccgcgctatttttatccccttaccagcgcctttgtcgaggtgttccgcaatacgccggtgcttatccagctcatctggttctactatgcctttccggtgctggtgggcattcagttttccacttttggcgccgccgcactggcgttaaccctgtacaccgccgcctacagcaccgagatttttcgcgccgggctacagtccatcgaacgcgggcagtgggaaggggcaaaagccttaggcatgccgccgggcgtgatgctgcggcgtattatcctgccgcaggtatttcgccgtatgttgccagccctgacaaaccgcatgattgaactggcgaaggtgacctccctcgcctcgattctcacggttaacgaactgatgtatcagggcaggctgctaagcagtacctggtatcgcccggtggagattttcaccgtcgtcgccctgctctattttgtgctgatctggcccggaagttacctggcggcacgtctggagcgccgctaccgtccacatccttaa

SEQ ID NO: 178889 - DNA, 780 bp, Klebsiella oxytoca
atgtcagagaaaaaagtcgtcatgcggatacgcgccctgcacaaacgctttggtgcgcaaagcgtgttacagggcatcgatttagatatctatgccggtgagaaaatcgccatcattggcggcagcggctcgggtaagagcaccctgctgcgctgtctgaactttatggaaatacccagcgctggcaccgtagaactggacggcgttaccctcggtaaaatcgacagccgcggtcagcggcgctatagcgaaaaacagctgagcaatgttcgccagcgcgtggggatggtgtttcagcaatttaatctcttcccgcatctcacggtgctgcaaaatgtcagcgaagccctgatatcggtgaaaaagatgcgtcgcgaagaggcgatgcgcattgcccacgcgcagctggaaaaagtggggctcggccataagcaccaggcctggcccggcagcctgtccggcggtcaacagcagcgcgtcgctattgctcgcgccctggcaatggcgccagagataatattattcgatgagcccacctcgtccctcgaccctgaactcgtgggggaagtgctgcataccatccgtgaactggcagatgaggggcggacgctgctgctggtcactcatgagctgggctttgcctggcatttcgccgatcgggtgatttttatcgaaaacggcgtgattcatgaaatgggcaccccggaagaggtgctgcgccatccgcgccaaccgcgcacccaggccttcctttcccgtttcgctgaacgggcattttaa

SEQ ID NO: 178890 - DNA, 966 bp, Klebsiella oxytoca
atgagtttagctctctccgctcaaagcagtcaggcgtacctgcaggatacgcgcaacgacaatgtgcaggtgtacgtcaacggtgaattcgttcaccgcgatcgcgccacggtttccgttttcgattccggctacgtctgcggcgacggggtctgggaggggctgcggctggtgaacggcaagctgatcgcccttcaggcgcatctcgatcgcctgtttgccggggcggccgctatccagctcaatatcggccatagtcgtgaggagctaaccgatattatgtacagcacgctgaagataaacggtatgacggacggcgcccatctgcggctcatgattacccgcggcaaaaagcgcacgccaaatcaggacccgcgctttatcctcggcggcgccactatcgtctgcgtggcggaatataaggttgtggatgaacaggccaaacggcgcggccttgccctgttcacctcgacctatcgtaccagcgcgccggatgttttcgatttgcgtcttaattcccacagccgcctgaatttgatccaggcgctattgcaggcgctggacgccggcgcagatgaagcgctgatgctggaccctcatgggtttgtcgccagctgcaattccaccaacttttttatcgtacgccagggcgagctgtggacctcaaacggcctgtactgctttaacggtattacccgccacactattttgtcactggcgcgccagcagggcctcggcgtgcaggaaagatcctttacccttgccgaagccttcactgcggacgaagcttttgtcaccggaacgctggcaggtattaccccggtaaacaggctcgacggcaggcgcttcgacctcaacgaaaatccggtgacccgacgtatcagcggctggtatcaggactatttacagcaggcggagtcgccgcccgccgaccatcgccggacgaaaaaaaacccgcagagatag

SEQ ID NO: 178891 - DNA, 579 bp, Klebsiella oxytoca
atgaagccaaaacaagcggaaattatccgccagtcaatgtctctgtttaacaaagaggggtatcagtcgccgagtattgaccggatatcggagaatgcgggcatctccaaaatgaccttctaccgctactatgcggataaagaggcgctcattcttgatattttacagcagaaagagagtgagtttatgcaggcgctgcaggagattaccgccgataaaccttcgggccgcgagaagctgtttgccgtcttcgaatattacaataactggttcacctgtgaggatttccacggctgcatgttcacccgcgccctgtttgaatatggaacctcgtcttccgctatccgggcgacatgctcacggtttaaatcgcgcctctaccagtttttccgcgacattcttaccctgctgttaaaaccggaacctgcggaacgggtggcgatgatgatgctcatgctgattgacggcgccattgccgctcagcaggcggagtcctcggaatgccgggagatccctcccggaataacggcctggagcgcggcaaaagcgcttatttattcagagggcggcaccctctga

SEQ ID NO: 178892 - DNA, 1092 bp, Klebsiella oxytoca
atgcgtaagacagaaaatggtttcaccgggaacgaacaacattccgcaatggccaggctctctctggatgacatgattgaccagcttcttcacagcaacgcgctttcactgaaactgacggccaatccgctactggcggacagagcctggtacctgaccgaaaatacctgtactaaggcttttaccgccaacgatccgcaagcgaaaaaacgtgcccacagcgcgctgtttaaactctaccaggcgtggctggcggagccgctatcggcggcggcaaaaaaccagtttcatccattactctgcgggatcagaagctacatcgaatcagaatggctccgggtggaaaaaaaacgtttcagtttcccgatacccgcgcttgacgccgggaatatcgttgaggaactccgtcatttatgtcagaaacatccggcttcgcaccatcccctctttgatttcctctcctcttccgcctctgctacgcaaatagactatttcttcaaaagcgatagcgcgctcaatttgctgtttttcgatctggtcgcgatggggctggtcggctctctgccagaaacgcgtgcagaaattgcccagaacctttgggatgaaataggccagggcagccaggagtttacgcacgttaatttgtataaggatttgctgaagcgcagagatattgcgctacctgaaaaccatttcgcccatctgtatgactggcaggggctcgccgggtataacgcgttcatgctgggcggcgttaaccgtcagcattactacaaatcgctcggcgtgatggcgatgacggaactgctggacccgccgcagtaccagaagctcgtgaccgggtgccgtcgcattggccttacggatcgcgacgtgcattattacgcggaacatatcgaggttgatatcggtcacgccgatgggtggctgaataacgttatcgttccgatcggcaataaaaacccggctgcgctggaggaggtctacgttggcgcagcgctgcgtcttcagacctgctgcgattactacgattgtctgctggaggcgttacgtaccgttgttgaacgcgagtcagagggtgccgccctctga

SEQ ID NO: 178893 - DNA, 1140 bp, Klebsiella oxytoca
atgctcaggatatacttataccttattctcgccgcatcggtttccgcgctggcgacagatatgatcgtgcccgcgctgcccctattacaaaaagcgtttaataccgattattcggctattcagttaaccattagtggttttctggtgatatacgcggcgagccagttattatcaggatttcttggcgaaaagttgggtaaattacgcgtactgacggccagctttttgcttttcctcgcgggcagcctcctctgttttatgtccgatagtttaatgatgctgttggccggcagggcattacaggccctgggcgccggcgccgggccggtcctgtctaaagctatcgctaaagagacgttctccccgctaacgctcaagcgcgcgctttccgatatttcttccgccagcgcggtggttcctcttattgcgccgctggccggcgccgcactcctcggctatctgagctggaattggatattcctggttatggccctgtttagcgtcgtcacccttgtgctctctccgcgtcgccttgagcagcatgatgcggtcgcggcgccctcctcttccgggtttatcaccccggcatttattcagggaacgctgctggtttcgctgattctgagttcgctgttttgctatatctcgctgtcgccggccatttttatgcagcagctggggctaagcaccatgcactactcgttgctcttttctgcttccgtattattttttattattggcaatcagatcgccaaattcgagcgaataattaacccgtggattttatttatcctgaatgcgctggcggttaccccatttattatcggcagccactcactactattatgtatcgccggatcgatggtttttaacctcacccttggcgcctattacccgagcgcgaattttatcgcgctgcaaatcaaaggcagcaaaacaggtattgcggcgtccgtcaccggatttattcaaacggtgagcgccggcgccatcagctatttcgccgtaaaactaacggataccggtatggggtttgacagaaccctcggtgcaagcacgttaacgctggcaattctgtctcttctggtagtcacgacaatgaaggtaacgcaatggaaaactggcaaaaaaggaaaatag

SEQ ID NO: 178894 - DNA, 1230 bp, Klebsiella oxytoca
atggaaaactggcaaaaaaggaaaatagacaggtcgctaaaatatcagacccgggtattctctgaacatattaatgaactggtcgcggtaaaaagggacggtaaggtcatcaccctcgaagatggcagaaaaatggtggaatttgtctcatgctcttatcttgggctagagactcacccggcgctgaaaaaagcggttgtcgacgccattgagcgttttggcgtgcaggtttctgtcgccagaacgcgggtaaaagtcgatctgttcccgcagttggaagcacgactgaacgacatcatgcatggggctcatactctgacgtttaacgccgtgaccccttgccatatcgcggtgctgccgctgctggcatccgggacgctgccgcattttacgttcagcaaaaaaccctactttattatggagaagaccgcgcacgcgacgttgcagatcaaccgcgggcttttacagcagtttggggaagtcgtcagaattgattttcaggataaggcgcggattgaagaggcttttcgctatgcggccagccagggtttaacgccgatctcggtatccgacagcgtaggctcaatgggcggcgtcgcccccgtcgcgcatattgtccgcctggcgcatcagtatgacggctacgcgtatatagacgatgcgcacggcacctctatctacggagagtacggttccggatacgttatgtcatgcctcggccatcggcttgacgagcgtattattatcgccggctcgctgtctaaagcctttggctcacacggcggatttatcgcctgtcgcgacgctgagactatcaattttattaagacctacggcacaacctacgcctttggtgggccgccttcattgcctggaattgccgcctgcgtagccgccgccgatctccacctggacggcaccgtcgctgcccgccaggagaagcttcagaacgtcattcgctattttgatgaagttttcggcaagatcgacatcgttaaccggggtacgacgatgccgattcgggggatcctgattggtaacgaagatctcgccatcacgatgtgcaaaaaactgcacgatcgcggcttcgcgacgaccgtggcgatgtatccaaccgttgaagaagggcacgccattctgcgctgcgcattgtcggcgctccacgagagcgggcaaatcgacgacttccataaaaacttcaaagaatcattggctgaagccacgaaataa

SEQ ID NO: 178895 - DNA, 3081 bp, Klebsiella oxytoca
atgagccagggccgctttaacctgtcagcgcttgcggtgcgcgagcgctcggtcacgctgtttttaattattctggtgaccatcgccggtatttacgccttttttggcctcgggcgagcggaggatcccccctttacggttaagcaaatgacggttatcaccgtctggcccggcgcgaccgcgcaggagatgcaggatcaggtggctgagccgctggaaaaacgcctgcaggagctcaaatggtatgaccgcacggaaacctatacccggcccggcatggcctttatcacgctctcactccaggacaatacgccgccatcacaggtgcaggaagagttctaccaggcgcggaagaagcttggcgatgaaagcagaaacctccccgccggcgtgacggggccgatgataaatgatgaatttgccgacgtcactttcgccctgtttgcgctgaaagcgaaaggagaaccgcagcgcctgctggtccgcgatgccgaaacgttacgccagcagctcctgcacgtcccgggggtcaagaaagtcaatattatcggcgaacaggccgaacggatttatatctccttctcccatgagcgtctggctaccatggggctctcgccgcaggatattttcaatgcgctgaataaccagaacgcattaaccgcggcaggttcaattgaaacgcgcggcgcgcagatctttatccgcctcgatggcgctttcgatgaattgcagaagatccgcgatacgccatttattgctcagggtaaaacgctcaagctgtccgacgtggcaacggtagaacgcggttatgaagatccgcccactttgcagattcgtaatcaacatgaaccggcgctgctgctggggatcgtgatgcgtgaaggctggaatgggctggcgttgggtaaagcgctggatgccgaaacggcaaaaatcaatgccagtatgccgctggggatgaccctgacgaaagtcaccgatcagtccgtgaatatcagcgccgcagtcgatgagtttatgatcaaattcttcgtcgccctgctcgtggtgatggtggtctgttttgtcagcatggggtggcgcgtgggggtcgtggtcgcggcggcggttcccctgacgctggcggttgtttttgtggtgatggaggccgccggtatcaactttgaccgcgtgacgctgggctccctgattcttgcgctgggcttactggttgacgacgcgataatcgccatcgaaatgatggtggtgaaaatggaggagggctacgacagaatcaaagcctccgcctacgcctggagccataccgccgcgcccatgctggccggtaccctggtcacggctatcggctttatgccgaatggtttcgcccagtccaccgccggggaatacaccagcaatatgttctggattgtcggcctcgccctgattgcctcatggctggtcgccgttgttttcaccccttatctgggggtgaaaatgctgccggatatcgcaaaggtagaaggggggcataccgccatctatgacacgccgcgctataaccgctttcgccgcctgctgacccgcgttatcgccaggaaatggctggtggccggttccgtcattgcgcttttcgcgctggcggtcatggggatggggctggtgaaaaaacagtttttccccacctctgaccgcccggaagtgctcgttgaagtgcagatgccctatggcacctcgattgagcagaccagcgcggcaacggccaaaatagaggactggttggaaaaacagccagaagccaggatagttaccgcctacattggccagggttcaccgcgtttttacctggcgatggcccccgaactccccgacccgtcgtttgccaaaatagtgatattgacggacagccaggcatcacgcgatgcgctcaaattgcggctgcggcaagccgtggccagcggactggcgcctgaagcacgcgttcgcgtgacgcagctggtgtttggcccgtattcccctttcccggtcgcctggcgagtgatggggccggataccgatacgctgcgcgacatcgcggaccgggttaagggcgtgctgcaggcaagcccgatgatgaggaccgtcaacaccgactggggatcgcgcgtgccgacactgcatttcaccctcgatcaggaccgtctacaggcaaccggcttaacgtccaatgccgttgctcagcagctccagttcctgctatcgggcattcccatcaccgccgtgcgggaagatattcgctcggtgcaggtgacggggcgcgccgcgggggatatacgtctggatccggccaaaattgaggggtttagcctggtcggcaatgcgggccagcgcatcccgctcgcgcaaatcgggaaggtggaggtcagaatggaagatcctttactgcgtcgccgcgacagaacacccacgattaccgtgcggggggatattgccgacaatcttcagccgccggacgtttccgcctccatcatgaaacagctgcagccgattgtggactcgcttccgccagggtaccgcatcgaaatggcggggtcgattgaggaatcggctaaagccacccgggcgatggcgccgctgttccccatcatgatcgccctgacgctgctgatcatcattgtgcaggtgcgctcaatgtcggccatggttatggtatttcttaccgctccgctcgggcttgtcggcgtggttcccgcgctgctgcttttcaatcagccatttggtatcaacgccctcgtcgggctgattgcgctttcgggcattctgatgcgtaatacgctgattcttatcgggcagattcaccataatgagaaagaaggtctcgatccgtaccatgcggtcatcgaagcgacggtgcagagagccaggcccgtcttactgacggccatggccgccgttctggcgttcattcctctgacccattcggtgttctgggggacgctcgcctataccctgattggcgggacgttggggggaaccgtcatgacgctggtgttcttgcccgccatgtatgcgatctggttcaggatccgtcctgaagcccggcgccatgctgaacaacattaa

SEQ ID NO: 178896 - DNA, 1110 bp, Klebsiella oxytoca
atgctcaggcttcattcagcccgctttgccgcttgtcttctgccgttggccctcgtggcctgcggtgataacgcctcgagtgacgatccgcgcacccagccgccgctcgtcagatccgcatccgtagaactcgcgcacgatacctctcgcacctataccggcgtggtggtggcaagaacgcaaagcgatcttggttttagagtgcagggtaagatccttgaacgctttgttgatactggccagaccgttaagcgcggtcagccgctgatgcggctggatcccgccgacctgaagctgcaggccgtggctcagcaacaggccgttgacgccgccagggcgcgggcgcgaaaagccatcagcgatgaggcgcgctaccgtggcctcgttggcgctggcgcagtctccgcctcggagtatgaccagatcaaagcggcggcagattccgcgaaagcggatctcagcgcagcccaggcgcaggcaaacgtggcgcaaaatgccacgggctatgccgtgctgctggccgactctgacggcgtggtgatggagacgcttgccgaacccggtcaggttgtcagtgccgggcaggcggtgatccggctggccagagcggggcagcgtgaggcgctggtacagctgccggagacgctgcgccccgccatcggcagcgaagcgctggcgacgcgctatggcgacgaaacgcagcctgtcgccgcaaaactgcgcctgctttccgatgccgccgatgccaccacccgtacctttgaggcgcggtacgtgctggaaggcccgttagccaacgcgccgctgggggcgaccgtaacgctgcacatcaaaaaacagagtggggaaagccaggtcatgcaggtgccgctggccgcgctttatgatgcgggcaaaggaccgggcgtctggcggatctccgcgcagccagccagggtcgcatggcagcccgtcaaggtgctgagcgtgggcgaggaggcggcgcaggtaacgggcgaggtgaagcccggtgagaagatcgttgcgctaggggcgcatcttctgcacgagggcgaggctgtccgcctggctgggcaaccggatacggcccggacgggggacaaaccatga

SEQ ID NO: 178897 - DNA, 615 bp, Klebsiella oxytoca
atgactaagaatatgaacgtcccaccatcacgcggcccgctcgatcacagcgtccgggagcaaatcgtcgacgctgcctttgagcatttcgggcattacggctatgaaaaaaccaccgtggcggagctggctaaatctatcggtttttcaaaatcttatatctataagtttttcgaatccaaacaggctatcggcgaagtgatctgcgctaaccgcctggaaatgatcatggccgcggtactctcagcggtggctgacgcgccgtcagccagcgaaaaattacgccgcctcttccgggcgctcaccgaagcggggagcgaactcttttttcacgatcgtaaactttacgatattgccgccgtcgcctcgcgggagaagtggccttcaacagaaaggtatgcggaacggctgttaaagctgattgagagcattcttgtcgaaggcaggcaggccggggagttcgaaaggaaaaccccccttgatgaagccacttatgcgatatatatggtgatgtgccccttcatcaatcctgttcaactgcagtttaatctcgaaacggccccaacggcggcggttcttctctcgtcgctgattttaagaagcctggccccctga

SEQ ID NO: 178898 - DNA, 1008 bp, Klebsiella oxytoca
atgaaagccttcacgtttaaacgctacggtaaatccccggcgctgggatttgatgacgtcgattatcccacccccgcggctgatgaacttctggttaaagtttacgccgttggcctgaatcccattgataacgtgattcctggcggcctgttcaaaccgattttgtcttttaaacttcccgcaacgctgggcagcgacttgtccggggtggttgtggcaacgggaagccgcgtgacgcgttttaagccaggcgatgaaatcttcgccagtattttcgacaggggaaccggttctcttgccgaatttgtgcgagtacctgaaaatctcgccgccatgaaacccgcaaacctggatttcgaacaggcagcgtcgctcccgatggtgagtctcaccgcctggcaggcgctgacagagagggccggacttcagccagggcagaaggtgttcatcccggcggggtccgggggaataggcagtttcgcgatccaactggcaaagcatcttggcgcaaaggtgggaacgaccacaagttcaggcaaccttgcgtgggtgagtcgtcttggcgcagatgaggtggttgactacaaaaagcaggcgtttgaaaacgtgctgagcggctacgatattgtactcggcactctccggggagattcgattgaaaaagccgttaaaatactcaagcctggtggcaagattgtttccctcaccggaccattggatgccgcgttcgcccgtgaccgggggttaaatttctttttgcgttttatctttgcgctgatgagccgaaagatcctgcgtcttacacgagtgcggggtcttagctattcgtttttatttgtccgccccgatggcgagcagctcgcgcaaattagccaactcatcgaatccgggcagattgggcctgcgatcgacaaggtgtttccctttgccgaaacaaaggaggcgctggactatcttgcccggggccatgctaagggaaaggtggtcgttagggtgtctgggtcataa

SEQ ID NO: 178899 - DNA, 825 bp, Klebsiella oxytoca
atgaacaataaacgtgtggctctggtgacaggcgcttcttcaggcatcggcgaagcgacggctcatcaacttttagcggcgggttataaggtttatggcaccagccggcgtggctctcaggcgggtacacaccgctttccgctgctgacgcttgatgtgactgacgatgcttcggtcgaggccgctattgacgatctgctgcgcctggaggggcggatcgatcttctggtcaataatgcgggctttggggtcgcgcctgccgccgcggaagaaagctctattgaacaggcctggagcattttcgataccaactttttgggcatcgtcaggctgacgcgggctgtgctccctcatatgcgccatcagggcagcgggcgcatcatcaatatcggttcgattctcggggtcgtgccgttgccgtatgtcgcgctttatgcggccagcaagcatgcggtcgaagggtacacgggagcactcgaccatgaactgcgcacccagggcatcagggtttccgtgatcgaacctgcctacataaaaacgcagtttgaagccaataacagagaagcggatgcaaagctggaagagtatgaccttatccgggctaagctgacgaaagtggtcagtaaggcaatggccgaagcggaaagtccggaggttgtggctaaggtggtggttaaagcggcccaggctctacggcccaagatccgctacacggcaggatcgctggccggtaaattgaatttcattctccgattcgcgcctgcaaaaatcctggataaggtcgtgcgcaacagccttcagcttgatgcgagagagtcatcatga

SEQ ID NO: 178900 - DNA, 561 bp, Klebsiella oxytoca
atgaaagtgtcaaaagagcaggttcgcgaaaacaggatgcgaatcgttgaaacggcttcagaactttttcgtgagcgcggttacgacggcgtaggcgtagcggagctgatgtcagcggctggcttaacccacggagggttttacaaacactttggttccaaggccgatttattatcggaggcgatgcattgcggctttacgcgttcggcagaacgtacggccgatgtgagccggaaaacgtttgtggagtattacctctcccgccaacatcgtgatgacatggcaaaggggtgtgtgatgtcggctctgggtagtgacgccgcgcgtcaatctgaagccattaaggcaacctttgcggctggcattgaagctcagctggccatcttagcaaatgagaaagccgcggaaggccttacgcgtgccgacctgatcgatacgattgcgcatcttgtcggcgcgctggtcctttcccgcgcctgtcctgatagctcctctctggcagatgaaattctggatgtttgtcgatcgcgcattctcaatcaggatacgcccgcaaaatag

SEQ ID NO: 178901 - DNA, 840 bp, Klebsiella oxytoca
atgcacaagacttttacccttaatcataccgacaatatcgaattgaatttgtaccagtacggcgaggagaattgtcataagggacaccgctttggccccgcagtccgccagcattacctatttcattatgtgataagtggaaccggcacattttacagtgagtttggcgcttttcctgtcggcgccggggaggggtttctgatccatccccatgaggtgacaacctactgcgctgataatagggatccgtggcattatatgtggcttgaggtcgatgggctgattgccgccagaattttcgaggagtgtcatcttagccggcaatctccggtttatcgacccaacctgaataaagacgactccagcgcctctggctacctgcggcaaattgtcgaacatggcgatgagcatccgctgaaggtgcagggattgtgctatctcttcttttcttcgctaatcagcaatacgcccggcgaaaaggcttccctccctgatgacaaaacccggcatctgcaaagggcgatcaaaaaaattgaaaatcgctaccacgaacatctgacggttgatagcctggccgcctattgcaatatcaatcgcagctacctctgccgattgttcaaaggcgcctacggtatcggccccagggaatacttgcttaattttcgtatgaatatcgcagtgagcctgctgaaaaacagcgctacggcgattaaagtcgtgggcatttccgttggctatgaaaatcagctgcatttttctaaagccttcaggaagctgtacggcgtatctccggctaaatggcggcaaaaatacctttctgaacagcaggcgctgagatga

SEQ ID NO: 178902 - DNA, 1308 bp, Klebsiella oxytoca
atgattaaagtgacatttatgggcgcaggcagcaccattttcgccaggaacgtactcggcgacattatgacgacgccggcgttgaaagaggtggagattgcgctgtacgacatcgacagcgcccgtctcaatgaatccctcgccatgttgaataatataaaccgcaataccaatgcgggcagagcgaagatcgccgcctaccttggcgttgagaaccgccgcgcggcgttgaaaaacgccaattacgtggtgaatgctattcaggttggcggctacgatccgtgtaccatcaccgatttcacgatcgcgaaaaaatatggtcttcagcaaactattgccgataccctgggcattggcggtatcttccgcgcgctgcgcaccctacccgtgctgtttgatttcgcacgggatattgaagccgtgtgcccggacgcctggctgctgaactacaccaatccgatggccacgataaccggcgccatgctgcgccatacggaagtgaaaacggtaggactgtgccacagcgttcaggtgtgtgctgaaacgctgttgaaaagcgtggatatgccaaccgacgacgtgcaatttcatatcgcgggtattaatcacatggcctggctgctggacattcgccgtcacggcgaggatttgtacccggaaatcaagcgccgggccagcgccctgcagggcaagcatgatgatatggtgcgccatgaaatcatgaaaactttcggctattacgtcaccgaatcgtcagagcacaacgccgaatacatgccttactggatcaaacgcagctacccggagctgattgaacgcttcaatatcccgctggatgaatatccgcgccggtgtattgaacagattgaccaatggcagcagcagaaactggcgctgacccatgacaccagcctgacccacagccgtacccatgaatacgcgtcttacatcatcgaagcgatggaaaccgatcggccttacaaaattggcggtaacgtgctcaacaccggtttgattaccaacttaccttccgaggcctgcgtcgaagtcccttgcctggtcgatggccagggcgtcacgccgtgctacgtcggcaatttgccggagcagctggcagcgctgaaccggaccaacataaatactcagctgttgaccatcgaagcggcggtgacgcgcaaacgcgaagccatctaccatgccgccctgctcgacccgcatacttccgcagagctgtcgatcgatgacatccgcaaactgtgcgacgaacttattgaagcacacggcagctggcttcccgcctaccattaa

SEQ ID NO: 178903 - DNA, 363 bp, Klebsiella oxytoca
atgtttatttccgaaacagtgatagccgtcatcattgactggatcgacaataacttacataaaccactgcgtatagaacagatagcccgttattcagggtattccaaatggtacctgcagcgtttgttcttgcaatatagaggcgagagcctcgggcgctatatccgtaataaaaaactggactcagcggcccgcgatttacgcgagaccgatgagaatatttacagtattggtttgcgctacggctatggctcgcagcaaacattcacccgattatttacgcgtcattttcatttgccgcccggtgaatatcgcaagaaaaacaaaacagcctgttacgtaccgggtaaggctgaatcttaa

SEQ ID NO: 178904 - DNA, 591 bp, Klebsiella oxytoca
atggcgaaaatccagcgagataaggtgattgaggcagcattagcattattagatgaggtcggcctggaagcgattacgacccgtaagctggcacaaaaactgggggtggaatcagcgacgttgtactggcatttcaagaacaaggccagtttacttgaagaaatggcttccgcggttttagccaaacaccattccctgcctgtccccgaagatattgctgaatgggcaaactggctggcggaaaacgcccgtagtttccggcgcgctctgctcgcccatcgggacggcgccctgttacatgccgggacatcaccggcccgggtgggaggggatacgtttcgtcccaaggtggcgtatcttgcgcgcgtcggtttcactgaggccgacgccgcaatgatattactcactctgagtgaatacaccctgggatgcgtattagaggagcagtcccgctcgggcggtgatggtaagcaaattttatcaaagacatcgccaggaagtccctctatcgaatcgctggtttatccccatccggatactgcgttcgaattcggtctgtcgttgataatgaaagggttattagtgccctga

SEQ ID NO: 178905 - DNA, 1437 bp, Klebsiella oxytoca
atgaatatcaatcaagacaagcgggtcaaggaaacgacccatccacgaccgataaacgccatacctccgatgctgtggatgcaggcggccatcatccccctgggggcgtttgcaacgatgctctcatcaacgatgctgagcgcggcgctgcccgcgatggccgccggccttggcgtgacggacacggcaatacaatggatagcaacggcgtatcttatggcccttgcggcaggcgttccgcttagcgcatgggcggccaggcggtttggcgctacgcagctttggctctatggccttattttatttgcgattttttcggcagtttgcgccctttcctcgcgttttgaggtgctgcttgccgcaagagttatgcaaggcctggcagggggattactcgtaccggcagggcaaacgatccttggtctggtcgtcggacgcgaacgtctggggcgggtgattggcacgattggcgtggcgatcgtcattgcacccttgctgggaacgtcgctgggcgcggtcctgcttgaaatctgcggatggcgagggttattttggatcacggtgccgttctgtctgtgcgcctatcttgccggaaggaagctgcttccccgtccgacaataaaaactgacaggcccctctctctggactggctgggactggcgctggtcttctgcagcctgccgatgctgatggaaggcatgaaagagctcagcctgaatagtggtaaatatggctggaacgtcaccatgctcagcgtgggcgccctgttcacctgcttgtttatttatcgctctttgcgcattgagtcccccttactgcatctcgagcttttcaagcatcggggtttcactttatctgccgtattgatggctatcggcggcgcgatgaattttggcggtcagttcctgcttcctttatatttccgcgacgtttgccatgtaacgcttgctgaagtgggcctgcttctcacccctcagttaatcggctcggcgataggatttccggtagccggctacttctctgacaagctggggccacgaacggtgcttatcattggcggtttgctcgcggcatttgccacattgccactggcaatgattgatgcgggaagtcgctatacgcttgtggggggcgcaatagcggtcagagggttcggtttagccctggcaacggtgcccgcgatggctgcgggcctggctatggctggcagccgtcacgtcgctgatgccgcacctgttctgaatatcttccagcgcgttggggcgatggcgggcgcggcgctggtgactgcctgctacgtcagatttgcccatacccgggggagcttagccgcgtttcaccacgccgggtggctacttaccggcggggccgtactgctcgcgctttgcgcattatttatggtgaaccattccactttaacaacgccggaagaataa

SEQ ID NO: 178906 - DNA, 786 bp, Klebsiella oxytoca
atggattttcagatacaacaacgtgtggcgctggtctgcggtgccggcagtggtctgggacaggctattgccctgtcgctggcgcaggaaggggtgaaggtggcggtcaccggccgcagcgcggaaaaactggcgcaaacggtggaacgtatcaccttattgggcggtactgcccgcgcctggcggttggatctcgccgccccggagcagtttgatctagtgattgccgatatccgcgagcggtggggcgatatcgatattctggttaacaactccggtggtccgccgcccgcaccggcgcaggggacggatggcgcagtctggcaacagcagttttcagtcatggtcgcctcgttgattcagctcaccgataaactcctgcccggcatgcgcagccgcggctggggacgcattattaccaccacttcatccggcgtgataacccccattcccggactcgccctgtcgaacgcgctgcgcatgagcctgctcggctggtcgaaaaccctcgccagcgaagtggcaggcgacggcgtgacggtgaatgtgatggtgccggggcgcatcgcgaccgaccgcgtcagtcagctggatgctctcaaggcgcaacgggaaaacagcagtgcggaagcggtcgccgaaaagagtcgtcagagcattccggccgggcgctatggcgaaccgcaggagtacggcgccgtcgctgcgtttctggcaagccagcctgccagctacattaccggcgcggtgattcgggttgatgggggattgatcggcgcgatttag

SEQ ID NO: 178907 - DNA, 897 bp, Klebsiella oxytoca
atgcagcctgactccactgcgagcagtcgccggattgcccggcaaatactcgacctgatatccgaagcaaaattcgatccaggtcatcatttacgggagcaacatcttgccgatgcgctgggcgtgtcgcgtacgccggtgcgcgccgggctaaaagagttgacccgaatgggggcggttgaagcgcgtccgaatcagggctttttcctgcttaaacgcagcaatgagctggagctgctggagattgagcagtccaagagcaatgaccagaagctgtacgagcagctggtacacgatcgtattgcgggtgcgctgccggaatcgtttacccagaccgaaatcagccagcgctatgatgtcgatcgcggcgtgctgacccgtacgctggtcaagctatcggaggacggcctgattgcccgtaacgcggggcacggctggcgcttcctgcaaaccctcaactccgatgtcgccctgcgcaacagctacggttttcgcctgatgattgaaccgacggcgctgctgacgcccggcctgcatgtggacagacagatgcttaaacgcctgcgcgcccggcatctgcggctcatcacccacccggacattacgcaggtgccggcaaaagagattttcgaaaccgacgctgagtttcacgagctgctggcagaagccagcggcaacctgttcgtgttacaggccattcagcaacaaaaccggctgcgccgtctgctggagtttggcagctatcacaataagcgccgcgtaaaagcgtggtgtgaagagcatgttgccatcatagatgctctgcgagagaacaagccggaactggcggcagagttgatgagaacgcatctgcaatacgcctttgaccaggtcaatgttaaaaacgcccgcgcataa

SEQ ID NO: 178908 - DNA, 813 bp, Klebsiella oxytoca
atgtccagcaattctttactgtttcgccgcgtgcgtaccttgatgttcgcactgaccgcacttccgctggtaagccatgctgcggtggaaaccatcgccccgggcaagctgacctacggcacggcggcgacgtttatgccttttgagttcgtgaaagagggcaagctcaccggcttcgatatcgacctgattaacgcgctaagcaaagagatccagctgacgcctgcgccgatgccgatggagttcaaagggcttatcccagcgctgcaggggaaacgtctcgatatcatcaactccgccatgtacgtcaacccgacccgtgccgcgcaggtagacttcgtgccatatctgaaaatcggcagccgcgtggtggtgagcaaaggtaacccggcaaaaatcaccggacgcgacctgagcctctgcggcaaaaacatcgccgtgacgctcggcgggatcgaagagagccaggcccgggcagataaccagcgctgcctggacgccaaaaaaccggccattaacgtcatgacgttccccgccgccaccgactccgccgtcgccgtcgcccagggccgcgccgatgccgagttcctctccacgccggggaccgtcgccctgttaaccgaaaaagcgggcatgtttgccgcggttggcgacgaattcgaagcggatacccatatcgcgtttgccgtgcgtaaaggcgacaccgaaacccgggccctgctggagaaaggtctccagggtctcgtcaaaaatggcacctataagcaattgattgagaaatggaacttccctgactccgttgcccttttctaa

SEQ ID NO: 178909 - DNA, 726 bp, Klebsiella oxytoca
atgtcgatcgaactaatgtggcagtacttcctctcacccgagtttgttcagggtgcgtggatgacgctactgattaccctctgctcactgttgtgtggcgtggtgctgggcctggtgttggcgctgttgcaggaagcgccgtttcgcgccgggagagggctggcctttttctacctgtggctgtttcgcgggacgccggtgctgttccagataatctttgtctacaacgtgctgccaggcttcggcttacgcttctccgcgtttacctgtgcagtgctggcgctttcgcttaatgaaggcgcctacatggcggaaattctgcgctctggcctgcaggccgtaaaaagcggccagcgcaccgccggcatggcgctcgggatgacccacgggcagatcatgcgaaaaatcgtgctgcctcaggccgcacgcatcgttctgccgccgatgggtaaccagatgatcagcatgctgaaatcgagcgcgctggtgtcggttatcgccgttcaggagctgctgctggtcgccaaccagaccgccagcgccagcttccgctacttcgaagcgctttgcgccgccggtctctattacctgctgctcaccagcctgttcatgatcttccagtcgtggcttgaaagcgtactggatcccaaacagcggcgcagcaagagccagaagcgactgacccgcctgtttaaattaccgaaaatcgcccgggaggaaccatga

SEQ ID NO: 178910 - DNA, 741 bp, Klebsiella oxytoca
atgagcgagaaaccgctgctggagatgatcggcattgataagacttttggtcgccagaccgtgctcaagaactgctcacttgaggtgcagcgcggggaaaccgtggtgctgattgggccatcgggctcgggaaaatccaccctgctacgctgcgtcaacatgctctcacctgccgacagcggcgacgtctttttcgccagccagcacatcagccggggcgaagtgccggtgcacaaactgcgtcagcgtattggcatggtgttccagaactacgagctgttctcgcacctgacggcggcggaaaacatcatgctggccccaatgacggtgctggggatgaaccgcattgatgcccgcacgctggcggacaacctgctggcgaaggtgcgcatcaacgaacgcgcggaccactttccggacgagctctccggcggccagcagcagcgcgtggcgattgcccgtgccctggcgatgaagcccgagctgatgctctacgacgaacccacctcagctctcgacccggagatgatccgcgaagtgctggaagtgatggcagagctcagcgcggaagggatgaccagcatggtggtgacccacgagatgggcttcgcccggcgggccgccaacaacattctttttatggaagacggcgaaattatcgatcgcgccagcaccggtgatttcttcgccggccacgtcagcgagcgcgcgcagcgcttcctgacgcaaatattacattaa

SEQ ID NO: 178911 - DNA, 1176 bp, Klebsiella oxytoca
atgtccagttaccaggttgacagcgcacgaatgaaaaaggatttagcgacgctggttgccatcaatacggaaaatccaccgggccatgagcgtgaagccgccgaatgtctggaaggctggctgctgaccgccgggttcgatctctcctttagcgaatacgcgccggggcggaccaacgttatcgccgtcctgcacaatggaccgggaccgtgcttcgccttcaacacccatatcgacaccgttccggcgagcagcggctgggcgagcgatcccttcaccctcagcgaacgcgatggccgcctgtacgggcgcggcgcctgcgatgccaaaggcccgctggtggcgatggttgaagccctgcgtctgctggccgccaaccgtcagcgctggtccggcaccttgatgggcgtgttcaccgccgatgaagagatcgccagcgaaggggcgaaattctacgtacgcgacactccgccagcgattgatttcgcggtgattggcgagccgacatcgaatgcgaccttctcggctcacaaaggcagcttgcgtcctcgcgtgcgggtaaaaggcgtcaccgcgcactccggcacgccggagctgggggttaacgccatttaccagtccgcgcgccttttagggctgatcgaagaggcccaccaccagcaggtgcgttgccgctgccacgatctggtcggcaatgccagcctgacggtgacccgcatccacggcggccatgcggacaacgtggtgccagacagctgtgagctgctgctcgatcgccgcatggtaccgggggaagacgaagaggttgttaaagctgaactgcaacagctgctcgaccacgcgtacgcgcaggcaaacgtggaagcggaaattatcgcctggcagcccaccaccggcggcgcgacgcaaaccgacagcagcgaagccattgtcgagcaaagccttgccgcctgccgccgtcacggacagagcgagcccggcccgtttggttttcagggcggctgcgacctggtgcatttccgttcgctgggcgcaaagggcgtggtgattggccccggctcgctggccgtggcccacaagcccgatgaattcgtccccgtcgatgaatttatcgccgcggcagatatctatctcgatattgcgctcgccatgctgccgccggcgtccgatttatga

SEQ ID NO: 178912 - DNA, 1101 bp, Klebsiella oxytoca
atgaaagcgcagctctttcggggagacctgcattacgccggcgtgacgctgcataccgccgcctccggcccggtgacggcgctcgacaccctctggttgcgcctggaagaccgtggcgtgacggggattggcgaagtgcgtctcaacattcgctacctgcacggctaccgcgaagagcaggtgctgaacaacctgcttcagcgcctcaacggttgggactggtgccaggagcccgcggcgcaacttgccgcgctgcacgaggaggaccgcacgctgctgccgccgtcgcgcatggcgctggatatggcgttgcacgatttaatggcgcgtcagaacggggtcagcgtcgccgcctggctgggggcgccagctggcctgcccgcctggcacaccaatcagacgctgttctggggcagcgaagcagagatgctggcgcaggcgcagcgctatgtcgatcgcggttttacccagctgaagttacgcacggggatagcggatttcgccaccgacctggcccgcctgcaaaagctgaggctgcggtttggtcagcagatttcgctggcgattgacgtgaacggccagtggtcgctggcgcaggcccacgcggcgttcccttatctgcgcgagctgaatctcagctatatcgaacagccgttaagcccggcaaacgatagccagcttgctgaactgtacggctacggcatcccgatcatgctcgatgaaagcctcaacagcgaggcggccatcacccggcttatcgccgccaaaggtgcgctgtgggggcatctcaagctggtgaaactgggggggcttgctccgacgcttgccgccgccgtccgtctgcgactcgccgacgtgccgttcatgattggccagatgaatgaaggccatgccgccaccgccgccgcgctccagctgtgccgcgtggtgcaaccggcattcgccgaactgtatggcgccgatggattaaccgacgatcccgtcagcgggctggaataccgcaatggcatggtcgccgttaacgactctcccggtctgggcgtgcagttcgatgccgcgcgggccaacttactccaggagtttaatgatgcaagatgttaa

SEQ ID NO: 178913 - DNA, 1170 bp, Klebsiella oxytoca
atgcaagatgttaacaatgtgattcagggcagcgagtccgcctttcgcgccgacgaatatgcgcagcgcattcagcgtacccgcgaacgcttaagccgcgcgggcgtggacgtgatgatcgtgaccggcccggaaaacattttctggcttaccggtcagcaaacgccgggctattacacctttcaggcgctgctgctgccggtagaaggggatccggtctttgtgattcgccagctcgaatactttaactttatcgccaacacctttatttcagacgccgccatctaccaggatggcgataacccggtggatttcctggtaggcatgctgcaacagcgcggctggctcaacaaacgcattgggctggacaaacgcggctggttcctgccgattgccgtctatgaagccctgcaggcgaagctcggcaccatcgccgataccgcgggcgtcatcgaaccgctgcgcgcggtgaaatcggcggcggaggtggaaaaaatcgccctcgcggcgcgctatgtggatgcgggcatgcgcgccgggatggcggcgattggcagcggcgcggacgaaaacgcgctggtctccgcgatgatgggggccgctattgccgccggttccgagtatgtcggcatggaaccgctggtttctaccggcccacgcagcggcgtgccgcacggcacctggcgacgtcgggtgatgcaggataacgatccggtctttctggagatgtccgccgcccacgatcgctaccacgccgcgatgatgcgctccgcctggctgggccgtccgcccgctatcgccatcgaaatggaaaaagtttgtcaggaagccctgcaggccgccctcgacgccattcgtccgggcgccacctgcgaagcgccgcacctggcctgccagaaggtgatcgaccgcgcgggattcaccgaaaacttcaaaaaacgcacaggttactccatcggtatcgccttcgcgccggactggggcgaaggcggcattctcagcctgtacagcggcgtcaccaccgagctgcagcctggcatgaccttccacatcccgccggccctgcgtatctacggtcaattcaccgtcggcgtcagcgaaaccgtggtggtgactgaaaccggatatcgccagctgggttccctggctcgcccattaacgctgctgtaa

SEQ ID NO: 178914 - DNA, 924 bp, Klebsiella oxytoca
atgaaagatatcaacgagtgccgtgaacgtctgcgcggcattttcaacatcaccgtcaccccgttcaccgccagcggcgcgatcgacttcccggcgctgcgtgaaaatatcgaacgcgtgattgatctgggctatgacggcctgctgattggcggcacctacggtgagtttccggtaatgaccgtcgaagaacgccgcgagctgtttcatgaggtgatgggctgcgtggacgaccgcgtggcggtgatgctgtgcagcgccagttccgacccgcgcgacgcccgcgagctgaccctgctggcaagcgaactgggcgggctgccgatggtcaccgccccctttgttagcgaaatcactgacgaacagatcgtcagctacttcaatgagatggcgccgttatccaaaaccggcattctggtgtacaacgcgccgggcatcggcatcaccctctccccggcgctgctggaacggctggcagagatcccgaacgtggtcggcatcaaacagggcgatctcaacccaaccgccatcgatcagattgccaaccgcctgcgcgggcgtctgcgtttgttctgcgcctccgatctggctttcctcgggccgatgatggccgggtttgacggcatcagcacgaccaacagcggcgcgctgccggagctgatcgtcaataccttccgcgcagtggaacggggcgacgccgccaccgcccgcgatttgcatcagctgtggtacgcgtatcgggcgctagcgcgcaaacacggtcagccgcagctggtgaaagcggcgatggcgctgcgcggctttaacggcggcaccgtacgcgtaccgttaaaaccgatcggcgacgcggcgctggcagagctgacccgcgtaatgcaggagcttgccagcgaccatcgcagcggggttacgctggcgcgttaa

SEQ ID NO: 178915 - DNA, 1098 bp, Klebsiella oxytoca
gtgtcaccgatctttattctcgataacagctccgcgcccgcccgctacggtatcaccgccagcctgtgggccaatcgtcttgggttgcccctctggagccttcgccccgacttcgccggggatgtacccgatagccaccagcacgtcattcgtgcagggtactgcgtgaccagcggcctctggcgcagcgatacgctgcgtgaagaggtgcgcgatatcgccctcctgccgtcatcagacgccgtcattgtgctggcgtcctcgcaggcgccgcttatcgccgacctgccgggccagcggctttacagcgacgacagccgccaccgcctgacgctcagcgatgggcaacacacgctgttagatctcaccaccgaccgctacggccgctgggatagcggcgtgtcgtcgtctgccggcgggtccttgcgcatcgcgctgattggccgcgaggcggaccaccgtctggtctatcccgccacgctcggctcgctgggcgatgccgcggcgtcgctggggctgaacctggaggtccatttctttgcgccggtcagcctgtccacgggattacacgagcttcaggccttccagggcgtggtgctgccaggcggttcctcgatggcggcggtcaacggacaaatccgcgtggcggaagagaccctggcccgcgggcagccaacgctggggctgtgcctgggaatgcagagcatgatgaccgcagccgtgcgccgtagcccgggtttcgaatcggccattcccgcggaagtcgcccccgatgaagccctgcacagctttgttccctttgccgatggccgtcatcgctgcggcgtattccctttttcctccgggcttatccccggcgatatccgcgaaatgcactacaaccatcgctactgctttaaccccgagttattgccggcgctgtctcccggcggggtccgcgtgagcgcgcaaagcgatggtatcgtggaagccgtttcccagcctgagctgccgttctggcacggggttcaggggcatccggaactgatgtcccgcccggatgcgccccatccgctgttcgtcgcgttcctacaggcggcgcttaacgcgccagcgtaa

SEQ ID NO: 178916 - DNA, 1209 bp, Klebsiella oxytoca
atgaataacagtcaaatcgcccgtcgtatgcaatccgtacggccttctccgaccgcggccatttctgaccaggtacgggtactggaagccgcaggcaagcaggttatcaacctgggcgaaggggaactggattttgctaccccaccccatattagctatgcgggcattgaagctatcgtgcatcaccagactaagtataccgccgtttccggcaccgcagcgctcaaggcggccattgccgccaagttcgctcgcgacaatcagctgcgctaccgtccggaagagatcatcgccgggagcggcgccaaacagcttattttcaacgcctttctggcaaccctggacgccgggcagcaggtgattattcccgcgccctactgggtctcttacccggatatggtctctctggccgacggcgaaccggtgattgtgccctgcgatgaacaacacggctggaagctgacgccggaacaactggccgccgccctcaccccgtcaacgcgctggttgatcctcaattcgccgggcaacccgaccggggcgatttacagcgaacgggagctgcgcgcgctggcagacgtgctggcggactacccgcaggtgctggtgatggccgacgacatttacgagccgctgcgttacgacaataccccgttcaccacgtttgctcaggccgcgccgcagctggtttcgcgtacgctgacggtgaacggcgtgtccaaaagccacgccatgaccggctggcgtctgggctatgcgggcgggccgcagtggctcattgccgccatgcagatcctgcaatcacaaagcacctccaaccccagcgcgatttcgcaggctgcggcggtcgctgcccttaaccattcggcggacttcttagacggctggctgcacacgctggataaacgccgtcagcaggtgctggggatgattgccgccaccgagggcctgagcgctggcattccccagggcgcattctatgtgtttgccaactgccagcggctcattgggcgagtgacgcccaccggcgaaactctccgcgacgacagcggactggcgaactggctgttagaacacactcaggtggccgtgttacacgggtccgcgttcggcatgccggggtatttacgtattgcctacgcggtggaagatgggctgctgacgcaggcctgtcagcggattgccgaagcctgcgcgcagctgcgttag

SEQ ID NO: 178917 - DNA, 732 bp, Klebsiella oxytoca
atgaaagcaacggcacagtcaacgaaataccaggtgataaaggcagcactgttagatgaaataagaaacggtacttttaaacccggggaaaaattctacagtgagtcggaattaaaagagcgttactccgtcagttccgccacggttattcgcgctattcacgaaatggtcaatgaaggctacctgattcgctatcagggtaaaggcacttttgtttcgaaagccaaacgtaatgagaacattattttctcagaatcagataacgatttaaaaggtatgcagtcggttaaagttatcgcctgtgaactggaaaacgatccgtgtattaaagaaaaactcgggttaaatgatgatgaaagatattatcgtattgcgcgtttaaagtttgataataacaaaccttatgcattacaggtttcgcatattccggcccgctacttcgccagtcaattgacgattaagaattcggcactcagctctatttatgaggcttttaaggttaacaatggtcttgatatgtacaccatgccctatcggcagaccatctgcgccctgaccgatgctgcgccagaagtcctgcagcaccttgagctcacggctcaccagcccgttatcatgatgaaacgctatacccacgacgagcaaggtcaggtgattgaatatattgagacctggaaacggttagaatcattttatattgaaataagaacgccagataagggggcaggatga

SEQ ID NO: 178918 - DNA, 438 bp, Klebsiella oxytoca
atgaaccaattattattaatctctcatgggggtttcgccagcggtgccagacaggccacagaattaatactcggagcgcagccaaaccttcacgtagttgaactggatggtgagaaagggatagcagtatttaaacaggaacttctcgataaaatcaccatccttagcgcagcaaaatccaaaattattatcctctctgatttaaaaagtggttcgccgtataactccgcaatggagattattgtcactaacaacctatggaataatatcaccctgttctctgggatgaatttaaatttaattctggaaatggcgatggcaattgatgaaagtcactcgccagcctcgctgaatgaaataataactacggcgcgtgatggtatttaccatttacagcaggcagcgcttgccgcccacacagacgacggagacgagtaa

SEQ ID NO: 178919 - DNA, 783 bp, Klebsiella oxytoca
atggagcacattgcggtctggcagatagcgttactgacgctttattcagggctggcgatatacgacggcaacaacacgacgcttgggttagtgaaaccgagcatggcgggcttctttgccggcctcattatgggcgatatgaccaccgggcttatcgtcggcggcaccctgaacctgctggtactgggcgtgggcaacttcggcggcgcgtcgatcccggactacatgaccggtgcggtgctgggtaccactttcgcgatcatcagcggccagggcgcggcgtttggcgccaccattgcggtgccgattggtctcttaatggtacagctggatatcctcgcccgcttcagcaacacctttatccatcataaggccgacaggctgattgaagagggtcaggtgaaggcggcggccaggatgaacctgctgggccaggtgcctatttcgctctcgcgtatgctgccggtgctgttggcgctgatcctcggggcaacctttgttaatgacttcgtgacctggatccccgcgtccatcatgaacggtcttaaagtcgccggtggcctactgcctgcgctgggtatctccatcctgctgcgctatttaccgattaagaagaacatctcgtttctgattccgggctttttcctggcggcctatctgaaagtgccggtgctgggcgccgcgctgctgggtctggcaattgcgctttacgtcttcaactcagaaaaacaggtaacgcaaactaccgaatccccggcaaatggagcaatgggcgatgaataa

SEQ ID NO: 178920 - DNA, 780 bp, Klebsiella oxytoca
atgaataaagtactaaaacgcgtgttctggcgctggttcctgttcggtcagtctggctggaactacgaaaaaatgcagggtctgggctatctgtacagcatctatccgttccttgagaaaaagtacgcaaaacccgaagagcagaaggacgcggcgaaggtacacagccagttctttaacaccaacaacaccatggcgccggggatcctcggggtgaacatcgccctggaagagcagaccgggcttgcgggcaaagatgcggttgccgggatcaaaaccggtctgatggggccgctggcgggcatcggagatacgctgttctttgttattccgaccaccattatcggttctgtcgcgtcgtacctcgcactgcagggcaacccggtggggcttgttctctggctactgttcgccctggttcgcatgctgtttatgcgctttagcatcagcaaagggtatcaggaaggggtcaacctgctggggtctttgaccaatagcctcaacaaaattacccgcgcagccaatattctcgggctgacggttatcggggcgcttatcccctcggtggtgaaggcgaatcttaatttcgaattcagctacggcgaagtgtcgctcaagctgcagagcattgccgaccagattatgcccgggcttattccgctgctggttgtggggttcacctggtggctgctggggctcaaaaagatgaactcgactcgggtcatttttgtcctgattgctttaggtattatcggctacaacctgaatattctcggttaa

SEQ ID NO: 178921 - DNA, 492 bp, Klebsiella oxytoca
atgaaaggtattgtgcatattcgtgtcgatgaccggctgatccacggccaggtggccacccgctgggtaagccacttcaacgccaaccgtattatggtgattgacgacgccgtagctgcaaacgacgtagagaaaatgctgctgcgcagtgcagccccggaaggctgcaacacctctattctctcttttgagaaagccagcgccaatatcctcgccggcaactacgacggtcagcgcgtactgatcctgctgaagaccccggagctggcgctgaagctgatgaacgccgggattgccctcccccagctcaatatcggcaatatgtccaacaaagacgatcgccgccagatcaaacgctcggtcagcgtcaacgatgctgagatcgcggccatcaacgcgctgctggaaaaaggcgtggcggtgacggcgcagatgacgccggaagagccgaacgcctgtatcaccacgtttttaaaagccgataagggataa

SEQ ID NO: 178922 - DNA, 705 bp, Klebsiella oxytoca
atgtcaccacatcagcagcagtattatcagcatgttttagcaacgctgaatcaggtgtttcttactcagagcgctgaagttgagcaggcggcgacgctgtttgccgagtgcgtcaaagccaacggcattattcacggctttggctccggccactcgtttgccgcggcggttgagctggccggtcgtgcgggcggcctggtcaataccaaagccattgaccagttctatgggccaaccggctggtttgattcgctgaaagggattggcgacatcttctccgggctgctcgatctgcgcgagtcagactgctttgtgattatctccaactccggcactaaaccgctgcacgttgagctggcacgcaaggtcaaggagagggggctgaagctggtggttatcacccgctacgccggcgagtcgacgccaacgagcgagagcattcgcgactatgccgatgtcattctcgataacggctgcccgtccggtgactgcacgctaagtatggataacggcaacatcatgaccggtccggtgtcctcgctgtctgcggccttcatcatcaataacgtggtgatccgctgcatcgagatgctgctggaacaaggtatcgcgccgccggtgatgcgcagcatcaatctgcccggcggtaaagaatacaacgacatgctgatgagtcagtacaaagagcgcgtattcacgctgtag

SEQ ID NO: 178923 - DNA, 1167 bp, Klebsiella oxytoca
atgaaagagagtctgtcgaatcgcctcacaccgctgccctttcctgccctcacgcccgacgcctgtcgggatgagctgacggcgtgcgcgcgacgcatcgcgcgtaacatgggtctgtacggcgagaaattcccctcagcctgcacgatccataatcgctacgttctgaaagagaataacgactggaccaacggattctggaccgggatgcaggcaatggcctgggagttcagcggcgatcgcgcctacctggacggcgttgaacgcaacgtggcgagttttaaagcccgcctggcggcgcaccacgtcctcgatcaccacgatatcggcttcctttatagcctgtcggcagtcgcgtactggaaactgacggagcgcgaagcgctaaccccgcttattctggcggcggccgatctgctggtaaaccgttttcaccacagcgccggttttatccaggcctgggggacgcttaacgacccgcaggagtaccggcttattatcgattcattgattaaccttcccctgctccacgtggcggcaaagatcagcggtgaatcacgttatcgggaagtggctgaacgccactatgcggcggtcatcaacaacatttttcgcgaagacggctccactttccataccttctattttgaccagacaagcggtgcgccttcgcacgggaaaacctttcagggctacagcgataactcctgctgggcccgcggccaggcgtgggccattctcggcatcccgcttcactggtcggccaccggcgaaaccgaccactacgaacggtggcagcaggcctgcgagtatttcttccgctacctgccggaggacggcgttcccgcctgggatctgctgctggctgcagatccggacgccccgaaagacagctccgcgctggcgattgcgatctgcggcctgctggaagcgcataagcactttccggatgccggttaccagaaactggcgcgtcaatgtctgctggcattaatgcgcggcgcgtctgcccgcgatgatgatgtctgcgaaggcttacttaaacacggtgtttacgcctatgccctcggtaaaggcatcgatgaatgtaatctctggggagattacttctatatggaagcgttataccgagtctaccaaccacaatggtcaggatactggttatga

SEQ ID NO: 178924 - DNA, 759 bp, Klebsiella oxytoca
atgacaatgattcagagctatttagatatcgtccagaaaaaacttaacgacattactcaacagcaaagccataaaatcacttccaccgccgtggaactggcaaaaatcattaaccagggaggtgtaatttatattttcggctgcggccattcacatattttcgctgaagatgtattttatcgtgccggaggtatcgccccggttcggccaatatttatcgaacctttaatgttacatcagggggcggcggcctcatcatattatgaaaaacagaatgactatattgctgagcatctggcgaaattctcgatcaccagtaaagatgcgctgattgttatctcaacttccgggattaaccccgctccggtcgatgcagcactctgggcaaaacagcacggggcatttaccctggcgctgaccagctttctgtatgccaagacccagccatcgaagcacaaggccggccttaagctgcgggactgcgtggatgtcgccattgataaccaggtgccaatcggtgatgcggtgctttcccttacggagcatgcaacgccgttcgcgccggtttcctcaatgaccgggctgtttattatgcacaccctgttcgcggaaatcatagcgaacctggggagtgaaaataaatctctgccggtatttttgagcggtaacattgcgaattccgcacaacataatgaatatctcctcgaaaaatatggtgcgcaaatcccggagctcataaataacacgagttttaaataa

SEQ ID NO: 178925 - DNA, 1413 bp, Klebsiella oxytoca
atgacaagtcatagactcagagtttctttgtgcacaccgctgtttctttttattgccgcagatgcctttgcggaagaagaaacggattatgaagcgccttctcagtttgagaaagcgttttatgatgaaggaaaattaaatctcaatacctcactatatattcgtcatcgtgctgtaaaagaccccgcgaccggtaaatacggactgggtccagccgggatccagaaccagaccggtaacgtggcgattagctatatttcaggctattaccaggacgttattggctttgatttctggggcaacgccaacattaagctcgggcataccgtcggtcagtcggagatcctttactacgactacgattgcggcgagccgggcaagttcagcccgtgcgagaagtcctacatgagcgtgtcggttgccgcactcaagctcaaccttggcgatgcaggcaccaacttcaagctggccgcgggctatacccccattaactccggtaccgtaaaaagcagctggggcctcaaccctcacgcttttcgcgggtttgacagtgccctgaccctcgacaaactgaggctgacctacgcctgggccgaccgcttcaagaacgactggagccgtgattttaaaccgatgactacggcctggcaccagaacaacgccgccggactcgatgacaacggcaaaaccattaaagccggtgcaatcatcgattacattcatacggtgggcgcagtctataactttggcaataccgtgcttgacgtgggctatggcgaaggtaaaggctaccgtcgcaactggcaggcacaggtagagcgtcacgatacgttgacaaaggatgtctccctgcagagtaagctcttctaccagggtgcgcgctacattgaagatctgtcgaaaattaaagatcctgcaacggaatattatgtgggggttggttttaacctgagccacgacaacaccgtgtggtcccttggctatagtcagaactacgccccgaacaccggagattacaacttccgcttaaccccgtgggcgaactccgataagcgtgattatcagccgacgctgtcgcagctggaagactttaacgtttccggcgcccgcgcggttcgttttggcgtgagttataactttgccgatcttaatctaccggagttaaccctgggcggtgccggaacctacggctggcacgtggttagcgatgtcagtaaaactggttcggcgagaaagtacgacgggaacatggtgtcgttcgatctttccgctcgctatcaggtggcggacggcatggcgaaaggcctctcctttaccctgctcccggcgctcttccgggcgacagacagcaactataaaaccgatcgtaacgacgtgaagtttattgtcggctacagcatcaatatcttctga

SEQ ID NO: 178926 - DNA, 1293 bp, Klebsiella oxytoca
atgaaaatgacaataatatatgcactactatccgtattttttggagtatatggaacaacggccagtgccagtaacacaaatcaagtgtcacaaaatttagaaactgcgattccccaacaaaagcaaatagttatcggtaattgggacgaattcaactcaagaaaaattgacagactcattcaagaagcaaagcagaagccagcgcattctttatatgctgtttttgattttgacaacacaacagcttttctggatatcgaagaggcaacgcttatctatcaactagaaaaccttaaattttcgatgaaacctgagatattgaaacagataatttacaaagatataccgccttcaaactttaactcggattataataataaaaatcatcaaccggttaatataaacctcattggtcaagacattattgatagctacacatggctatacaataattacagcggatttgcgggtaataaaacgcttgatgaaattaaaaaaaattccaattatatgaattttatagtgaaaatgagatatttatatgatgcaataggtgggtcattcgaccatgaggtatcttatccatgggtgacgtatcttttttctggcatgtccaaaaaagaagtagctgatttagtgcacgatactattgagtggcaaaataaccagcctatcggaaaggtgacatgggtaagcccagcagatatggcaggccgagctggtatcgtatcagtaacatggaaaaacggattcaggctgatcccagaaatgcagacattatataaaaacctacagcaggcaggtgttgatgtttatgtcatttccgcttcagctttagatgtgataaaaagcatcgttactacaggaaaatatggtttttctgttcctgagtctcatgtctatgcaatgcatcccttatatgataaagaaggtagattgactcacagcctcgatccatactatccccagacgcaaggtaaaggtaaaaccgaaactataaagaaatttatacaacagcattacaaaaatacaggaccaatattagttgctggcgatagcgaaggagatcaaaacatgatgtccgactttaatgacacaaactgtgttcttattattaaccggctacgctcatctgacaccattatcggtgagctatcagctaaagccgttcgtgactataataaagatgatgcaaaaatattattacaaggaagagatgaaaataaaggggaatttttaccatcacaaagtagcatactgatgggcacgaataacaaagtatctttgccatag

SEQ ID NO: 178927 - DNA, 459 bp, Klebsiella oxytoca
atgaataaagttaacaatatatatacttgtttttttaaattgcttggtaaaaaaattatcaagtatgaaacggccgagatttattttgatgactgggaaccctggaatgatttacccataagaatctactttgatggtggtgaggtaatctctattgcctggtctaaatttgatgaactatggttaagtaatgatctaacacttccgttttcgattgagtataatcaagttcgctgggtgacaaatagtccaaaagaaatcagtggatgtctaaataacaggatatcatcggtaaaacttggtgtggattatttggttattgaaaataataaaatagaagtatttacacatttgttggtttatacaactaacggaattttggatgtgtttaataatctggatgaaaatggttattctttgacctcagattttgatgacaaaacaatggatgttgtatag

SEQ ID NO: 178928 - DNA, 792 bp, Klebsiella oxytoca
atgcaaataatttacccaagtgattactttaatctgaatagagttgatgaaaattatgaggatgaattcaactgtgcaagtgataacggagtaaaatgtgttttgctatcatcacagcatttattagatagcaaaattaaactttcaggaaaccttgaggcgcaagcgccagttatttggcgaggctggatgcttaaacagaaagaatataaaacattatacaatactgttaaaagccatagtgcggaaatgttagtttctcctgatgattacgcttcttgccactatattacgggctggtacggatcatgtagtgattatacacctgaaactattttacttactgagaatgatgatttcgaaaaaatcacatcacgattaaaatggccttcatattttgttaaagactatgttaaatcacttacgacatcgcgtggttcgatagcgaaaaatgccgaggaaatacaggggattttagcccatattaaacaatatcgcggagaaatagagggtggtgtcgtgcttagaaaggttgaggacctaaaacccgaaacagaacgtagatatttttcattctatggaaatgtctactctgctgatgatgttatccctgctattgttcatgaaatagcgaagcatataggctccccttttttctcaatagatatggttgagacagcttcatccaatcttcgtttgatcgaaatcggcgatgggcaagtttcagatatcaaagaatgggacgtccaaaaattcgttaagatgattgtaaaggccagcgtgtctggatga

SEQ ID NO: 178929 - DNA, 702 bp, Klebsiella oxytoca
atgaagaggaataatcactcgctgctccgcgatgaaattttaagcaaagtcgtgaagcccaccgatcatattgaaaaattgattgagataatcgctaaagagcatacgccctgcaccatcagcaaaaaacgcaacatcagcctgacgcggaatggtgaaagacagtgcctcattttattcgacgggagcgtggcgttaaaccgcataagcgatgggatgatccttaatgctgaaagcgcaccgtttatttttggcgccagctgccagctgacatatacccgccatctgtatgttaaaacgaaagaaacatcgcgcttacttttgattccacaacgtttttttcatgagcaggtcgtcaaatatcatctctggcaatcactggcgatgctgcaggattatagttcggccaaagtctatgcccattgcatgacgatatcacaactctccgcatacgaaattatacgtagccatctgctcgaacttattgatgaaccaaatgcaattaaaaacaacatcactgccgtgaattatattatggaccactcttttttgtcccgcagcggcatcatgcgggtattatcgaagctgaagagtgacggctatatccatttatcgcgcggcatcctgacggatattattgatttgccggaaaagatgaacaggctttattcaaaatccgggcccgcgcagccagcagaatga

SEQ ID NO: 178930 - DNA, 939 bp, Klebsiella oxytoca
atgaggcgagtcatcgcgctcctgctggcatcctgctgctgttcgccgctgctggcgcgcgatgtggtgcaggtttcccgctgcgttcccggctctttgcttcatgggcatagcctggaaaaagcgcacgtcgtggatgactttcatatttactacagcctgcagggtagggacgccctgcaatatccgcaggatagtaccggcgagggcgtgccggatgtcgtgaaagacattgcgagccagctccaggctgcgaaatatctctacacctcgctgctgggcctgcgctcgccgctgcagcagaaaatttatcgccaggcccgacagatcaacatctacctgctgacgctccccaaaggtcacggcctggccttcgatcgggtggcggcagaaaccatgggtgacggaacggcgctgccctgcggcttaaaaattgtccttaacgccgcgctgcggccggcgcgcaacattacgccagcgcatgagttatttcatttgtatcaatacggctacggggtttttaaacagaaatggtacctggaaggtatggcgcgctggatggaaaataccttcagacccgcgcaggaaagagtcgtgccttcacccggggaggttgcctgcgagagcaacgtttctcgcggctatagcgcggccaccttttgggccagctatgcgcagcaggcgtttgccgccacgctggtgccggataacgcgctggcgtatcgctatgtcgacggcagcccggtgtttcaaacccggacggtgcccggcggcgcgatgctggcgcctttttttcagcagcttgcgctcagcagccggcgcatttctggtgaaatgaagctgcccaatatccgctggagtgagcagcagcagcgcgacgggcggtacagtcgcctgatttgccaggcgttagccgcgacggcgcagaataaaaaataa

SEQ ID NO: 178931 - DNA, 477 bp, Klebsiella oxytoca
atgaatagcaacaaaaccgacgttaacctcgcgcaggtaaccctccacaccgcggctgaaagcgactttgcccagtggctgccgctgtggaaaagctaccagacgttttatcgcgtcgacatcccggaaagcatcacgcagctcacctggaagcgctttttccatcccgccgagccgatgttctgcgcagtggcaaaacaggaaggcaggatagtgggtttcgtacattatctcttccaccgctccacctgggccgaaagcgactactgctatctggaggacctcttcgttgacccggccgttcgcggtcagcatatcggcaagcagctgattgagtatgttcagctgcaggcgcgcaaacgtcacgcagccagcctgtactggcacacgcatgagaccaaccttcggggccagcgtctgtataactgggtcgcggagaaaagcggcatgattgagtatcgtatgcgggtgaagtag

SEQ ID NO: 178932 - DNA, 1470 bp, Klebsiella oxytoca
atgccaaaacccattgcccctctgtttcaggaactgttattagcccgcggcgtgattaaagatcaggtctaccacgccctgcgtcaggcgattctggatggccgattgtcggcgggttcaaaaatcccctccagccgggcgctggctgagatgatggcgatctcgcgaaactcggttattgccggttttgaccgcctgatggatgaggggtacctcgtcacgcgcaagggggcgggcacctttgtctgcgagcatatcccggataacttcattagcgagtatgacgcgtcgacgccgcccgaaacggcaatagccgccgcagggccgcttaatcctgatgtcgccgctctggtgtcatcatggtcagaaagagaggacagcggcgaaatgcgtcaggtttttgccgtcggtatcggctgtaccgatctcttccctcatgctttatgggggcggctgctggggcgcgtctggcggcaatcgcgtcgtgagctgggagcgcacgccacgccctatggatatcaacctctacgccaggcgattagtcgctatattcaggcgacgcgcggcgtcaattgccacgaagatcgggtgatcattgtcaacggtattcagcaagcgctttccatcaccgctcaggctttactggaaaagggcgatgaagtctggctcgacgatcccggatacaacggcgcccgcggcgcattcgccgccaggggagcggtggtccggcccgttcgggttgacgaggagggcatggatattcaggatggcattcgccattacccgcaagctaagctggtctataccgcgccgtcgcaccagttcccgctcagtggaacgcttagcctgcccagaaggctcgccttactggaatgggcggaagcccatcgggcgtggatatttgaagacgattacaatagcgaattccgctatgccgcccgctctctgcaggcgttgcaggggttagataatcatcagcgggtcatctacgcgggcacattttctaagatgatgtatccggagttccggctgggctttttagtggtccccgagcatttgcgtgaacagtttgccatgacgaaatattacaccgatctctgtagtgggtatctcgaacaggccgtcctggcccgtttcatcagcgaggggcactatgccagccacgtccgtcgtattcgcaaagcctgttttgagcgaaaaagcgcgctggaggcggctattgcccgctactttgccgggcgcatggtcgtacatccaacggattcgggtattcacatagtctgctggctatcagcgggtttaaaggcagaagaggtcgtcgctaaggcgcgccagcaaggtttcggcgtgcagatgtttgagcgctattgtcagcggccgatgtcgcgcgagggcgttttattcggttttgcaaaccatcccccagcggttttgaccgagggaattcgccgcctggctgcgatgttttag

SEQ ID NO: 178933 - DNA, 219 bp, Klebsiella oxytoca
atgcagattaaaaatactattcctgcagagtttatttctaactctgctttgctgaaaaatatcgaacacatggtgcagacccaaacggagagcgaagccgttagccatgagcgtttaatcgttgaggttcagcggcgcctgaatctcgagaaaaatgaaatactcgccgatttatatatgcaaacgctgcatgtgctacgtggtaaaaaccatcactaa

SEQ ID NO: 178934 - DNA, 894 bp, Klebsiella oxytoca
atgacccgctctatccaggtgattctggcaatgatcgcgctttgcagcggttccgttttagccgccgagccctgttttcactatgcccaggagataaaactcagtgggtaccttgaggtcagagccttttatggtccccccggctacggcgaaaaccccaaaacggatagccgcttgagacaggatattctcttcctggacgaacctatctgtacaaaagctaaccgggatgagatgggggagaaaactcaaatagaagtcacgctacgaacggaaagtccatccagtgagttaaccgggctcgcgggtaaatatatcacggtaaccggccggcttgagcacgccgagaccgggcatgataataccaaccttattttatcctcggtaaagctggtggaaagtaaggggaacatggaaaggaaggcaattctggataccgttcgcccacaggcggcaaaccaggccggacaggccgtgcgtattaaagtcgatcgcctgaacaccagtggtgaatgggccattctggtcgggaaagtcgtcgcacctgaagggcaaaagctagactggtcgcaggcaaaagagtgcgatgccgaccttgataaaatgctgtgggccgtgttgactaaaaccgccggacagtggcaggtgaaggagatcgatatttgcgcttccgagccgccctggtggtatctgacggatgccgatctcaagctgccctgcgacgtttattccggcctggagtccgtggaggaaaaccgacgctttgacgatctggcaacacgctgtagagcacttaaaaaccaaccctctgttgagataaaaacgacaaaacaagctgaactcaacgcccagaaaaaacgcgagattattaagcaatttaaacaattccagtag

SEQ ID NO: 178935 - DNA, 678 bp, Klebsiella oxytoca
atgatgtatcatattcccgccgttctcagctctcaggaagtggacgattttatcgctcagctgcagcaggcggaatgggtcgacgggcgcgtgacgaccggcgatctgggcgcccaggtcaaaaataaccagcaggttgatacccacagcaatctttacggcgaacttcagggtaacgtactggcggcgctgaatcgcagctcgctgttttttgccgccgcgctgccgaaagcgatttccagcccgctgtttaatcgttatcagcagagcgaaacttatggtttccacgtcgacggcgcggtacgcagccaggcgcagggaggctggatgcgcaccgatctttccgccacgctctttttaagccccccggagagctacgaaggcggtgagctggtcgtgaacgatacctacggacagcattcggttaagctccctgccggggacctggtgctctatccttcaagcagcctgcactgcgtcactccggtgacctcaggcgttcgcgtcgcctcgttcttgtgggttcagtcaatgatccgcgacgataaacgccgcagtatgctgtttgaactggatggcaatattcagaaattaaaaagccgccacggcgaaagtgacgaagtcctgtctctgcttaatctgtaccataacctgctgcgcgaatggtcagagatctga

SEQ ID NO: 178936 - DNA, 2289 bp, Klebsiella oxytoca
atggaaaaaaataacaatttgccgttcagcagttttcactcgctcactctcttcaccggcttatgcctgagtctttctccgaccggccagctgcttgccgcggatagcactgaaaaaaatagcggcgaaacgctggtggtcgaagcgcagacgccatcgctgtacgcgccgacccgctccgccgatcctaaattttcacgcccgatcgccgacacaacgcggacggttagcgtggtctctgagcaggtgatgaaggaccagggcgtcactaacctcaccgacgcgctgaaaaacgttcccggcgtcggcgctttctttgccggcgaaaacggcaactcgacgaccggcgacgcgatttacatgcgcggggcggacacttccaacagcatttacgtcgacggcatccgcgatatcggcagcgtcagccgcgatacttttaataccgagcagatcgaagtcatcaagggaccttcaggctccgactacggacgcagcgcgccgaccggttcaatcaatatgatcagcaaacagccgcgcctcgattccggcatcgacgcctccgccagcgcgggcagcgcctggttccgacgcggcaccctggatattaacgaggccattggcgaaaccagcgcggtgcgtctgaatctgatgggcgagaaaacccacgatgcgggccgggacaaggtgaaaaacgagcgttacggcgtcgcgccatcggccgcatttggcctcggcaccgacaaccgcctgtatcttaactatctgcacgtaacccagcacaacacgcccgacggcggcattcccaccatcggtctgccgggctattccgctcccaacgccggcacctcggcgctgaatcactccggcaaggtcgccaccagcaacttctacggcaccgactccgactacgatgattccacaaccgataccgtgacgatgcgcttcgagcacgacctgagcgacacgacgacgattcgaaacaccacccgctggtctcgcgtgaagcaggattacctgatgactgcggtgatgggcggcgcgtcaaacatcactcagccaaaccccaacgatgtcggcacctggacctggtcgcgcctggcgaataccaaagacattagcaacaagatcctgaccaaccagactaacctgacgtcgacgttctataccggggccatcggtcatgacgtcagcaccggtgtggaatttacccgcgaaactcagaccaactacggggtatatccgctcacgcctccggcggtgaatatttatcatccgaacagcgatatctccatcggcggcctgaaccgcagcggcgccaacgctaacggacagacggataccttcggcgtctatgctttcgatacgctgcagataacccaggacgtcgaacttaacggcgggatccgtctggataactaccagaccaaatacgatagcgccagcctgtgcggcggtaccggacgcggcgccatcgcctgcccgaccggagtcgcgaaaaatacccccgtcaccaccgtcgatacctcaaccagcggtaacctggttaactggaaggccggcgcgctgtaccacctgaccgataacggcaacctctacgtcaactacgctgtctcccagcagccgccgggagggagcaacttcaccctcgcgcaaagcggcaccggcagcagcgccaaccgaaccgactttaaaccgcagaaggccaaaaccagcgaagtcggcaccaagtgggagctgatggataagcgcctgctgctgaccgccgccctcttccgcaccgatattgaaaacgaagtcgagcagaacgacgacggcagctattcgcagtacggtaagaagcgcgttgaaggctatgagatctctctggccggtaatatcacgcccgactggcaggttattggcggctatacccaacagcacgccagcgttcgtgaaggcgcgaataccgcccaggatggcaccagcgcgctgccgtatacgccagagcatgcgtttactctctggagccagtatcaggccaccgatgcgatcgccgtcggcgccggcgcgcgatacgtcggcagcatgcatcgcggcagcgacggtgcggtcggcacgccttcctataccgaaggctactgggtggctgatgccaaagtcggctatcgcattaaccgtaatctcgacctgcagctgaacgtctacaacctgtttgataccgactatgtcgcctcgattaacaagagcggctaccgttatcacccgggcgaaccgcgaaccttcgtgctcaccgccaatatgcacttctga

SEQ ID NO: 178937 - DNA, 126 bp, Klebsiella oxytoca
atgaaaaaatcatgccacttttacaacctgttgttttataacaagcaggaaggcgcctgttgcacaattttgataacggataacgttaaatgcaccgatatggggcgctgttttggtgcgtcataa

SEQ ID NO: 178938 - DNA, 378 bp, Klebsiella oxytoca
atgaaaagccttttaactctcctgatgctgtttcttattcccatagcctgtgccgctgaatcacaaccgattgaaccgcgcgttaagcctgcttatcccgcgaaagccgaaaaaaaagggataccgggtcaggttaaagcgcaatttgacgttgatgagaatgggagggcgactcacgttcggttattaagctcagatccttccggaatgtttgataatgaagtcagggccgcaatggaaaaatggcgatacatcaaagggaagccttccagcaataacatcattaccattcatttcaagccggggccgccttgcgtagaggtgccagcgccaaaccagcccggcagtattcaaagcagcggcgttccttttcgctaa

SEQ ID NO: 178939 - DNA, 1254 bp, Klebsiella oxytoca
atgctgactgatatcaaactgaaaaacctcaagccaaaggacaaactttataaagttactgaccgggatggtttgtacgttgcagtgctgacatcaggcactgtctcgtttcgctacgattacagtatcaacggaagacgagaaacactgacattagggaagtatggtattgacggtatttctctggctgaagcaagggaaaaactccataccgcgaaaaagctactcaagtcaggcatatcgcctgctgtagacaaacgttacggtaaaaataagctccgggagagtgagacgctgacggtatataccgacaattacatgaagcatgtaactctggcggacagtaccagagcgatgaaagaagcggttattgagcgagatatcctgcctgtgctgggcaacaaattaatgaccgaaattactacggcaatggtgcgtagcctttgtgatcggataatagatcgaggaggtaatgcaacagcggtacaggttcgcgagataatcagcagtatctatcgttatgcaaatgatcgagggcacagtttttctaatccagcccaggatattaaagcgagttctatcgcaacgttcactccgaggctcagaagccttgccccgcgagaagttagcattttcttcaatacactggataccgttgcagggatgccaacgctcaaactggcgttgaagattatatttctgacaatggtacgtaaaagtgagttcactttagcgacctgggatgaggttgatttcaaaaccaacgagtggaccattcctgctggtcgtatgaaaggaggccggactcacgtcatctatctttcgcgccaggttaacgatttgctggtgggcttgaaaatgtgtgccggaggaagtccttacttacttgccgggcgctataacatcaacaaaccactgtctaatgcagccctgaacggcgttatcactacaaccgtaaaagtggcacagtcgcaagggaaggcactggagcactttactgtccatgacatgcgacgaaccgccagcacgttattgcatgaggcagggtatccatcggactggatagaaaaatgcctcgcgcatgagcaaaaaggggtgagggcaatttacaacaaagccgaatacgcgcgaccacgagcttacatgttgcagcagtgggcggacatggttgatggttggattgctggaacaacagtgacgctcaccccgttttcgccgaggaagtacgaggagtggatgaaccttgatatgtaa

SEQ ID NO: 178940 - DNA, 1659 bp, Klebsiella oxytoca
atgttttttaatatgcttaataataaacaaaaaaagcgtctttttattaatcaagtaaatgtgttttacaattattcgttaggttttgaagttcattcggtagacttattgaagactgctaataaacttcttaaatcagggttttctaaatatgtttgtttttcagattttaagtttttatatctcaatgaaaataatcaaataaaatatagtaatttacatccagaaggaagaaattgggattcttcatgggaaataaattttgatgatgatataccaaaagaaataattcctgatttaatgatttcttccgagttgtttttccatgaaaatagactcgtgaatgataatcaggcttacataagaacatcattacctccctttgttctggagataagtaatgagcagtaccctatgtatccgggagtaaagatctaccgtgatggaatcgctatcatttattttcaatttgatggtaaatggaatgggattgatgatgacagttttttatcatcaattataaacatgagtcaaagatattttgataaaatatgggttgatgcgaaacttcaaatgctcgatggtgaagtagttttagaaaatagctttgaagatgttttttcaattggtggaaattatcttgatggaagagaaataagaaaattaaaacaaaagatgcgagataatagcatgaaagtattaactgaatcttttgagaaagaaggttgtactttttcgttcgataatcatagagaatggattttgcaccagattgcaggaacggaggagaatgaatcatgggaatctacgattgaaatgtgtcgttctatatattcaaacgttattggcagtatgttggttccacaatataaaactaataaaactaggtcatatagttatctttggcacggacggccttctgtttctcttttgcgtttcgataagcagcctcaggataagaatgctttgctgaaaaatttttctgaatcgttggctaagtttttgaatagagctgatatcagcgaaaaggaaaactcgttgccgccagatttacggaagtttaatgattattgtctacatgcaaatagatccatttacttatggacttggttaagaggagagaatgagtcagaggatatttgggatgacagaaatacctcatcaagaatacttgaaaatcaggcaagagttgagcaggttgaatatcataacatgagtatttctagagcgtgctcttgggctagtaacccgccatctgaacaacatctatttatctcctatacaacattggcagaaacagaaaataacattcatcatagtagtatatctggcgaaatttccgatacgctttcatatctcattaaatcttttggaaccgagagtttaatttcttctgcgaaagagatggctagatttcgcatggacgaacttaaatacagatcagattcagcaagaaattctagcaattattggttaacatttatcttcggtttggttggtgtaacaagtttcgctgagtttgcagttaatccactaattcttaataaatggagtggaatgaataaagttatagcgccatttatttcttttgggatctctgctgttttaattttagcaatatctgcaattatttggtattacacaaagaaaaaatactag

SEQ ID NO: 178941 - DNA, 876 bp, Klebsiella oxytoca
atgtcgcgactggcacaggatatgaaaaaactggcgcaccgcgcaggtggcagccataaaaccgtccacgaccgcgaacagatggcgcagcgttttgcccgtcatttgctggcgcagaatattcaggtcaccagcaccagccagctcaaagccagacacatcgcaggatatatccatgaacggctggcgcagggtatttctctgcgaacgctacagaatgagatggcgatggtgcgctctattctggctgaagccggacgcacacagctcagccagtcagaattaatcagcaaccagtcgctcggtatcagtggtgccagccgtgacgggacgcaccgggccattccggatgcactttaccatcaggtactggagcggatacagcaaaccgacgcaggtctcgcggccagcctgcaactggcgcgggtgatgggcctgcgtggacaggaagcggtacagtgctgccagtcgctgaaaacctgggataaacagctggaaaaaggggctgaacgtctgccagtgatctttggcaccaaaggcgggcgaccgcgcatgacacaggtgattgaccgggaagccgttcgccaggcggtgaaagaggcgcttgagattgccggggagcgtgacgggcatctgatcgataaaccggatctgaaatccgcgatggactactggcacaaccatctccgcgatgccgggctgacgggcgaatactcgccccactccctgcgctatgcctgggcgcaggacgcgatccgctattacgaggtacaggggctgagtcataaagaggcgctggcggtgacatcaacggatctgggacatggggatgggcgaggacggtatatcgagcaagtttatggcaaaattaattag

SEQ ID NO: 178942 - DNA, 231 bp, Klebsiella oxytoca
atggaaaagacaaccgtattcaaaagcaaccgtagccaggcggtgcgtttgccaaaagcggtggctttaccggaggatgtcaaacatgtggatatcgttgcggtaggacgaacgcgcattattactcccgcaggcgaaagctgggacagctggtttgatggtgagagcgtgacgtctgactttatggccgcccgtgagcagcccggtgaccaggacagggaagggttctga

SEQ ID NO: 178943 - DNA, 405 bp, Klebsiella oxytoca
atgctcaaatacatgctggataccaatatttgtatctatacgatcaaaaataaacctcaggcagtccgggaggcgtttaaccagcattacgggcggatgtgtatcagttctgtcacgctgatggagctgatttatggcgcggaaaagtccgccagcccggagaaaaacctgcgcgtggttgaaggttttatcgcccgactggaggtgctgaattatggtatcgatgcggcggtacagacggggcaaatccgggcagaactggcaagagcaggtacgcccgttggcccgtatgacagcatgattgcggcccacgcccgtgcactgggtttaattctggtgacgaacaacacccgtgagttcgaacgtattaatggcttacgcctggaagactggagtatcagctaa

SEQ ID NO: 178944 - DNA, 1224 bp, Klebsiella oxytoca
atgaagataacagaattatataatcacccgcaccgtctccatctggaaacgacgaaacgctgtaacctctgctgcgagcactgctacgtttccgcttcagacgatttccggcaccatgacgcagccatgttgaagaaagtcattgccgataccagggaaaaaggagcgacacgactcacattaactggcggcgaattcctgatgagagcggatcacagggaactcattgaatatgccattgcagtggggtatcgcaatatctacttcatcacaaatggcatttatctaaaaagaagcacactggaatggcttgcaaatcttaaggtcaggcaaacactcaaaacgcttgtcccgacacttatcaaaaaaatgaagccttttacgataggattagggatcagcctcgatggacttgaaggcaatggcattatccgtaaatacaaaaatggtaatcccgtcccttttgataaaatactcaacaaaatcgcactcgccacacaatatggactttatataacagtaaacacaactgtttgtaatgaaaaaaccgcctcagagcttttccagatctataaaaaactacgcgacctgaatgttgaccgctggcaagtcgatcaggtatttatgagtggcagaagtattaccagtgatgcggtgaagaataatgacacctggattgatattaccaaaaactcgtattacgaaattattaatgattatcttcgtgtttatcctcataaaacacaaatgaaactggaaatcgttcagttatttcgttcggctattcttgagcacggattcaaaattattaaagatgatgcttatcatccttgttcatatcagtttggcagcgttatcgttgaaaatgaaaagaacgtcagattttgtccatcactacgctatgctcaggacattatcttcaatactacggaacaagatatctccactgactcatatatgaaaaatccgcatttcagaaccttttcagaactgatgctcaaagatctgccatgcagggattgccgttacaaatttattgcacatggtggttgccgggcaaacagcgtcagttacagagatgccctgtatgctaaagaccccgtatgctgttctctcgccccattccttgagaaacgcatagttcccctgttgccctacgcgctacaaaaacagtacatatcagccctgtaccaggaaggtaaaatgccagaagagattctgtga

SEQ ID NO: 178945 - DNA, 129 bp, Klebsiella oxytoca
atgagcattctttccagactattcaaaaagtacgtttctccggcccagcacttcggtattcatgcgggcctgaatggacatcttgtcgatagcgcagataccggtccaaacacaggtggcggctggtaa

SEQ ID NO: 178946 - DNA, 1263 bp, Klebsiella oxytoca
atgtcatgtactgggggaaacatgggggacggtttaggccgggatttctggttctacagatgtgctcagattgcgacagcattgggttacagcgcgtcgtcgattgctgccgtctggtggattctgggtgaatatcagaagatgatctatgtgtcatacctcattgtcccgccattgatcatttctgctctggcccagccgctgattgcgcctgccggtgatcggtacaataagaaattgttgatactgtccggtcttgctctccagttcttaagctatgttaccgttgcttttgttttcatgtctggtggcatgaagttgtcggcactgattgcatttgagctcatgtctgcttcaggccgaattttatttaatgcgggctcaataggcattcttcctcatcttatccctgaaaacaggatcactgagggtatgaacattacccatcgtgttacctccacgatgtccattattggcggcgtgtctggtggtgcaatggtgactgtatttgggatcgctaattcttttctgtttctggccttctgcatcagtattgcctgcgcattctgtgtatgcatgcgctgtcattctcaggctgaccagggggagcgtcgtcgggtccgatggctggatgatatcagggaggggcttaactacacggtgagtaacagggtgatctccggattttttatctacagccttattattggccttgcctttgcgccgatgatggtggcctttccttatttaataaaagaaattaaagggctgtctcctttctacgtcggattgcttacaaccagcatgggggcaggagtgataaccggatcgtttatttttccccttttacgctcgcgatttgataataagtctctggtttatgtctcctcatcactcttctttctctctctgctgctcattagtttgtgccatcatgtcatcgtgctttttatcggacaatttatcatagggttatcgcggaactggattaacgtggtgattgactctctgttactgattaatttacctgggcatttaaggacacgtgtactgtcgaatctgtcattttttgccatgatcaatatgccagtggcaatgctgttgtttagctatctgatggatttgatgggggtatataacatcttccttatgctgtcggcactgtgctttattgcgatgctggttattgtctctaaccgggaaatcagacgatttttatctgctgaacccgaagaagccgcagagatgctgatgagtaaatga

SEQ ID NO: 178947 - DNA, 1017 bp, Klebsiella oxytoca
atgatgaacaaaatcagagccgccgtggtcggcgcaggtatctacggcaaacaccacatgaatgcataccgccataacccggatgcggtgctggtcgccatctgcgacaccgacacagaacgctgtgacgaccttgccatgtcatacggcatcatgggctatacccggctggaaacgctgctggaagaagaggctatcgacgtggtttcggtggcgacaccggacccgtaccacaccgaatccatcctcaccgccctgcgccacggcaaacatgtgctggcggaaaagcccctcgccacgtcggtacgcgagtgtgagcttatcgtggagatggcgcagcagcgggacctgctggtcggcgtcgatttccacaaacgctgggacccggcagtaatgcgcattaaggccgaactggagaagccggaagccgggcgcatcctgcgcgggcatatcagcatggacgatgtcatcagcgtgccgacggagtggctgaactgggcgggcgcaagctccccggtgtggtttctcggctcccactgcttcgacctggtacgccatctttccggccaggaggtggtgtcggtgtacgccgtcgggcagaagcggctgatggccgaatgcggcctcgacaccttcgacagcgtgcagagcctgctgacaatgggcgacggcagttcatggggggtggaaaattcgtgggtgctgccggaaggtttcccgaaggacaacgacgggcgtatcaatattctttgtgaagcaacctatatccgcagcacttcacagcaccggggactggaaatcatcacgccgggcatgacgctcacgcccaacagctatttcatcaactaccgcaacggtgtcgccagcggtttcggtatcgaccctatcaatgactttgtgcaggcggtcaggaataaagcaccgtacccggtcaccgcaatggacggactggcggtcagccggatttgtgaggtggtacatcgcagcctggagagcgggaaacctgaaaatgtttaa

SEQ ID NO: 178948 - DNA, 786 bp, Klebsiella oxytoca
gtggtgattaactgcgccgggtccctgcgctgcggcctgtacccgcagaaaggtattccgaccatcaacgtgctgcctacctggcgcgccgggccgctggcgcagtttattaccgaagagaactacgtttccggcgtcaccccggagcaactggttctggtggataccgccgaagccccggacgacaagcctgaaacgactcaggagcctgcgccacgggttatcaccgcacctccacctccccatggcgcggagaaactggtgcgcatggtcgagcataccggcaccgccaccggacacgttatcgccctgctgttcgccgccagccgcgaggcggtggatgtgtccctgcgcaacgttatgccgtttatggcctttgtctcgctgctgatagcgctggtgcaggagaccgcgcttggcagcctgattgcccacgccctgacgccgctggcgaactcactgtggggactggtactgctgtcgctcatctgcggcattccgttcctctccccggtgctcggaccgggcgcggccatctcgcaggtgattggcgtgatgataggcacccagattggcgcaggggcgatatctccggccttcgccctgcccgcgctgtttgccatcaacgtgcaggtcggctgcgactttatcccggtgggcctttcgatgcaggaggcaaagccggagaccatcgcaaaaggtgtacccgcctttctgctctcacgtcagttaacggggccgctggcggtcatcatcggctggctgttttccctgggcttattctga

SEQ ID NO: 178949 - DNA, 330 bp, Klebsiella oxytoca
atgaataatattgctctaatcgttaagttacgagaactactggttatttttatgcatacgcgctcgctgccggagaaagcagcagacgcgttgcgttattgccaggagcatctcccgatagctgagattccgattggcgcttatggtgagtacagtgatatttttgaacagattgtttttttatcggatgacaagagtcgtacggccccggatgatttactgcgtagcggcggcgatctgatattaagtattttaatgctctatgagcaggttgcttcatatattgccgtcgaggaatttatgcacaaacagaaccgctttaacgaatag

SEQ ID NO: 178950 - DNA, 1977 bp, Klebsiella oxytoca
atgaaattaacaccgattatgaaaagtctggctctggcaggaattatctcgactctccctgtgaccagctgggccgaaacgtcgccgaaagaagccgctgcggcgaccaaacaggcaaacgacgcgctgtataaacagctccccttctccgacaacaccgactttaccaacgcgcataaaggttttattgccgcgcttcctacggaagtgattaaaggtgaacagggcaacgttatctggaacccgcagcagtacgactttattaaagagggggaaaaggcgccggatacggtcaaccccagcctctggcgtcaatcccagctcatcaatatcagcggcctgtttgaagtgaccgaaggcgtgtaccagatccgcaacctcgatctctccaatatgaccatcattgaaggtaaagagggcatcacggttgtggatccgctggtatcggcggagaccgcaaaggtcggaatggatctgtattacaaaaatcgcggcaataagccggtcgttgcggtgatctacacccacagccacgttgaccattacggcggcgtgcgcggcgtggtcgatgaagccgatgtcaaatccggcaaagtcaaaatctacgcgccttccggttttatggaagccgccgttgctgaaaatattatggccggtaacgtgatgagccgtcgcgccagctatatgtacggcaacctgctcaaaccggatgccaccggccaggttggcgcaggtctcggcaccacgacctctgccggcaccgtcacgctgattgctcccaccaatatcatcgagaaagatggccagaaagagaccatcgacggcctgacctacgattttatgctggcgccgggctcggaagcaccgtcggaaatgctgtggtatatcgaagagaagaagcttattgaatccgccgaagatgtcacccataccctgcataacacctactcgctgcgcggggcgaaaattcgtgaaccgctaccgtggtcaaaatatatcaacgccgccattgtgcgctggggcgacaaggctgaaatcattatggcccagcaccactggccgacctggggtaatgagaacgtagttaacctgctgaagagccagcgcgacctgtatcggtacattaatgaccagactctgcgcatggccaacgagggcctgacccgcgatgagatcgccgctaaattcaagctgccggacagtctggccaatacctgggccaaccgcggctactacggctccgtcagccatgacgtgaaggccacctacgtcctctatctcggctggttcgacggcaacccggctacgctggacgagctgccgccggaagaagcggcgaagaagttcgttgattatatgggcggcgccgacgctatcctcaagaaagccaaagaagattacaaccagggcaactatcgctgggtagctcaggtagtcagcaaaattgtcttcgccgatcccggcaatctggaggcgcgcaatctggaagccgatgccctggagcagctgggctatcaggcggaatcaggaccgtggcgtaatttctacctgaccggcgcgcaggagctacgcaacggcgtagtgaaaggcccgacgccgaataccgccagcccggataccgtgcgggccatgaccccggaaatgtttttcgactatcttgcggtccatatcaacggcgaaaaagccggaaccgccaaagcggtattcaatatcgaccttggtaacgatggcggtaaatataagctagagctggaaaacggcgtgctcaaccacaccgccgatgccgaagccaaagacgccgacgctaccatcgcgctggatcgcgccacgctgaacaaaatcatcctgaaagaggaaacgctaaaacaggcggaggataagggtgaagtcaaagtgaccggcgacggcgcgaagctggacgagatgctgggctatatggataaatttgagttctggttcaatatcgtgacgccgtaa

SEQ ID NO: 178951 - DNA, 801 bp, Klebsiella oxytoca
atggaaaaaacatatacgattaatggaataattacatttattcctcaacgtggtgctctaatactcattgctgacgagacgaaaacggtttcattaaatatgccggccagccgttgtttattgctgcttattcagcaggatggcaaaaccgttgcccgcgaaacctttttcgaggaagtgtggataaagcatggctcccaggtaaccagcaacggtttctaccagaatatttctctgctgcgccgggcatttaaagagctgggcatggagggcgatattattattacgctgccgagggttggcgtcaggctggatgcgacaatatcggtgacggagtctcagccgtgcgagatggagaaggcgccggagccacaggtgcccgtagatgggcccgtgcacgaggaggtcgcggctgcgagtgtgcctgaaaaaaagcggttaaggccgcgatgctctctgttatgggggcttgcggcgctgctgagctgtctggtcggcggttttgttgcgtggcaaacagaattcgactcttatttgcaaacttattcgcccataattgctaaactttcgcaacaatgtcatttctttgccaataatgatgtggttgatcacgttcgtcatgtcaattttatcaagcgcagcaaatttgaatgtgaagaatactcgtggatttatttgacgctttatcccgggcaggcgcgggtgtcggtgattcgctgccgtcagccatttagtcaatggcgtgataatcaatgcctcaccaaatattacattaaggaggtagccaatgcgcccgcgtga

SEQ ID NO: 178952 - DNA, 471 bp, Klebsiella oxytoca
atgcgcccgcgtgaaattaaatggttaatcgctatcgtatttatcggggtgcttagcggaataatgataaaatcctggcaatactggcagcgcaatcatttccagtgcagcggcgagatgcggctaattaacgcaggctaccagggcgatatttccttacgctacgtatttgatagcagccgcgggctggcgatggtccggggggaaattacgccgccgcagggcgctgcgtttaccattaatcagaacatctggtttagctttacccgcgacggccagcactacttcctgcgttcggaaaccgtctcagccagcatcggcgagaccgagcaggaagagcatgtaaagcgtatcctgccagcgtttttcctccagccgcaggtgccgttttaccttaacatccagcggctcaacgaacgtacccggctgctgtataccagccgggcgccgtctttgctttgcgaaacctga

SEQ ID NO: 178953 - DNA, 1416 bp, Klebsiella oxytoca
atgacagatcttccctccagcgtgcgctggcagctgtggatagtggccttcggcttttttatgcaggcgctggataccactatcgttaacaccgccctcccctccatggcgcagagcctcggggagagcccgctgcatatgcatatggttattgtctcctatgtgctgacggtggcggtgatgctgcccgccagcggctggctggcggatcgggtcggggtgcggaatatcttttttagcgccatcgtgctgtttaccgccggctccctgttctgcgcgcaggccgccacgctcgatcagctgatactcgcccgcgtgctgcagggcgtcggcggcgcgatgatggtgccggttggccgcctgacggtgatgaaaatcgtcccgcgcagtcaatacatggcggcgatgaccttcgtcaccctgcccggccaggtgggtccgctgctcggcccggcgctcggcgggatgctggtggagtacgcctcctggcactggatcttcctgatcaacattccggtcggcatcgtcggcgccatcgccacgctgtgcctgatgcccaactacaccctgcaaacccggcgctttgatatcttcggctttattctgctggccgccggcatggcgacgctgaccctggcgctcgacggtaaaaaagggctcgggctctcccccctgtggctgacggcgctggtggccatcggcgcggcgtcaatgctgtgctatctgtggcacgcgcgcggcaaccgcaacgcgctgtttagcctgaagctgtttaccaaccgcaccttttctctcggccttggcggcagcttcgccgggcgtatcggcagcggcatgctgccgtttatgacgccggtgtttttacagatcggcctcggctttacgccgttccacgccgggctgatgatgatcccgatggtgctcggcagcatggggatgaagcgcattgtggtccaggtggtcaaccgcttcggctatcgccgggtactggtgacctcgacgattggcctcgcgctggtcagcctgctgtttatggccgttgcgctcgcgggctggtactggctgctgccggtggtgctgttcctgcaggggatgattaactccagccgcttttcttcaatgaatacgctgaccctgaaagatctgcccgacgatctggccagcagcggcaacagcttgctgtcgatggtcatgcagctgtcgatgagtatcggcgtcactatcgccgggatgctgctcggtctctacggccagcagcatatcagcgccgatgcggcgatcgctcatcaggtctttctctatacctacttaagcatggcggtgattatcgcgctgccggcgctgcttttttcccgcgtaccggatgacaccacgaccaataccgtgattcgtcgccgtaaaaggagtgagtcttga

SEQ ID NO: 178954 - DNA, 3078 bp, Klebsiella oxytoca
gtgaagtttttcgccctcttcatttaccgtccggtggcgacgattctgatttcgctcgccattaccctgtgcggcatcctcggtttccgcctgctgccggtggcgccgctgccgcaggtggatttcccggtcatcatgatcagcgcctcgctgcccggcgcgtcgccggagaccatggcctcttcggtggcgacgccgctggagcgctctttggggcggattgccggggtcaatgagatgacctcctccagctcgctcggcagtacgcgcatcattcttgagttcaactttgaccgcgatatcaacggcgcggcccgcgacgtgcaggcggcgattaacgccgcgcaaagcctgctgccgagcggcatgccgagccgtccgacctaccgcaaagccaacccgtcagacgcgccgatcatgatcctcaccctcacctcggatacctggtcccagggtgaactgtacgacttcgcctctacccagctggcgcagaccattgcccagattgacggcgtcggcgacgtggacgtcggcggcagttcgctgcccgcggtgcgcgtcgacctcaacccgcaggcgctgtttaaccagggcgtatcgctggacgcggtgcgcagcgccatcagcaacgccaacgtacgtaaaccgcagggggcgctggaagatgccacccaccgctggcaggtggcgaccaacgacgagctgaagaccgccgccgaataccagccgctgatcgtgcactataacaacggcgcggcggtgcgcctcggcgacgtcgccaacgtcaccgattcggtgcaggacgtgcgcaacgccgggatgactaacgccaaaccggcgattttgctgatgatccgcaagctgccggaagccaatatcatcgagacggtggacagcattcgcgcccgcctgccggagctgcagcgcaccatcccggcctctgtcgatctgcaaatcgcccaggaccgctcgccgaccatccgcgcctcgctggaggaagtggagcaaacgctggtcatctcggtggcgctggtgatcctcgtggtcttcctcttcctccgctcggggcgcgcgacgctgatcccggcggtggcggttccggtttcgctgatcggcacctttgccgccatgtacctgtgcggctttagccttaacaacctgtcgctgatggcgctgactatcgctaccggcttcgtggtcgatgacgccatcgtggtgctggaaaatatttcccgccatctggaagccggcatgaagccgctgcaggcggcgctgcaggggagccgggaagtcggttttaccgtgctgtcgatgagcctgtcgctggtggcagtgttcctgccgctgctgctgatgggcggcctgccgggaaggctgctgcgcgaattcgccgttaccctgtcggtggcgattggcatttcgctggcggtctctctgaccctgacgccgatgatgtgcggctggctgctgaaaagcggcaagccccacgagccgacgcgcaagcgcggggttggtcgcctgctggtggcgattcagggcggatacggcaaatcgctgaagtgggtgctgaagcacagccgcttaaccggactggtgctgcttggcaccatcgcgctgagcgtctggctctatatctcaattcccaaaaccttcttcccggagcaggacaccggggtgctgatgggcggtatccaggcggaccagagcatctcgttccaggcgatgcgcggcaagctggaggactttatgaagatcattcgtgaagatccggcggtggacaacgtcaccggttttaccggcggctcgcgggtcaacagcggaatgatgtttatcaccctcaagtcgcgcgatgagcgccatgaaacggcgcagcagattatcgatcggctgcggaagaagctggccaaagagccgggggccaacctgttcctgatggcggtacaggatatccgcgtcggcggccgtcaggccaacgccagctaccagtatacgctgctgtcggacgaccttgcggcgctgcgggaatgggagccgaaaatccgcaaaacgctggcggcgctgccggagctggcggacgtcaactccgacagccagaataacggcgcggagatggatctgatctacgatcgcgataccatgtcgcggctcggcatcagcgtgcaggacgccaacaatctgctgaacaacgccttcggtcagcggcagatctcaaccatctaccagccgctgaaccagtataaagtggtgatgcaggtcgacccggtctacacccaggacgtcagcgccctcgataagatgtttgtgatcaacagcgaagacaagccgattccgctctcctatttcgccaaatggcagccggctaacgcgccgctgtcggtgaaccaccaggggctgtcggcggcgtcgaccatctcctttaacctgcctaccggcaagtcgttgtcggaagccagcgacgccatcaaccgggcgatgacccagattggcgtgccgtccagcgtccgcgggtcgttcgccgggaccgcgcaggtgttccaggagaccatgaactcgcaggtgatcctgattctggcggccatcgccacggtctacatagtgctggggatcctctatgagagctacgttcatccgctgaccattctgtcgaccattccgtccgccggcgtcggcgcgctgctggcgctggagcttttcgatgccccgttcagcctaatcgcgcttatcgggattatgctattaattggcatcgtgaagaaaaacgccatcatgatggtcgatttcgcccttgaggcgcagcgcaacggcaacctgccgccggaagaggcgatcttccaggcctgtctgctgcgcttccggccgataatgatgaccaccctggcggcgctgttcggcgcgctgccgctggttatctccggcggcgatggctccgagctgcgccagccgctggggattaccattgtcggcggcctggtgatgagtcagctgttgaccctgtacaccacgccggtggtctatctgttcttcgaccgtctgcggctgcgtttttcgcgaaaagtccctcaaccggtaagcgaataa

SEQ ID NO: 178955 - DNA, 897 bp, Klebsiella oxytoca
atgtataccatccgcgaaggttacgccccgtttcggcactatcaaacctggtttcgcgtttgcggcgatatcgatagcggactcacgccgctggtcgtcgcccacggcgggccggggtgcacgcatgattacgtcgatgcgttccgcgatatcgccctcagcgggcgagcggtgatccactacgatcagttaggcaacgggcgttcaacccatttaccgcagcagcccgccgacttctggcaaccggcgctgtttcttgacgaactggctaacctgctgctgcatctcaatattgccgataattacgccctgctcggccaatcttggggaggtatgctcggcgcggagcacgccgtgacgcagccaaaggggttaaaggcgctgattatcgccaactccccggcatcgatggcgctgtggctgcagggggcggcaaagctgcgggcgcagctgcccgccgacgtccagcagacgctgctggacaatgaggcggcaggaacgctggacagcgcggaatataaggcggcaagcgctgtattttatcaacgccacgtctgtcggctcgatccctggccggcggaagtgcggcgcaccttcgacgccatggatgccgacccgacggtttatcacgccatgaatggccccaccgaattccacgttatcggcagcatgaaagcgtggacgattatcgaccgcctcgcgcgcattacggttccggttctgctgctttccgggcgctacgatgaagccacgccggaagtggtacagccctttatggaccatatctccggcgccgagtgggtcatttttgaagcctcgagccatatgccgcacgtcgaagagcgcgagctgtgcatgaagacggtgaacgactttttaggccgagcgataccataa

SEQ ID NO: 178956 - DNA, 753 bp, Klebsiella oxytoca
atgcgactggagtttgaccaccccggcagcgcgcgggcggccagcctggatgacgcattcagcgggctttttcagcacacccggaggttgggatttgaggcggtgatttacgattacacgccggttccgcgttctctggaaggagaactgattacgccctcgctgctgaaaacgttcaacgtgccggaagatatgcgccagctatggtgcgagcgcggatattaccaggtggatccggtacagcactgcgcgctcgagagctgcgcgccttttgtctggtcctatcaacggccggacagcagcatgctgcgcgggaggctggacaatcatcccaccgcggtcaccgactatatgcgcgaacacaatatgccctgcggcgcgacggttcccctgcatctccccaacggagggttcgtgaccctcaccggcatccataccggccagcgtcaggagcgggaaatcagcgccaccctggcgcagctgatgctgcttgcctggcagtttcaggagtccgccttcccgctgttcgacagcactatgctcacctgccgtcacgtcaagctgagcaaccgcgagcgcgaatgcctggcgtggtccgccgaggggcttaccgccaaagagatcgcccgcaagctgcatcgctcggtggcgacggtgacgctgcatctcaataccgcggccaaaaagctgggcgccagcaaccgcgtgcaggcggtggtccgcgccctgcactaccgtctgctcgacagctaa

SEQ ID NO: 178957 - DNA, 900 bp, Klebsiella oxytoca
atgtggagcgaaatagcgcccgaccggtgccataacattgcggtggaaggctataacgtcgtggcctatcagtttggcgacggcgatgagaccattctctgcctcaacggcggaccggggctgccctgcgactatctgcgtgaagcccacgcttgtctgaaacagcacggctatcgggtgatcgcctttgaccagttggggaccggaaagtccgaccggccggatgacgccagcctgtggacgatggcgcgctatgtgcgtgaagtggagaccgtccgccggactttgggccttggtcaggtgcatctgcttggtcactcgtggggcggatggctggcgattgaagtggcattgcaccatcctggcgcaattcgctcgctgattctggaaaacaccgtcgccgatatgccgcatctggtgcaggagctgaaccgtctgcgcggggcgctggggccagaaaccgtcgcgatgatgcagcgctacgaagcgctcggctggctagaccatccggcctatcaggcggcgattacgctgctgaattaccgtcacgtgtgccgccttgacgtctggccagagccggttatccgctcgcttggggactggaatatgggcccgtatatcaccatgcaggggccgaacgaattcctctataccggtaatttaaaaaactggaaccgcagcgctgagctggcgtcaatccgcgtgccctgtttgatcaccagcggccagcacgatgaactgacgcccgcctgcgccctgaaaatgaagcaggggctggcgaacgctgaaatagccatttttgccaacagcagccatatgccgttttacgaagagccgcaggcttactacccggtgctgctcgattttctggcgcgccagcgcgacgcgggaggctgttaa

SEQ ID NO: 178958 - DNA, 939 bp, Klebsiella oxytoca
atgcatcgttaccgctttctgctttttcgcccgctacagctgctgccggttctgctgggtatcagcctgatcaccttcatgatggtgcgcgcgatccccggcgatccggcgcgtattctgctgggggtgcgcagcacgccggcggcgctggcccgcattcgcgcgcagtttgcccttgatgaaccgctgtgggttcagtacggctattttctgcgcaacctgctgcagggcgagctggggaagtcgattgtataccgggtggataccctgaagctgattgcctcgcggctggaaccgacgctgtggctggtgctcggcagcgttctgctggcggtagcgttgacggtgccgctggcggcgatagccgcacgccagcgcgggcgtctcgccgatcggttgattcgtctgtttacgaccgccgggctcggattcccggcattctggctcggcatcatgctgattctgctgttcagtatcgtgcttggctggtttccggtctccggctacggcagcgattttttagaccagctgcaccatatggttctgccgtgcctgaccgtggcgctggcgctgtcggcggtattgattcgcaacctgcgcgccagcctgctgatggagatgaatagcgactatgtggtggcggcccgggcgcgcgggcagcaggaaagacgtatcttctggcggcacgtgctgccgaactcgctggtgccgaccatcaatctgctggcggtgaatattggctggcttataggcagtacggtggtgattgaaagcgtgtttgctatccccggcctcggacagctgctggttaaggcgatttttagccgcgactatatggtggtgcagggcgtggtaatggtctttgcccttgccaccgtggcggtcagcctgctggcggatattctgaccgtggccctcgacccaaggataaaactatga

SEQ ID NO: 178959 - DNA, 846 bp, Klebsiella oxytoca
atgaaggcgatagcgaccttttcccgcctgcgtcagcgggcgatcccgcgtcagcaggcgctcttcgccgggctggcgatagtcggactatggctactggtcgcctgtctggcgccgtggatagcgccgttcgatccgattgcccaggacgcctcttccagtctgctgccgccgggcggcgcgcatctcttcggtaccgacaactttggccgcgacgttttttcccgcgtgctgtggggggcgcgggtcgatctgcaaatctgcctgctgggggtcctgttcccctttatgctcggcaccaccctgggggcgctggcgggctatatcggcggcgtggccgatgcgctggtgatgcgggttattgatatcgtgctggcctttccgtttctggtgctgatgctggcgattatcgccatcctcgggccggggctgagcagcttttatatggcgatggcgatggtgggctgggtctcctacgcccggctggtacgcgctcaggtactgacgctgaaacagcgcgattttattctggcggcccgcagtctgggctacggccatctgcggattttgttccgccatctgctgcccaatgcgctaaccggagccatcattttttcgatgtccgactgcgttctggtgctgctgaacggggcctcggtgagctatctcgggctcggcgtgcagcctcctaccgccgaatgggggattatggtggccgaagggcagagctttattaccaccgcatggtggataaccacctttccggggcttgccatcgtgctgctggcgatgggcttcagcctgctggccgatgggctgggcgataagctaggggaacgcgtatga

SEQ ID NO: 178960 - DNA, 975 bp, Klebsiella oxytoca
atgagcttgctgaaggtaaatcagctgacggtcatgcgcggcgaggatgtcgcgctggtggataacgtctcgttaacgcttgaagccggggagatgcttgggctggttggcgaaagcgggtcggggaaaaccgtgacctgccgggcgctgatgcgcctgctgccgggggccggactgcggattaccggcggtgaggttctgctggacggccgggatatcttgtccctcagcgaagggcaaatgtcggcggtgcgcggccgggaaatcggcatgattttccagaacccgaccagccatctcaatccggtgatgaccattggagagcagattgcagaaagtcgccgccttcactttgcggcaaaccgccgtcaggcgcgggaggatgcgctggccttgctgcgccaggtcggtatcccggacccgcagaatcggctcaatagctatccgcacgaattttccggcggtatgcgccagcgggcgatgatcgccgttgccctcgcgccggaaccgcggctgctgattgccgacgaaccgaccaccgcgctggatgtcaccgtgcagatgcagattctgcgcctgctcagcgatctgcgcgccgagctggggctggcggtcattatgatcacccacgatctcggagtggtggcgcaaacctgcgaccggattgcggtgatgtacggcggcaggctgtgtgaagtgggcggcaaacgcgaagtgcttggcgggcccctgcatccctatacccgcgggctcattgattgtcagccggccagcgaaggcgggcaggggaggttgacgatcatcgacggccagccgcccagcgccgaccacttcccatcagggtgtcgctttcacccgcgctgccgccgcgccgatgaggcgtgtcagagccagccattgctgcgttacgggcaggattgccatagccacgcggtggcctgccatcacattttgccagcacggcaggagggataa

SEQ ID NO: 178961 - DNA, 1035 bp, Klebsiella oxytoca
atggttaacgctcgctggccgctgcttgaggccgataatctttgcgtcaccttcccggtttccggcggcctttggcggccgaagcgagtcgtacacgcggtaaaccgggtcacgatgcagatctttcctggcgagacgctgggccttgtcggcgaatccggcagcggtaagagcacgcttggccgagcgctgttacagcttgaacgggttgccgacggcgaggtgcggttcgccggacagcgcattacccatggcttaaccagcgatattgcccgtctgcgccagcaaagcgcgatgattttccaggacccctatgcctcgttgaatccccggcagaccgtaggagaaagcatctccgaggtgctgcgcgtgcatcagaaagtcccgcgcgggcaggaagcgctgcgggttgcggaactgctcaccctggtcggcctgcgtccgcagcaggccagcgcgaaaccgtctcagctaagcggcggccagtgccagcgcgtcggtattgccagagcgctggccatggagccgcggctgatcgtggccgatgagtgcgtcgcggcgctggacgtctctattcagggacagatcgtcaacctgctgatggatctgcgggaaaagatggggctggcgattctgtttatcgcccacgatctggcgattgtgcggcgactctgcgatcgcgttgcggtgatgtatctcgggagaattgtggaagaggggccggcagaagcggtcttcactcgaccgctgcatccctataccgccgcgctggtctcggcgatcccggaaatcgacccggataaaccgctgccgaaaaatttgctggggggcgagccgcccagtcccgtagccgttccacaaggctgtgcatttcatccgcgctgcccttatgcgcaggtgcagtgccgcaccggcgcaccaccaccaacccggcagattgccgatcgcgcttatgcctgcgtgctcaacctcgcgggcgatgagaccgtttttcctttaactgggggatcttttgatgaagcacaggcagattaa

SEQ ID NO: 178962 - DNA, 1515 bp, Klebsiella oxytoca
atgaagcacaggcagattaagttactggcggcgagcgtttttctggcgctcagcgtggtgagtgaaatagctcaggcggccggcgtattgaccattggccgccgggaggatagtaccacgtttgacccgataaaatcggcgcaaaatgcggataactgggtcttttccaacgtctttgacccgctggtgcgggtggataaaagcgggacgaagctggagccgggcgtggccgagagctggacgatttccccggatggcaaagtctataccttcaaaattcgcgaaacccggttctcggacggtacgccgctgaccgccagcgatgcggcgtttagcctgatccgtatccgcgatgatgaaggctcgctgtggcgggattcctatagcattattgccaaagcggaagccacggacccgcgcacgctggtggtgacgctgaaatcgccttcagcgccgttcttatcgcagctggcgctgccgaacgcttcggtgatttcccagcaggcgatgaaggcggaaggcgaagaggcgtttgccgaaaagcccgtgggctccggcgcgtttagcgtgaaagagtggctgcgcggagaaaagatcgtactggtgaagaacccgaacttctggcaggcgaaaaacgtcagcctggatggcgtggagtggttaaccattccggacgacaatacccgcatgctgaaagtgcaggccggcgaacttgacgctgcgctgaccgtgcctttctcgcgcattgcatcgttacaaaaggatgccaatctgaaggtggagctggatccttctactcgcgaggaccatctgctgatcaatcattctcacggcgcgctgggcaaggtggaagtccgtcaggcgctggacttcgcgattgataaagacgcgattgtgaaaaccgtgacctttggctacggtcaggtggccaattcctatattcccgccggagcgctttaccactatcaggataatcttcgccggccatacgatccgcaaaaggccaaagcgatgctgaaagcggcgggcgctgccgacctgaagctgaactatgtggtcaatgccggggatgaagtcgatgagcaaattgccattttgctacaacagcagctggcaaaagccggggtgacggtgaatttgcaaaaagtcgacccgagccagagctgggatatgctggtggccggggagtacgatatatcggtgatgtactggaccaacgatattctcgaccccgatcagaaaaccaccttcgtgctgggtcacgatgccaatatgaactatatgacccgctatcataacgaccaggttaaagcgctggtggccgccgcgcgcgttgaaatggacagtaaaaagcgcgagcagatgtatatcgacctgcaaaaaatggctaaggccgacgtgaactgggtcgatctgtattacagcccgtaccgcaacgtcagccgcaaaaaaatcgacggtttttatcagaatccgctgggacgtttcttcctggaggataccgtaaaacactaa

SEQ ID NO: 178963 - DNA, 618 bp, Klebsiella oxytoca
atgaaaaaaataaacatcgctatcaacaccaggaatacctttctccgagagtcgttggttgccatagtcaatgagctcatcagccgcagcggtaaccttaaagccgctttttcttataagcataatgattttttagataaggatatcatcattgctgaagttcttcccggcgagatctatctgtgcaataccagtataaagaaccgtaaaaaaaacagttcggtgattatattgcacagctatgacaaacttccggaaaaggagctgatcgtcaactgccttaagggcgttatctttgtctcaatcaaagccgttaatatcgataagatgtttgaaatcattggccacgagctgaaaagaagtgaacttcttcctctgacgcaggagatggactcaccgctaatttgcactcactgcccgcataagatgttgtccaaatcgcaggtagccgtcgccaccggcattattcatggctttgatatcggtaaaatttctgctctcaacaaagtcacccccaaaaccatcacctggcacaaaagcaaaattatggaaaaatacagccttaataacaattatgactttttccagtttattaacttattaaaagagcgctggtaa

SEQ ID NO: 178964 - DNA, 699 bp, Klebsiella oxytoca
atgacattacgcgtcgcaatcatcgaagatagcgctgatttactcgacgagctgctggcttttctgcgccatcgcggcttcgatgcctggggcgtgcgcagcgccgaagccttctggcggcagctgcatcgcgatccggttgatattgtgcttatcgatattggcttgccgggtgaggacggctttagcgtgctggactatttgcacgaaattggccagttcggcctggtggtggtgaccgccagagggcatgagcaggatcggctccaggccttaaacgccggggccgatctctatctcatcaagccggtcaacttttccgacctcgcggagagtattcaggcgcttggctcccggcttcgccagcaaaaaccgacggagcgcgtcaacccggcgctatcagcagagcggccagcgccgtctcactgggtactccagaacgagcgccttgtggcgccgtctgggctggccctgccgctcacgcagcaagagtatcggctgctggaagtgttaatgcgtaaccgcaatgaggtctgcagcaaggttgacctgcacacctctctgtttaccgatgaaggcgaaccggaactgcaccgaatcgacgtcgtgatcagccgcctgcgccacaaggcccgccttcatggtatcaccctgccgattcgcgcgatttttggcaaagggctggcgtttctctcctga

SEQ ID NO: 178965 - DNA, 1971 bp, Klebsiella oxytoca
ttgaatcgtttgtgcgctttttatgatcttattcgcaggagccgcagcgcgcatttctgggcatggtgcggcgtcattatcgctctgcagataggggcgccagcccgcgcggaggtccgccagctgggtattgatattccggtctactggtacgccgacgccagcgacacgctgaccctcaacgcctttctttcgctccctgaagaggcgctaaaaacggcgccgcttatcccgtcgttcggctactcgacaaaggcctactggctacgtacttcgctcccggcggccttatttgctggcgaacagcgctggctgcagctcggtccgtcgtttgtcgatcgtttgaccgtgttttatcgcccctacggcagcgacagtccatggcgacaaaaagagtttggcgaccatgcgtctgcccgggataacgatctcgactaccgcgaaagcgttctgattttaccgcccccgccgacggcggctggctacgagatggtattccgtctccagagcagcagcaccctgattctgctggcgacgctctcctcgccgcaggagttcgtgcgttcggccacgctcgataccgccttctggagcttctattttggcctggcggtaattgccagcggcatcgccctgtggcttgccatcgcgctgcgtcggcgcctgctgtgggggatctgcctgttctcgctaaactatccgctcgtcgcggccctgcatggctacccggagtggttatttggcagcgccctgctgccggttcaggattatatgatcagctgcctgtcgctggtgagctacgccaccgcgctgtggctgcatagcgaagttttcgatctcaagaaaaatatgccgcggctgcatcaactgctgctggcggcgatcggtttaaacatcgttctgcaaatcagtattccgctgggcttttacggcctggcgatgcagatagaggccgggatattttttatcgccgcccctattctgttgatcacgtcatggatgctgtggcggcgcaaagcgattgatatcaatacgctgctgctggggctgctgccgccgatatacgtcgtctccgccgggctggcgctgctctctatccacggcgtcattccgtttcataatggggtctattccacctggcagtacgcgctgattattcatatcgttaccgtcctgatcatcgccgtactgcgggtgcgggcggaaaaccggactctggtgcgcaagcagcagctggcgcgagagctacagattgaacgcgaggccagcttccaccagcgccagtttatgggaatggtggcgcatgagttcagaacgccgctggcgatcctccaggccgcgctggaaaacctgcgcctgtgccccgcaacggtgacgcagagctcgcgcctcgaccgcatgcagcgggcgacaacccgtctggtacagcttaccgataattgcctggccgacgcccggctctcctcgagggacctgcacgccgacaggcaggatgcagcgttgctgccggtgatctatatggccgcgacggtcgtggatctttcgcttaaccattatctggatgtcacccttgaggggcaaactgtaggtccggactccccttcaccggtgctgtttattgatagcgggctactgtgtatcgccatcgccaacctgctcgacaactcggtgaaatatgccgcctccggggagataagcatcgagatttatctgcaggaaaaacacgtggaattacgcattggcgatcgcggtcccggcatcccgcctgaacaggtcgagcatattttcgagcgctatcggcgcggcgaaacggataccgcaacgccggccgggaccgggcttggcctgtatgtcgcccgacaaatcatccaggctcacggcggggacctgtggctggcagagaacacgtcggccggatgcaaatttgcgctcacgctcccggttaacggacagcagaaggacaaatcatga

SEQ ID NO: 178966 - DNA, 849 bp, Klebsiella oxytoca
atgacgctgctaccctggcattccccctacgactggcaatggatgtttcattttcttggcgcgcgtacggtgcagggaattgaaacttttgtcggcgacagctattgccgcagcttcgccctgaatggccacgccggactcatcacggtgacgccggatgacgccgcgcagggcatgcgggtgacgctttccgccgggctgcagccggtcgcggaggcatgcctggcgcgggttgcgcgcttatttgatttgtcctgcgacccgcagcagatcgccctgacgctgggaagccttgcgctgccaaggccggggcttcgtctgccgggctccctggatgcgtttgaacaagcggtacgtgcggtgctcggccagctggtgagcgtggccatggcggcaaagctcaccgggaaagtggtggccgctttcggggaaccgttgaccgacgcgccgggcttttatctcttcccgagcgcgcagcggctggcgcaggccgatccgctggcgctaaaggcgctgggcatgcccctgcggcgcgcggaggcgctgatccacctggcgcaggcggctatccgcggcgatctccccctcttcgcgccggagaatatcgacgccggaataaagcagctgcagacgctgcccggcataggccgctggacggcgaactatttcgcgctgcgcggctggcaggcgccggatatcttcctggcggatgattatctgattaaacagcgttttcccggcatgacgccggcgcggattgcgcgctatgccagccgctggcacccctggcgctcgtacgctttactgcatatctggtatacgcaaggctggtcgccggaggaggaatag

SEQ ID NO: 178967 - DNA, 132 bp, Klebsiella oxytoca
atgctgtttggccaatggctaaaccaaaaggaaatccctgatccataccggaaaagtgatgaagcgtttgcttcggtatatcagttgattgaactggctggcttacgttgggccgagaaattgggcgcataa

SEQ ID NO: 178968 - DNA, 2166 bp, Klebsiella oxytoca
atgtcatcagtaaaaagcagacctgtcgagaaagagacggatgaaattgatttagggcgtttggtaggagagcttatcgatcatagaaagcttattctatccgttactgcattatttacgcttatcgcacttttatatgcactatttgcgactcctgtctatcaggccgatgcgctcttacaggtagaacaaaagcagggaaatgcgatactcaatagccttagccagatgttacctgatagtcaacctcagtcagcgccagaaatagcattgcttcaatctcgcatgatcttgggaaaaacagttgatgaccttaatttacaggcccgagttcaacagaaatatttcccaatatttggtaaaggatggtcgcggctaaccggcaagagagcgggaagtgtgacagttagccgtctttatttaccatcggatggcggatcggatacccctagcctgacgctgacagtaaaggataaaaatcattacagtgttatttttaatgataagcaaatgtcaggtgaggttggctctttattggatatgaatggtattgctcttaaggtcgatcaaatagaggcagagccagaaactgaatttgtcatatcatatgtaagtaaactggaggcaatttcagatttacaagatatgttctctgtcgtcgatcagggaaaagatactgggatgttaaatctatcattaagtggcccagatcccctgttgcttgaaaaaatacttgatagtattagtaataactatcttgcacaaaatgtggctcgccaggcagcgcagaatgctaaaagtttagaatttcttaacgtgcaattaccaaaggtacgcaatgaattagatattgcagaggacaaactaaaccaatatcgccggcaaaaagactcaattgatctttctttagaggcaaaatcggttcttgagcagatagtaaatgttgataatcagctgaacgagttgacattccgagaatctgagatttctcaactttacacaaaagagcatccaacctataaagcgctgatggagaagcggaagactttacaagaagaaaaagcaaggcttaatcaacgtgtttcggcaatgcctaaaactcagcaggatatactacaattaagtcgtgatgttgactctggccaagcagtttatatgcagcttttaaatcgtcagcaagaacttagtatagctaaatcaagcgcgattggtaatgtacgtattatcgataatgctgtatcacaacccaaaccagtaaaacccaaaaaagtaatagtattatttgttggtattattttgggtgggatggtatcagtaggactggttttactgcgagtgttcttacgtcgcggaatagaaagcccggagcaattagaagagataggtataaacgtttatgctagtatacctgtatcagaaacgtttgtgaaaagaagtcagcaatctgttagactgaagaaaaaaacggaaataggatatcaagcttttttagcagtagaaaacccagcagacctggcgatcgaggctattcgtggtcttcgcaccagtctccattttgcaatgatggaggcgcggaacaacgttctaatgatctctggtgctagtcctaatgcaggaaaaacatttgtgagttctaacctcgctgctgttgtagcgcagacaggacaaaaggttctatttattgatacggatatgagaaaaggctatactcataaattatttaacttagataatgagaatggcctttcagatatcctttctggtaaaactgaattaaataaggcagtgaaaactgtttcaaatgccggttttgattatatatcgcgaggtgccgtaccacccaaccctgcagagttgttaatgcatcgcagatttggtgagcttattaactgggcaagcgggatttatgatattgttattctagataccccaccgatattagctgtaacggatgctgctatcattggtcattatgttggcacgactttattaatcgccagatttgaacaaaatactacaaaggaaattgaagttagttttaaacgcttcgaacaaagcggtgttatggttaaaggatgtatccttaatggtgtaatgaaaaaagctagcagttattatggctatggttataaccactatggttattcctatactgacgataaataa

SEQ ID NO: 178969 - DNA, 1428 bp, Klebsiella oxytoca
atgacactcctcagcaggaattttatagtcagtgtggcacttgccttatctgattttattagttttattatctcaatctatttggcgatcgaattattatcatttatgtcgagccaaaatgaatatattacacatctttcccaaaatgaggggtgggttgcattacattggttgttagcattttgctgtgtgggatggtacgccgttaggttacggcattatttttatcggaaaacattctggtttgaactaaaagaaatactccgtactttggtgatttttgccattattgaaattgccattattgcttttacaacatggtcatattcgcggtctctttggatgctgacttggctttttgttctgatttttgtaccaactgcacgcatgataactaagagcgttctgaataccttaagctattggcaacgagatacttggattattggaagtggagataatgcatttgaagcttataaggcgataagtagtgagcgaaacctcggtttaaatattgtgggctttatcgctagtgagggaggcactcctgcgggagaatatatcgaaggtattggtgtgctatcgaacgatataaactggttagcgacaaaagataaaaagactcagtttattgttgcagttgaatctcatcaaagtgaaatgcgtaatacttggttgcgtaattttatgatcaaaggttttcgctatgtatcagttattccaaccctgcgagggatgcctttagatagtacagatatgtcatttatttttagccatgaggttatgatttttcgtgtacaacagaatcttgctaagtggtcatcaagaattttaaaacgcttatttgatatagttggttctatatctataattattatactgtcaccagtattatactatattagcaggaaagtaaagcaggatggcgggccagctatttacgggcatgagcggatcggtaaagatggtaagtcatttaaatgtcttaaatttcgctcgatggtaaccaattctaaggaagtgctagataatttattagagactgatttagacgcaaaaaaagaatgggatgcaacatttaaattaaaaaatgatccgcgtattaccaaaattggtggttttttacgtagaacaagtcttgatgagttacctcaattatttaatgtactaaaaggtgagatgagccttgtcgggcccagaccaattataacagcagaactggaaaggtataatgatgaagttgattattatcttttaagtaagccgggaatgacagggttgtggcaagttagtggtcgaagtgatgttgattatgaaacacgagtctaccttgatgcatggtatgttaaaaattggtctatgtggaatgatatagctatcctatttaaaactattggagttgtcttaaagagagatggtgcttattag

SEQ ID NO: 178970 - DNA, 1251 bp, Klebsiella oxytoca
atgaaaataagtaaagacttacctttactctttatagcatcaatgcttaacccttttattgcaattttagggtccattttcttatttaataaaaaaaatgcgaaaggaataattattattctgtcgttaattgttttttttattacaataaaaataccaccttggcaagatttatatagacggttccttgatacatatatgctatacaatgaaagtacaacatatatggatgctattcgtggtcatgttgacatattattttatgtaaatgctttattattctataaaatagggctcccgttttattttattcccgctctttacagttctttatcgttctatcttttcgcgacaacaattttaaatgtgatcgggaaagaaaaggaggttacaggtgactatagaacaccaaatattaaactgttattcttttttgcagtaagttttgttgatataattctattagcctctacattacgctttttattctcagtagcattggttgtaagaggtgtatcattgcttttaattgaaaagaaaaccaacagaggaatcctcttttctttacttgcatgtattacgcattcggcaatgatattagtgcttatggcggtaataggttcattttttgttaggctaagcaaattacaaacaatattattagcgctgatattctatttcacgagttcaacacttttgccatatgtttttgctcattttaatccctttggattagctaattactttatcggtggttatgttgacactgatttatcagaatttggcaataatacaaacaaattaattgtgtcatcatataaaacgatagttttattattttgtttgtttttctatctgcgtcgagatggagagtataaaagatttgataattttatccgagtctttattgttatatcctgtattacatcagtctcagctacagcattcggtcgctatattttaggtgtgttgccatacttggctgttttaggattttgttattcttatagtgcgctgaaaataaaaaaatcagtgaggctaatcattttggcaattatttttcttaacgtagtatttgtgaacatttatttagagagaagacaaatagttatggcgggtttatggtccacgttatatgtaccttctgtgttattactttctaattatagtgcagatgattttagatcttatctgggtcaaattgataatgatggaaattggataaaggatcgtgtgagtaacgaaaaatag

SEQ ID NO: 178971 - DNA, 888 bp, Klebsiella oxytoca
atgaataacttagtaactgtatatatcacgactcaaaacagacctcaatttctgcatagagctttactttctctgaggcatcaatcatatcaaaattttgaggtgatagtatgtaatgatgcatcagatgcagtccatactaatgagtatgaaaatgtgataaatgcctttgaaaataactttcagggattccaatacattgtaaatgaaaaaaaacaaggtgcgtgtgttagtagaaataaagcaattcaagttgcgaaaggtgaattcatcactggcctagacgatgatgactatttccataagagacgattagaatactttgtaaattttagtaataaagataagttctcactaatttgctctaatgttaaattacttaatgatgacattctcaatgtccaatctgaaactctaagcgaaggaggaaaagtaattacctttaatgatatcaaacaatataattgtgttggtaatcaggtttttgtaaaaaaatctgtgattgatgctattggtggctttgatcctaacatgccagcttggcaagattatgatacttggttcagaataattaaaaaatttggtgatgcatataaattaaacgcatgtacgatgtatttggacgatggggctaatagagaacgaataacaacgagcagtaaggcttatttaggatatcaaaaatttatagaaaagcatcataatagcttaactgaaaaggattcaatcagcttgaaatatatggatatgcttaacagaaagcaaaatattcctcttctgagttttgaacttataaaacactcagaaattttcaagagagtgatgaaataccagatgacatatagattaccaaaactatatggtatatatcaaaaaataattaagtaa

SEQ ID NO: 178972 - DNA, 849 bp, Klebsiella oxytoca
atgaaaactatcatcttagtaatattatataataaatctatcaatcaatctgaaacattgatctcactgaatgataataagtttactaactatgatctaattatatataataatggacctaagctcttagacaaagatttattgtttgatgaactacaagctaagatattgtctgctaagttatgtcaagatatgtctaataagcccttgagtattatatataatgaatttctaagcaataacaaacaatatgagcgatttgtcatatttgatgatgatactgttattccaggatctttcttttcagacattgatgataataaagaaaacttggaaatagctcttcaactgcctttgattaaatcaaaagcgactaatgatatatattatccagcagctgataataaggtggtttatagcgagaaattatttgaaaatgacgaatatgtattatctattggctctggattaatcatctatcctatattgattgatttgtttaataaaaatggtattactttattcgatgaacggtttgctttatatggagttgactttagcctctttagacgtatacatggtttcaaaaataaaggtgaggtaattaatatacaatgcgcttcatttttatggcactcactctcaaggtctgatgcgaaagatagtctatggcggcaaaatgaacgtttaatcgatactgttttaagtatattacattattcaccggtttataaagttatatatagcatatcaaaattattaattcaaaatatagtgtggttcaatgtgggtaatgttaagctaattatcaaaattttaataatgaaaaaacatcctaggtgcaaataa

SEQ ID NO: 178973 - DNA, 1056 bp, Klebsiella oxytoca
atggtaaaaaatattatgcttttattattttttttctctttttcagcttgtagtaactctaactttacaccaggaaaaccgtggtatgataataacggcgaggtcatcaatgcacatggaggaggcgtgttgaaatttaaagataaatattattggtttggtgaagcaagaacagatggaagaaaaaatactgggaaggtaagcgtatattcttccgctgatttatataattggcataatgaaggaattgctttagatctttcatcaaaattagcaatgatcgctgtggaaagacctaaagttatttataataaaaaaaataaagagtttgtaatgtggttccatgaagagttgggaggtaaatataacacaggtaaagccggtatagctgttgcaaaaaaaatcacaggaccttatgttttgtataaagatttttggcctaatgcatcagtggatccaatttatgtggataaacatgatattaataataaatattatcataataatgtttttaaagctgataatgattttaaagacaatttctcccgtggacagatgtttagagatatgacactttttgttgatgatgattctactgcttatgtaatttatgagtcggaggggaattactcgatacaaattgcagaattggatgagagctataagggcgtcactgggagatattcaagagttttagtaggtttaatgaacgaagcccctacgatgtttaaatacaaaagtaaatattatatgattacatctgggctaaaagggtttagtcctactgacgcacggagttcctatagtgataatatatttggaccgtgggtttctttaggtaatcctgttcgctctgatgatgttgataatattaaaaaaactttttcctctcaaggaaccttcgtaatacagaatgttggctctaataacacatatatttttatggcagatcggtggcaaagtaatagtttgaaagatagttcatatatctggttaccaattgagtgggataacaatattccggtaattagatggaaggctaattggaaatattga

SEQ ID NO: 178974 - DNA, 1416 bp, Klebsiella oxytoca
atggacagcaaagcttcatacgatggaaatatccaggcggcagatcccggaatggcagaattagggatcggtctggtccccccggtccaccagacccagaaaccggtccagctgtttttcgtctggtgcgccgcgaatattggcattcttggcgtcgtttacggcgcggtgattgtgtcgttcggcctctcattctggcaggcgattctggccgccgtggcgggcgtcgcctcctttgcgctggtcggcatcaccagcatcgccgggaaaattggtcgtacgacgacgctaaccctctcccgcgtcatttttggcaaacgcggtaatatcgcccccaccagcttctgttgggtgaatctgatgggctgggaagcggtcaatatcattaccggcacgctcaccctcgttgcgctgtttgccgccatgggtcttgaagagagtctgaccaccaccgcgctgtcgcttttcttgtttggcgggctgaccgtactggtcagcgtgctcgggcaaaacgccgtgctgatgatgcaaaaatggatcacccggatctttggcgccatgacgctgctggtggtgatctatttactcttcaccgcggactggcaggccatcctcgcgctgccttcaggcagctggctgaccggctttctgcctgccgtgtctattattgccgcaggcaccggcatcagctgggctatcgccggcgccgactatagtcgcgatcagcgccctgactccggggaaaagcctatttttctcgccgtggtcagcggcgccgccctcccgctgctgttgctgatgctcaccggaatactgcttaccgcgcagatccccgatctggcctccagcgagaaccccatttcagcgatcggtaaactgctgccttcgtggatggcaatcccctatctggccgcggctaccgccggggtcgtgaccatcgccgtgttgagcctctattccgccagccttaacctgttaagcatggggattaagctacagcagcgttccgccgtggccctcgacgccgtgctggtgctggggattgccctctacgtgctgtttgtctcgaaagattttctcgggccgttcatcgcgtttttgattttctgcggcgtatttctggccgcctgggccgccatctttatggtcgatttttatcggctgcgccgccgtgccggatatcctgaagctgatttattcagggagagcggcgcaaaccgtaccgcgctgggctgctggattgtcggtgcgctggcaggattgatggtctctaaaaccggttttatcgacggacctttcgcggtcggtattttcgcggactccagcctcgggttattcgtctcttttattctgagcctggcgctgtatctcgccttcggaacgagaaagggggcctgccgtgacaatcagcgctga

SEQ ID NO: 178975 - DNA, 1584 bp, Klebsiella oxytoca
gtgaccaccaaccctacaccgacaaactggttacctttggttgtcttatgctgcgcacagtttctggcttccgccgataacgtgacgttaagtatcgccacgcaggcgctaatgaacgatctgcacgccacgcttgggcaggtcagtacagcgaataccatgtatccgttgattgcgggcacgtttatggtggcaggcggaatgctggggtgtatctggggttggcgaatgctgtttcgcatcggctgcctgatttttatcctcgccgaagcctgcgcctttttttcgccatcgatcgcgctcttcacctggggggcgcgtctgaccgccgggataggcggtagcctgatgatccccgccgtttttggcctgatctctgccctgtatcagcagcgacgacgggttgccgcctttggcgctctgggcgcctccagcggcatttcattcgcctgtggtccaattgtatgcggatatttgctggaccacgtcggctggcgcatcgcgtttgcctcgcttggcctgctggcgctgcttatcctgctctgctccgtcatcatcccggcatcagaaaacaaacgcgccgctatcgccttcgataccccgggctttctgttaggcaccctggggctgttcctgacgattttcggtattctgcgcatcccggtctgggggctggttatgcccttcgacccggcagtgagcgttctcggcctgagccctgcccctttcgttattctctgcggcctgatggtgctggtgatgatgctgcgctgggaacgtcattttgaagccactaccggccacgctctgctccccgcggttttcctgaaaacccgcctggtgcgccacgggctctatctcaccggttggatattttttgcctacagttcggctatttttaccgtggtgagttttgcgcagattgttaaaagcgtatcggcgatggaaacagggctgctgatactcccttttgcgatatgtctcgccgcctgttcgctgggcctgccgctgtttattcagcagcgaaaccctcgccgccagtgccagatggggctgacggcgggaatcgccggcgctctggttgccgccgcggcgctgcacgtgacggggtttacccctgtactgatggcgtcagggctttgtttaatcggcgcagggatgggcaccatcgcggccaatgccccgatactggtcaccactggcgcagggaatcggcacgccgaacagtccggcggcgttcaggccgcctcgcgcgatatcgggcaggcattaggaatggcgttaatcagtaccgtcatgctcacggtgttaaccttcctgatgaaatatcaggtacagcacgacccggcaatgggcctggccgcccgacaggccatcggccatctcacgtttatcccctggacgagcgatcggactttccatcagcttatccagacacaaaacctggcgcccggcgatctctctggccttcttcagcattatcaacagagccggatgctgagcgcgcgttacgggctgctggcgatggcgatcgtgacgtctctactgctgatccgccttcgccatctgccgaagtcatcgtag

SEQ ID NO: 178976 - DNA, 1677 bp, Klebsiella oxytoca
atgacgacaaattcagtaattaactctcccggcatgtcgcgcaacgcggccgccgatacggcgatgaaatggttgccgctgctggtgctgtgcctcgctcagctttcgacatccggcgataatgccacgctgagcatcgctaccggcgcgctggtcaaagacctgcacgcgtcaatggatctcatcagcatcgccaacgcgatgtattcgctggccgcgggctctctgatggttgccgccgggatggccgggcttatcgtcggctggaagaaaaccttccgcatcggctgcgcgctgctgtttcttgccgagctgaccgcttatttctcaccgaacatgctggtcttcacctacggcgcccgtctgctttccggtattggcggaagctttatgatcccttcggtgctggggcttatcgccagtaactataaaggccgccagcaggcgatcgcctttggcgctatcggcgcagctagcggcgtctccttcgccgccggcccgttgatttgcggcctgctggttgaccacctcggctggcgcgccgcgtttgccgctatcgccggcctgtgcatcgttatcttcagcggctccttcctggtccctacgccggcaaaacctgaacgcaaagtggtgttcgatctgccgggcgtcgtcctgaccgtaatcggcctgttcagcgtgatcctcggcttcctgaaagtctcgagctggggtctgtttacgccgtttaacgcgccgttcaccgtcatgggtcttagcccggcgccgttcctcgtcctgtttggcctgatcgtgctggcgattatgctgaagtgggagcgccatcgcgaagccaccaccggcagcgcgctgatcccgctgtcgttcctcgcaacgccgcaggtgcgtaacggtctctatctgacggcgtttatcttcctcgcctacggttccggtatttttgtgaccgtgagctttgtacaggtggttgccgggctgaacggtattgaaaccggcttgctcattctgccgtttgcgctgggcgtcgtggtcttttcgctggggctgccgatcgtctggaaaaacgcgaatccgaaacggatgtgccagagcgcgctgctcatcggcacgctgggctccgtgttgtgcatcttcggcttcggcccgtccgatttcagcatgatcgtgccggtagggatgtgtctgattggcatcagtatgggcatcgtttccgcctattccagctatattgttaccagcgccctgccggcgcgcgatgcgcagcagtccggcggcgtgcaggcgacttcgcgtaacgtcggccaggcaatcggcgtagcggtttgcggtatggtgatgctgacggcggtcaccatgacggtacaggatatggccagccacgacgcttcgctaagccaggatacacagcagaaggtggcaaatctttccgttattccttatctcagcgatacgggtttctcaacgctgatgctggaccagggcgtgaatcagaaggatgtaacggaactcaaccaggtctataaaaccgcccgcctgaaagccacgcgagcgggtatggtcgccaccgcggtcatgacgctgctgtttttattcgggacgcgcaatcttcccgtccgcgccaggggttctgatgacgcagcaggagaagagccgcgtgcgaagaagtcgaaaatctga

SEQ ID NO: 178977 - DNA, 1647 bp, Klebsiella oxytoca
atgtcagcatcagaaatcacgatttttgccgctaaaaaaatcattacgatgtgcccgaaccgcccggagaccacccatgtcgcggtgcgcggcgaccgtattttaggcaccggcacgcttgaagaactcaccggctttggcgaataccagctggacgagacctttgccgataaagtgttaatgcccggcctgattgaagcccactcgcacgtcaccggcggcggtatgtggcaattcccctatgtgggttactacgatcgcccggaccataccggtaaagtctggaaaggctgccgctcttttgacgacgtcgtcagcgcgctgcaggcggtggaacgtgaaatgacagatccgcacgcgccgctgatcgcatggggcgttgatcccatttatttcggcagcgaaaagctgggtcgcgaacatctggaccgcgtctcaaccacccgtccggtcgcggttatccatatgagcatccacctgatgggcgccaataccgccgcgctgcacgactgcggaatatttgacgactgccagattgaaggcgtggtgaaaaatcaggacggtacgctgcacggcgagctggtggagttcgccgccatggggccaatcctgaataaatatggtttctgggacgaactcaccaccgaaatcgccatcgccaatttcggccaggaagcgtttcgcgcaggctgcaccagcgcagccgatatgggtctgaccgatttcagcaatcccgagctgatgaccaactacatccgcatgacccgtgaagaggacttcccgattcgtctgctggtggcctacggtcctcctttcgtcaaaaaacccttccaggaagcgctggatttcgccccggacgtcatgcgtcacgggcacgaaaaaatgcacttcggcccgatgaaaatcttcctcgacggctctatccagggtgggtcaggacggatgctggagcccttctattatctggatggccacaacggcgcgtggaacgccacgccggaagaggtggagcagcaggtctacgacatcatgtcccgcggctaccaggttcactgccactgtaacggcgacgaggcctcggaagcgttcattaaagccgtcgagaaaaccctgaatcgtattccggcagtgaaccaccgcgcggtgatgcagcacgcgcagatgctgcgtgaagatcagttcaaacgcatcaaagagatgggtatgggcgtgaactttttcagcaaccacgtctattactggggcgatcagcactacagccaaaccatgggcccggagcgcgcaatgcgtatggacgcctgcggcagcgcggtgcgccacggtattcctttcgccttccacagcgattgcggcatcacccccatcaacccgctgttcaccggctggtgcgcggtgaaccgcctgacggcatccgggcgcgtactgggcgaagcggaaaaaatctccgtcgatcaagcactgcacgcgatgaccctcggcgcggcatggaccatgaaaatggaccatctgatcggcagcatcgaatgcggtaaatatgccgacttcaccgtgctggaagaggatccgcaggccatcgagccggttcagcttaaagatgtgaaggtctggggcaccgtgctgggcggtaagaaacagcaaatccagtaa

SEQ ID NO: 178978 - DNA, 1368 bp, Klebsiella oxytoca
atggtgaatacgcccggtcttcacggggctaaactacccgcgacgcgtgagctggcgcggctgctgggggtttctcgcaatacggtagtctcggtctacgagcgtttatatgccgatgatttaattgaaacccgacagggcgacggcacctatatacgttatcgcgggcaggaggttgacgaaggccccgacgtccctgaaattcctgccttacgcgtcgactcgcgcctgccgctgacggcgcggtttaatcgccattttgtgcacgatggcccgccgaaggcttttcgcatcggcatgcccgcgattgaccatttcccgtttgatacctggtcgcgcctgcaaaaccgcttctggcggcggcgacccattgcgcaaatgggttacggcgttccggcgggcgatttacaactgcgcgagcttatcgccagctatctgcatacctcgcgcggcctgaagtgcgatccggctcaggtgattattacccttggcgcacaacaggcgataatgctctgttccgcgctgctgctgcgcgccgggcaggacgtcattatggaaaacccctgccactgggcggcggcgggcgtattctcctgccttggtttgaatattaaagcgattaacgttgatgatgaggggcttcagacggcgcagttgacggattatcccgacgcccggatggtctacgtgagcccgtcatgccagtacccgacgggcgcgacgctctcgctatcgcggcggatgacgctgctggagtgggccagaaagcatcaggcgtggattatggaggatgattacgacggcgagtatcgctataacggcacgccgctgatgccgctcgccgcgctggataaccgccatcgggtgatttatatcggttcgttttccaaagtgatgtatcccgcgctacgcctgggctacatggtggttccgcaacagctggtggaaccgctgaacctgctgcgtacgctatccacccgccagccgccaatgaacgaccagcaggtgatggcgagctttatttcggaggggcatttccagccccatatccggcgaatgcgcagaatcagtaaaagccgtcgcgatctgctgctggccgaatggaatcagcatctgagccatattggcgtgatgccggaagtggcctcggggctacatgcggcgattacgctggatgatgctgaaacagaaacccgtctcgttagccaggcccaggcggcaggcgtggaaattacgccgctgagcgcattgtggatccccggtacgcctgaaagccgccatcattacggcgtggtgctgggatttgccggcgtgatggaagcggatattgtgcagtcgatacaggtgctaaaaaaatgctggcagtga

SEQ ID NO: 178979 - DNA, 909 bp, Klebsiella oxytoca
atggcggaagcggcaacccctcacgatgcggtattcagaacttttctctcccgtgtggaaaccgcacgggattttatcgagatccatctgcccccctcactcatgcaaatttgcaaactggataccctacgccttgagtcaggaagctttattgaagatgatctgcgccccttctacagcgatatcctctattctctggaaacgaccagtggttgcggctatgttcacgttctgattgaacatcaaagttcgccagataaattaatggcgtttcgtttaatgcgctatgccatcgctgctatgcagcggcacatagaagaagggcataaaacgctacctctggtgatcccgattcttttttatcagggacggcgaagcccctatccctggtcgctggactggctggagaactttgccgatccggatactgcgcgccagatttactccaccgcctttccgctggtggacatcaccgttattcccgatgacgaaatcatggagcaccggagtatggcggccctgacgctggtacaaaagcatatatggcagcgcgatatggccgagctcgtcgacaagctcaccagcctgctgttgctggaacagatgagcagacaacaaattaccgtactgataaaatatatggcccaggcgggagaagagcaggatgttcggccgctattatatgagctggcacagcgggtgccgcaacatggaggtgtactgatgactctggcagaaaagtggcttgaggaaggtatgcagaagggcattaaggaaggcataaaagagggcaaacgcgctgcgcttcttaacgtcgcaaaggccatgctcgagcggggcattgatactactgcggttatggaaatgaccggtctgacgtccgacgatttgcagcagctgcgtcattaa

SEQ ID NO: 178980 - DNA, 312 bp, Klebsiella oxytoca
atgaaaataatccccatcatttttttgctaacgacgttccctgccgcagcgctcgccagcgaacaggataacgctcaggcctgcctctcatgggggatcggtaaaatggcgcaggatccgcaaagcgagcggttcaaggatctgaccgtcaccgatatcactaccgaacgctatgatgagaagataggcagccagcatatcgcgacgcagctagccgccacgctggaaaaagaagggaacccggtagggaaaatgctctgtttgctggaaaacgagcgaccgctgtacgtttacttcagcgatgcccggtaa

SEQ ID NO: 178981 - DNA, 1353 bp, Klebsiella oxytoca
atgccaaataatcctatgatcctgaaccttttcttcttcaatccccagggtgactaccgcttttcctggcgtcacccgcaggcgccggagaaggaaattttcagcctcaagtactatgccgatctggcccgtaaagcggaggccgcgacgctcgacgccatttttatcgccgaccatatcgctatctgggacacggtgcccagcggcttaacccactacgctaacgcccggctggagcccatcactctcctctcggcgctggcggcggtgacggaacatatcggcctgatgggcacggcgtccacctcttataacgagccctataatctcgcccgctattttgcctccctcgattttctcagcaacgggcgggccagctggaatatcgtcacttcatggctggaggaggaggcggccaacttcggccttgaccacctgccgcagcacggcagccgctaccagcgcgccggtgagtttattgatgtggtcactcagctgtgggactcgtgggaagacggcgcggtgcgctatgacaaagccagcgggctgtttgccgattccagcaaggtgcatcatcttgatttcgcgggcgagttcttccgcgtgcgcgggccgctgaacgtccctcgcccgccgcaggggcacccggtcctggtgcaggccggctcgtcggaggcgggtaaaaacctcgccgccgcctggtcagatatgcattttgtgtttatcaaatctatcgctgaggggctggcctaccgcgaagagatgaaccagcgtttgcgcagccacggccgggatccggcgcatttcaaaatcatcgccggcgttttaccggtggtggtgaattcaaacgcggaaaaggaagagcgccagcggcttaacgagcagctaatgagcgaccagatggccatcgacctgctctcttcctatctgcgcatggatttatccgcttatcccgtcgaccaaccgctgccgccgctgccggaggaagagacctttgatgggatccgcaccgccctcaggctgattcgtgattacgatccgcagttgtcgatcctggcgttgggcaagctgctgttgcaaagctccgatagctggctgctcatcggcagcgccgaggagatcgccagcgcgctgacggaaacctggcgcgccggcgccgccgatggttttaacctgatgttcccgctgctgccgggggacttcgaccgcttcgttgagcaggtggtgccgattctgcagcgcagcggcgcgatgcgggatcgctatccgaccggcacgctgcgcgagaagctgggtctgccggtcgtcgaaaaccgcttcgcccgcggggatggcaaaccgctggcttcatag

SEQ ID NO: 178982 - DNA, 900 bp, Klebsiella oxytoca
atgaagcagctatttagcatttccgcgcatcgccgccgcttgcgtctttcggtattcaccgcgggattattaagcttaagttttaacgccctggcgcaggacgtcactattggcggagcgaatttcaccgaaagttcaatccttgccaatatttacgccagcgcgctaaagaaaaacgatattgcggtgaaaacccgtcttaatctcggcaatcgcgagattattattccggcgctgcagagcggcgaaattgatattgttccggaatatctcggtgccctgctgaactattatgacggcaaaacgctggctaccagccagagcgacgttagcgctgagttagccaaagcgctgccggcggactttacgctgctcaccccctccccggcctcgtccattaccgcctgggccgtgcgcgcggaaacggcaaaaaaatatcacctcagcaagctttccgacctgcagcccgtggcccatcagctgactatcggcggcccgccggaattcccggtacgcgccctgggcctgccgggtcttaagcgcgtctacgggcttgaatttaaggcggtgaaatctctggatatgggcgggccgctgacccgtctggcgctgaactccggcaaaatcgacgtcgccacggtcgtctctactcagggcaacctcgcgaaagaggattgggtggtcctggaggatgataagcatgagcagccgagccagaacgtggtgccgctggtgcgcaaagccagcctgacgccgaaaatcagcgaagtgctcaatgaggtctccggcaagctgaacaacgccgcgctgatcgaacttaaccagcaggtcgatctgcagcataaagatccggcggcggtggccgaacagtgggtcaaaacgcacctcaacggcaactga

SEQ ID NO: 178983 - DNA, 669 bp, Klebsiella oxytoca
atggatatcctgcaagcaacatttcactggttattacaaccgcagcactggacaggcgacgcgggaatattacttcgcctgcgcgagcatctttattatgtgctgatcagcatcgccgttgcctcggcgattgcgctgccgctggggattattctcggctactggcgcaagggcgcgtttgtgattattaatctgtttaatattggtcgcgccattccctctttaggtttaattcttttatgcattattgtgtttggctttaatgatattccggtctttaccgcgctggtggcgatgtcgattccgccgatcctcaccaacgcctgggttggcatttatcatgccgaccgtcaactgtgcgatgcggcaaaagcgctgggcatgacgccactccagagcctgtggcagctgcggataccgctcgccgcgccgctgatactcgccggcctgcggaccgcgctggtacagctgatcgcgaccgccgtcgtcgccgcctacgccggccttggcggcctcgggcgctttctgatcgacggacttggccagcgcgatattccccaggtcattgccggttcgctagtggtatcgctgctggccatcggctgcgagctgcttttttcattactctcccggcgcatcgtcccggcgccggtcacgcaaataaattaa

SEQ ID NO: 178984 - DNA, 630 bp, Klebsiella oxytoca
atgattgactggccatggatcctcgacaacaaaatcatgatcggcgaactgctctggcagcatgtacagctggtgatcgtttcgctgtttttcggcaccctcttcaccggcgtattgattagcctgacgctgcgctggcccgcggccgcccagccgctgatctacctgtgcgggatactgttcaccatcccgtctctggcgctgtttattctcttactgccgtttaccggactgtcgctgatgacctcaattatcggcctgacgctctactcgctgctgatcctgctgcgcaacgttatcgccggaatagagaaactcccggcgacggtgctggagtcggcgcgcgcgctgggctatacccgctggtttcgttttgtcgatatcgagctgcatctgctgctgccctcgctgttcgccgggctacgcatcgcttcggtgacgctggtcgggctggtgacggtcaccgccttaattggccagggtggtctcgggcagcttctgttagccgggtttaaccagaactttgtcacgcctatcgcggtcagcctggtgctcagcgttgcgctatcactgctgttggattcgctgattgcccgcgtcggctattggctaacgccgtgggcccgctaa

SEQ ID NO: 178985 - DNA, 1077 bp, Klebsiella oxytoca
atgaaaatgtataaaaacacactgcttgcggtggttattcttacgtccgcagcagcccctgcggcagaaatatataataaggatggcaataaattagatctatatggtagcattcgtgctcgccactattttagcgatgatacaaccattgatggcgataatacctatttcagattaggtattaagggcatgactaaaattaatgacgagctcaccggctttggtcaatgggaatataatattcagggaaatcgcgcggaatctgacggttcagacggtaccaaaacccgctatgcttatgccgggttaaaatacgctgacctgggttccatcgactatggaagaaattccggcgtgctctatgacgtcgccagcataaccgactatgcgccaatctttgacatcatgaccgatagctataccgatggctttcttacgggcagagccaacgggctgttaacctggcgtaacaccaacttcttcggcctgaacgataaccttaaattcgctctgcaatatcagggaaagaacggatccgggagtaacaatagcagccgttcagtctatggttctaacggtgatggcgcaggcgcatcggttagctacgatttcgactggggcggctctctgctggccgcttacggcaactcacgacgcacggcggaacaggaggctttggcctacggtggtggtaagcacgcggaaatgtgggctaccggttttaaatacgattctggcagtctttatgcggcggtaaaatattctcaaggatataatattacacctatcaaaaattatggctatgcgaataaaagtgaaaacttcgaagtttatacccgctatgtttttgataacggcattattcccggcattggttggttccagtcgcgaggaaaagatatcgagaatagcggtgatatctatttaatgaaatatctcgatattaacctgtcctggttcctgaacaagaatttctttacctatgtcgattacaaaataaatcagctggataaaaatacgcctttcagtatttcgaccgacgacacttttggcgttggcatgacctggcagttttaa

SEQ ID NO: 178986 - DNA, 1395 bp, Klebsiella oxytoca
atgaactacttatcgattattgaacgtacgattgaacaacaacgtgaacgtattaccgccgttagcgacaagatctgggaatttgccgaagtgcgctatgaagaagcgcagtctgctgaactgatggcgcaagcgcttgaagacaatggctttcaggtcacacgaaaggctggcggcatcgatacggcgtttgtcgccacctacggcagcggcgaaccggtcattgcttttctcggcgaatatgacgccctgccctcattaagccagcaggccaattgcgatattttttctcccgtcgtcgctgcgggaaacggccacggctgcgggcataaccttcttggcgcaggtgcgctggcagctgcgctagcgaccaaagcctgtatgcaagaactcggcctggcgggaacggtgaaatactttggctgcccggctgaagaaggcggcggcggcaaggcctatatggcgcgtgccgggctgtttgacggtgttgacatcgcgttcacctggcacccgtgggacgagaatctggcctacaacgccagaatgcttgcgactaaccaggtgaaatatctgtttaaaggcaaaagcacccacgcagcattcagtccgcacatggggcgcagcgcgcttgacggcgttgagctgatgaacgttggggccaatttcctgcgtgaacatattattcctgaagcgcggctccactacgccatcaccaacgcgggtggcaacgcgccaaacgtggtgcagtctgaggcccacgttctgtacaaagtacgctcacccaaaatgcaggaagttcgagaaatcactcagcgcgttgacgatgtcgctcgcggcgcggcgctgatgaccggaacggaagtcaccattgaatttgatgcggcctcggccgatcttatccctaacgtcaccctcgccagcgtaatgaacgaagagttgctcaaaactggcccggtcacctttagccctgaagaaaaagccttcgcccaggcgatacaagagaccttttctgaggaagaaaagcgcaaagtcgccaaaaggggccgcacgctatccgaagacatcacgccgtttcgccaggaacctgatttcctcaatggctcaacggacgttggtgacgtgagctggctgctgcctgtcggccaggtctatatcaccacctgcgcctggggcaccccaccgcactcatggcagatggttacccagggaaaaacctcctacgcccacaaggggctgctgctggctggtcgtgtgatggccgcctcggcaattcgcgttctcaccaccccggcgatcatttcacaagcgaaagaagaacaccttgagcaaagagaccacgaagagtaccgctcgctaattcctcaagacgcaaggccacgctcactaaacagataa

SEQ ID NO: 178987 - DNA, 1260 bp, Klebsiella oxytoca
atgctcagtgctacattcaagaataaaaacaatttgataatcctgatattgtttctgtgttgggtcgtagggtttatcgataaagccgctattaatattgcgatcattccaatttctgctgattttggactgggaagtgaacaaaccggtatggtcatcagcggttttttccttgcctattcgctcacccagcttattggcggctaccttgttgaccggatgggcagtaaaaccatcttaaccggtgcggttgccctgtggtccgttgccaccgctatgggcggaatggcaagcagcgttttcacgctggcagttacgcgtttttttgtcggaatgggggaagcggttttccctgcaggaagctccgttgtcatcgcccaaaggtttgaaagaagcaaaatggcgcgcgctaaatcatttctgcaatctggcgcatcggtcgggttcgccgttggctcggtggtcgtatctacgctgattacctggtacaactggcgaatcatgttctttgttttgggtatcgctggcctgattctggctttctgcctgtggtgcgtcctgcgctccagcgccccggacaccgctggcgttacgatgccacatccatccgcagcgcacggtagcatccccgaaaagcagcgtttgttgaatattattcgccgcccattaacatggcaaatcgccgcctgctacttctttaccaatattgtattctggggtttgcagtcctggctgccatcctattgggtgaaagtcaaagggatgagcatggtatccatgggcgcatggtcaatgctgccgccggccctgggctttgcctcatttttgttttgtgggtggctgctcgacaggtattttcagggtcgcgaaaaatacctgattgcgattggctcttctgtctcagcgctgttcatctggctgatgtttaacgcctcttccgtgccgattgcctttgcctggctttcgctatctaacatattccttaacgccatcagcatcagcgtgttcgttaccatcatcaaacaatttccaaaggcctcagtaggtaccgcaacggggtttattaactcaattgcgcagataggttccttcttatcgccgcttatgatcggatacttactgaagctgacccaacaaaactacgccaccgctttcctgtcgatcattgcctgcgcggtcatcacctgcctgatcgcactgtccattactcattctactggcgcggctcaggccgaagcgacatctaatgtatcccaataa

SEQ ID NO: 178988 - DNA, 2052 bp, Klebsiella oxytoca
atgtacaatcctacatttgataataattctgactcattacgtaaatccttgagtgttgtgtctgtacggtattttccacagtcgaatgtgcatattgaacattccgatttacgttacgactcgctaatggcgggagatacgtccggttttgaagataaaaatgaatcgtacatattaattcgtgaaagggatggtgattgcatggtgattaatattatttgcctgcatattgaatcattgcgtattgccatccggacggaacacgcgctactaagtgaagaaaatgtcagagtatttctcagtgaagtgaaaatactacttttaactgaagtaattaattatcaaaatacgatgttcacgaagattagcgacaatacctggcatctcgcctccgggctttcgcatgaggttgttacgcagcatgttattgacggcgcgctgaagactattgcatatagcgatgcggcaatctttcgtatttatgatgataaaagcgaccggctggttccggttgcaatgacaggatttaaaaataattattatgattatattgtaggtctgcatgaatcgatatccggtaaagtgtttaaatcaatgcagacggcggtcttaaactcacgggaagaaattaaccacagctttacggcaagctcttccttgcgtgatgaaatacttaaagataacccgctggcaacttcgcttatttgcgtgccggtatacgatcagtcggcatgctatggcacattgactatgctttcatttagccgacagtttgtatttaactctttagcaaaatcgctactcgaaacctattcatcgcaggtggcgctggcctggcgcaatgcccgtctctatgatgaacgcacggaaagtctgcgagtcgttgaagacctacgcaatcagctgcaggcgcaaaacacgttgctgaacgcgagcgtggatttttataatttgatggtctcattgtctattaaatacaatagactaggtgattttatcgcggcgatcgcttcacatctctctttggatcttaactatctggatgtactgggaaaccagagtttaagtgaatcgcttagtgcattgacgtggagtcacttgcgcgcctctgctggcgaaaaaaatgtgtcgacaatcattgtgggcggtagagactattgtctgcttcctcttgaaaatgaggggcgcttgctcgccttttttatcatgcgaaacccggacttaaatgaacatgtatcatcgattatctccagactaaaagagtttgtgataatggagatcgtcaagcaggcgggttctgttgcgctggagaataaaaagaatctggatcttatcgctgagattatggtgattggattgacggcagaaagtgaaatatcatttgcccgcaggggcatcgttctccataaatcagtactgtgcattaagctaacagcaccacaagtgaccagcgatgaaatacactatttgtcgacaatcaacgttctcaccagagacttcgcattgaaaaacgtttttcattattttgacgctgacgtgataacgttaatcatatttgatatgaatgagcaaaagcttttcgctcttgaggaaaaagtaatcgcgcgctatcagcaggacaagctttataaagtgggggtgagttcagttctgcgacgccaggaggttatcaccagcattaaacaagctaatactgcgcttgatgttcttaaaaccagaaataaaagtggcgtaatgagttttcgtcattcaggtattgatcgcttgtttataaaacatacccctgaggaactaaaagactttatcctggatctgttttcacctgtgctggaagagaataacaaacctggtatattgttggtgacgattatctgttttttaaaaaacaggcagtccgcagtgaatactgcagaggagatgggcattcacgtcaatacgctgtatcaacggattaagaagttcgaaacgctaaccggtttaagcctcaataatgcagacgaatttattatgattgccctgacgtgccatatgagtcggttttatcttagttaa

SEQ ID NO: 178989 - DNA, 1446 bp, Klebsiella oxytoca
atggctttaacagattcatcgcgggacgaaacgccccggcaggaacgctctggctcagggaggatttcggggctagcgctgctggttgccagcgcattttttatggagtttcttgatggaacggtgattgctactgctctgccggatatggcaaaggcgtttggcgtcacagcgatagaccttaatattggtatcagcgcctatctattaactctggctgtgctgatcccggccaacggctgggttgcggagcgttttggcgcacgaaacgtctttactctggcactgtgcatttttacgctttcatccctgctatgcggtctgacccataatgtgactgagttcgttctgatgcgtatccttcaggggattggcggcgcgatgatggttcctgtaggacgtctggtcgttctgcgcaccaccccgaaagatcggcttattaaggccattgccacgctaacctggcccgcgctggtggcccccatcattgggccgccgcttggtggatttattaccacctacgccagctggcactggatcttctttctcaacgtccccctggggctgatcgccattgtactatcattgcagatgatgccaaaccaatcggctaacgaacgcagaccgtttgattttacaggatttgtcgccactggcgtaacgatgctgtgcctggttgcagggctggaaatgctcagccaacaaaacgttagcctgatcggggcggcagtaaccattactgttggcttcgctaccctggtctggagtattcatcatcttttgaccagtaaaacgccgctgattggcctgtcatcgctctcagtcccctcatttcgcatcagcatgcgcggaggatttatccttcgtgcgacgattagctcagccccctttatgctgcctctgatgtttcaggttggtttcggaatgaacgcgtttgaagccggctcgatggtactggccgtttttgcaggcaacctggcgatgaaacccgctacaacgccgctaattcgctattttggcttccgtaagctgcttatcggtaacggtgtcgcctgcgtattgacgctgttactctgcgcactgctaacgcctgactcgccgcatctgataacgctggtgctgttgttcctcggcggattaagccgttccatgcagttcaccggtatcagttcactggccttcgctgaagttccgtcacaggagatgagctcagccaatacgctgttcagtacttcacttcagctcgccagcggactgggagtgacaatgggagcgctaagtattcgcatgggcagcatcctcagtgaggatcttggttacgccactgttcctggaatggggtttcgcctgggatttgtcgtcatcgcgattatcactgcgctcggagtgtatgatatgacgcggcttgcgccgaatgcgggtatcaacgtctcacagaaaaaatag

SEQ ID NO: 178990 - DNA, 3213 bp, Klebsiella oxytoca
atggatacattgctagttggcagtgaggtgccccgcgtagacgggctcgccaaggtgacgggtaaagcggtctacggcgatgacattattatgaacaatatgctgtatggcgtttgtcgctacgtggatattcctgccgggcgcatcgatgcgctcgacctgtcggaggcggaaaaagtgcccggcgtcgtgcgtattgccacctggaacgatatccccggtcagcgcaagctgggagcgattgttcccgatcatccgccgattatcgacaaggagatcgcctaccgcggcgacgtggttgccgtagtggcggcggaaacctacgaggcagcctgcatcgccgtcgataaaatcaaaatcacctacaccccgtgggagccgattacctccccggaagaggcgatgaagcccggggcgcgccttattcacagcgaactcgatagcaatatcatcaaccgccaccacacggcgaagggcgatatcgatgccggttttgccgcctccacccatatttttgaacgtgagtatgaggtggggttccaggagcacggctatattgagccggaatcgattaccgcctacctggacaataatgaacagatcatgaccatcgaagggtcgattcagaacgctcaccgcacccgggcggtgattgccaaatatctcgacctgccccaggcgaaggtcaacattaagcgctccgtcctcggcggctccttcggcggtaaagatgacattatcgataacgtctcctgccgcgcggcgctgctggtgcacctgaccgggcggccggttaagatctcctataaccgcgaacagtcgatgcgcgagagctacaagcggcatccttataagatgaaataccgcattggcgtggacgacgacgcgcgcattcaggcgattaaaatcgacattatcgccgatggcggcagctactgcggccagacggtgtttgtcacctggcgcagttccgtgcaggcggcgggcccctacaacattcctaacgtgcgcgtcgatctggtgggcgtttacaccaacaacaactatacctcggcctaccgcggctacggcgcgccgcaggtcattttcgccaacgaatcgctgatggatgacgtggcgggcgaactgggcctgtcgcccgttgagttccgcctgcgcaatattctcaagcagggcgataccagcatggccgggcaggtcttcagcgagcataccgtctccgcgcgggaggtgctggagaagacgctgctcaaggccgaatacgaggccaaacgcgagcactacaaaaagcttaacgcggaaggcggcccgatccgctacgggattggcttcgcgctgagccatcgcggctgctctctgggggccgaggggctggatgcgtcctcggcgctgattcaggtgaatgccgacgccagcgtgaacatctccacctcggtatccgagaacgggcaggggctgcagaccaccatgtcgctgctggcggcggaagcctttggtattgggctcgaccgggtgatgtttagcgaaccggccaccgcgatgatcgccgacggcggctcaacggtcgcttcgcgcggtaccctgatgggcggacaggcgattctgagcgcggcgaacaaaattaaacaacgcatggcggacgccgtcagggaaacgctgaaagcgcagagcatcgacgatatcgcctggcaaaatggcaaggtgttcaaccgccacagcccggagctgagcctcagcttccagcaggtgtgcgatatgacccgggctaccggggcaaacctctccgcctacggctggcacgtggcgccgaatattcactgggatgaagagaagggctgcggcagcccctatttcacctgggtgtacggctgccagctggccgacgtggcggtggatatgcgcaccggcaaaatcaccgtcaataacgtcgtcgccacccacgatgtcggtaaagtcattaacccggttggttttagcggccaggtctacggcggcgtgctgcaggggatgatcggctacggcatgctcgaggatttcaacaccgagcacggcgtggtgaaatcggaaaacttcgatacctatctgctgccgaccatcaaggatatgccgcacattgatatcattgcggtggaaaactacgataaagcgggcccgatgggggcgaaagttatcggcgaaccggtacttgaactgggcgctgcggctctcaataacgcggtgagcttcgccatcaaccgccccaaccgaatcctgccgctgaccctcgagcaggttcgcctgggttataacctcaagaagccggagcgccagagcgagcagatgctggagtctggcgataagaaacaggttcaccgcctcaacaccctgtcgctgagcgtcccgcaaaccctgaaagaggccctgacgctgatggccgagaagggggcaatgcctattgccggcggcaccgatgtgctggtgcaggcccggatgctgtccggcgaggtgccgcttgtcaacatcgccggactggcggagctgaaagagatttttgacgttgagggcgggatctccattggctccggcgtctgctttaccgacctggttaagcatccgttgattcagcagcgctatccgctactggttacggcctgtaaaaccgtcggctccctgcagctgcgcaaccgggcaacgatcggcggcaatatcgtcaacgccgccccgtgcgcggactccatgccgccgctcattatctacgatgcggaagtagagctgcgcagcgcgcgcggaacgcgccggatgccggtcagcgaatttgtcgtgggcggctatcgcacccttcttgagcctgatgagctggttgtccgctttatcctgccggcgccgacgcagcagccgctgatcaatcgctatctgcagcttggccggcgcaatgcgttgaacattacgcgccagagcttaaccgggcagtttatggtcgataagggcgtggttcgcctgtgccgtctggtggatggtgcgctgatggccaaaccgcagcggttgactgaggttgagcaggcgctcaccgggaaggcgttagacgccgccgccattgactatgcggccggggtactgcacgacaaggtagaaaaagccatcggcggacgctggtctgcgccttataaagtccccgtatttatcgatatgttccggcagatgctgcaggaagttatgacagagcagaaaaaataa

SEQ ID NO: 178991 - DNA, 1785 bp, Klebsiella oxytoca
atgataccgtccaaagcaccctccattttaatgcagattcagcctacaattcaaaagtttgcaaggatgctatccagcgtgctgcagctggaggtcgagattgttgataacgaattataccgggtcgccggaactggcgcttatagtaaacagattggctataaattaaattcaaattcacggcttctgcgttacattattgaaacacagaccgagaaggtcgttacccattcccgcttcgaccccctgtgtaaagactgtaacaataaggagaaatgcgaagagaaagcctttcttggcacgccggtgatgtatcacgaccgctgcgtcggcgttattagcctggttgcgctgacgcgcgagcagcaggaacgtataaatgcgaatatccaggagttttctgattatgttcgtcatgtctcaaccatattcgtttcccgctttttgcaggagcgggcggtcggcgacaatatccataaaatatttttaaccatgatcgaaaatatggatcagggcgtactggtcgtgggcaacgatcaaagagtcaaatttgccaaccaggccgctttgaaaataatgagcgtcactcagggacaggtgattggtaagtcaatccagtttcagccgttgaccttcgaagataatttcaagcacggccatatgcagcacattatctcctttgacgatcgcaaggagctcattatcggccagctgcacgcggtgcaggatcagtggttatttttaatggcgttccatcagtcgcactcttcggccgatttcagctgcgggcaggaagggccgcagattgaggcgatggtgggggagtgtcgacctatgcggcagcttaaaaagctgatcagccgcgtggccccgagcccctccagcgtgatgattgccggtgaaagcgggaccgggaaagaggtggttgcccgcgctatccacaagctcagcgatcgccacgcgaagccctttatcgcgattaactgcgccgcgatacccgagcagctgttagaaagcgaactgtttggctacgtgaagggggcgtttaccggcgcatcggcaaacggtaagaccggcctgattcaggcggccaatagcgggacgctgtttcttgacgaaattggcgatatgccgctcactctgcaggccaagctgctgcgggccattgagtcacgtgagattcagccggtgggcgccagccatccggttcaggtcgatattcgtatcatatccgcgaccaatcaaaacctggaacagtacatcgcggaagggaagttccgcgaagatctctactatcgtctgaacgtgattccgctgcgtctgccgccgctgcgcgaacgtcaggacgacattgagctgctgattcactatttcctgcatctgcataccggtcgtctcaatctggtttatcccggcgtcgcgcaggacgtgatcgatttccttaagcgctatcgctggccgggcaatattcgcgaactcagcaacctgatggagtacctggtcaacgtggtgccgtcgggagaaatcatcgatatgtcgctgctgccgccgaatctgttaagcagcggagaagcggcgagccaggcgacgtcgtcggcttcagcgccagcgaccctcactcaggaggagaacgtgacggcgctggaggagatggagcggcagatgatccgcgatgcgctctctcgctacagtaataaaaagcaggcggcggatgagctgggcatcggcatcgccacgctgtatcgcaaaataaagaaatattcgctggcggcgggtcagaactga

SEQ ID NO: 178992 - DNA, 171 bp, Klebsiella oxytoca
atgagcaatgacaagaaaacgcaggtgtattacgttaaaccgtctcgcgctgacattgttcgctcggtagcaacgtcaaccgccgttgagacggggcagtcttctgagaagatcgaagcttcgcttgaagcgacgcgcaaaaagttcgcccatcttcgtcttgctgtttaa

SEQ ID NO: 178993 - DNA, 618 bp, Klebsiella oxytoca
atgagccgataccgtatctctggcagtgaaggacaatatgagaaaaactccgatgagcaagttctggcaaataagctggggattgctgattctggtgagatggacgaagcggagcttgtgctgttagagaagctctatcactgcatttttgaagagcagtttccagcagggcagatcaccgttgctttgctgaaaagctggcatcgccgctggctgggaaacatctatgagtgggccgggcaagaaaggactgtcaatatcagcaaagggggctttatgttcgcgccctctgcacagttgccaaaactaatacacgaattcgacgctaaataccttgcccgatatacaccatgcactaacatgagcgaagaacagatcatagaggctattgctgtaacccatgtagagctgatactcatccatccattccgggaaggcaatggacgtttatcacgacttttagctgatgtgatggcagttcaggggggacacaggccgctggattatcaaagctgggagcaaaacaaagccgaatatatttcggctatccacgcaggtatgtcaatggactacggcccgatgtgttattgggtcggtactgcgttaagacgtgattaa

SEQ ID NO: 178994 - DNA, 756 bp, Klebsiella oxytoca
atggacaaaattgatgagaaatacgttgcagtaattattcctatgtttaatgctgagaaaacaataatcagggcgatagaatctgtattttcacaaacatatactcaatggcatttgtatattataaatgattgttctacagattcgtcattagaagtggtgatggatagatataagagtgataaaataacaataattaataatgatcaaaacttaggggcggctgagtcaaggaatgcagggctaaaatattcaaatgaaaaagttatagcttttttggatagtgatgatcaatggcttcctgataagttagaaaaacaaatggatgctatatctaaagggtataacatggtgttatcttggtatttctatgatattaataataaaaaacacgtaattaagtttaattcaaatgttttgaaaaaaaatagttttttaaaaaaacattttcgcgtatgtttttcgtctgtatgtattaaacgttcaaatgaaaatatatatttcaaagatcaaggtcatgaggattttatttatttagcaagctactttgatatttataatgaagcgtatgtaattagtgaaggtttggttaattattatgttttaaatgattcactttcggccaataagaaaaatgcagtgaaatggcattttcatatactgactcaaagatacaaggggaacccttttaaaatactatattttttttcttggtatatacttaatgctatttcttttttaatagtaaatcgttaa

SEQ ID NO: 178995 - DNA, 1446 bp, Klebsiella oxytoca
atgggactcttatcaaacactaagtgggttgccctctcgcagggaataaaagtgggtgtacagttattaaatattgtggttttagcacgactaattccgcctggcgagtatgggcttatggctatggcattggttgtaactaattttgctggattggttagagatttagggactgcagctgcaattatacaaaagaaaaaccttgaggaaagaactattaatgcaatattttggctcaatgtgtgtatgggatgtacgatagctatcatcatcctcatctcatcgccgataatatcattgatatttcatgaacagaggcttgttctaattttatgtttattatcattaagctttcctcttgctagtacggcatcagcgcatcttgctttgttagaaaaaaaatctagatttaaggagattgcttttattgaaatatcgtcatcagtaattgcagtttcaattgctattatactggcttatagaggatatggtgtttatagcttggtttttcagagcatatttctctcattgatgtcaactattcaattttggtttaaatcagaatggaggcctaatacaaaaattataattgatttgcaagagataaaaaaactgatcggttttagtgggaatttgaccatttttaactttattaattatttttcaaggaatgctgatagtattattatcgggcattttttatcatcagctattctgggtgcttactcactagcttatagaattatgcttttcccagtgcaaaatatgacttttgttgcttctagggctctctaccctgtatttagtgagtatcaagatgataacgaaaaattaaaaaaaacttattacaatactttgtatcttatattgctccttgtattcccattaatgaccggtcttgctatgttaagtgagccatttattaaacttgtttttggggatagttggcttttaacagcctcaattttgacttggcttgcacctactggtatcgtacaggctgtactaagtacctcaggcactatttttatggctaagggtaaaacatatatattaatgaagctaggttttttggggatgattcttcaggtctcttcttttattttaggtgttcagtttgatattgtgacttttgcaaagttttatttcattgcaaatattttaaacttcatccctgtgatgtggtgtgtattaaaaattttagatgggtctcttctcgaatttttttcgaagatttataagttaatgttgggttctgccctaatgattttttttattaagctattaatgaataatgtcacttttctacagaatattgatggttttgtaaaattaatttcacttagtctactttcttttttattttatatcatatcaataatgctaattgataaaagattgtttaaagcatttaataagcacatgaaaataaatttttttaattag

SEQ ID NO: 178996 - DNA, 1407 bp, Klebsiella oxytoca
atgtccaagcaacagatcggggttgtcggtatggcagtgatggggcgtaaccttgcgctcaacatcgaaagccgcggttataccgtctccgttttcaaccgctcccgtgaaaagaccgaagaagtgattgccgagaatcccggcaagaagctggtcccacattatacagtgcaagagtttgttgagtcgctcgaaactccacgccgtatcctgttaatggtgaaggcgggcgcaggcactgatagtgccatcgactctctgaagccttacctggacaagggtgacatcatcatcgatggtggtaataccttcttccaggatacgattcgtcgtaatcgtgagctttctgctgatggttttaacttcattggcaccggcgtgtccggcggtgaagagggcgcgcttaaaggaccttcaatcatgcctggcggtcagaaggaagcttatgaactggttgctcccattcttaagcagattgcagctgtcgctgaagacggtgagccgtgcgtaacttatatcggtgctgatggtgctggtcattatgtcaaaatggttcacaacggtattgaatacggcgatatgcagcttattgcagaagcctacgctttactgaaaggtggtctggcgctttctaatgaagagctggcgcaaacctttaccgaatggaatgaaggtgagcttagcagctatctcattgacatcactaaagacatcttcaccaaaaaagatgaagagggcaaatacctggtcgacgtgatcctcgatgaggcggcaaacaaaggtaccggtaaatggaccagccaaagctctcttgacctcggtgaaccgctgtcactcatcactgaatctgtattcgctcgctacatctcttctctgaaagatcaacgtgtggctgcttcgaaagttcttaccggaccgcaggctaagagtgcaggcgataaagcggagttcgttgagaaagttcgccgcgctctgtatctgggcaaaatcgtctcttacgctcaaggtttctcgcagctgcgcgcagcttctgatgaataccactgggatctgaactacggtgagatcgcgaaaatcttccgcgccggctgtattattcgtgctcagttcctgcaaaagattactgatgcctatgagcagaatgccggtattgccaacctgctgctggcgccatactttaagcagatcgccgatgattatcagcaagccctgcgcgatgttgttgcatatgctgttcagaatggtattccggttccgacgttctctgcggccatcgcctactacgatagctatcgctctgcagtcttgcctgctaacctgattcaggcgcagcgtgactatttcggcgcgcatacctataagcgtaccgataaagaaggtgtgttccatactgagtggatggaataa

SEQ ID NO: 178997 - DNA, 1065 bp, Klebsiella oxytoca
atgaagatccttgtcactggtggtgcaggttttattggttctgcagtcgttcgtcatatcattgaaaacacctccgatgaagtacgcgtaatagattgcctcacctacgccggtaacctggagtccctggcgccggttgctggtaataaacgctactcgttttctcagacagatatcactgatgccaaatctgtggcagaacagttcagcgatttccgtccggatattgtgatgcacctggccgcagagagtcacgtggaccgctctatcgacggacctgctgcctttattcagaccaacctgattggaactttcaccctgctggaagcggcccgccagtactggtcagctctcgatacggcgcagaagcagactttccgcttccaccatatttcgactgatgaagtctacggcgacctgcacggtaccgatgatctgttcaccgaagagaccccgtacgcgccaagcagcccgtactctgcctccaaggccggcagcgaccatcttgtccgcgcctggaaccgcacctatggcctgccggtggtggtgaccaactgctccaacaattacggcccgtatcacttcccggaaaaacttattccgctgaccatcctcaatgccctcgctggcaaaccgctgcccgtctacggcaacggagaacagatccgcgattggctgtacgtagaagatcacgcccgggcgctatacaaagtggcgacggaaggccgcagtggtgaaacgtacaacatcggtggccataacgagcgtaaaaacattgatgtcgtgcgcaccatttgcgccattctcgataaagtggttgaacagaagccgggtaatatcagccagtttgccgatctgattacgtttgtgaaagaccgtccgggtcatgacctgcgttatgccattgatgcggcgaaaattcagcgcgatctgggctgggtgcccgaagagacatttgaaagcggaattgaaaaaacggtccattggtacctgaacaacacgacctggtggcagcgcgtgctggatggctcctatgccggtgaacgtcttggcctgaacaactaa

SEQ ID NO: 178998 - DNA, 870 bp, Klebsiella oxytoca
atgaaaggtattgtactggccggcggctccggcacgcgtttatatccgatcacccagggtgtttccaagcagctactgcccatttatgacaagccgatgatttactacccggtttctgttctgatgctggcgggaatcaaggatatcctgattatcaccacgccggaggatatgcccgcatttcagcgtctgctgggtgacggttctcagtttggggtgaatttcagctatgcgattcagccgtcgccggacggtctggcgcaggcctttatcatcggcgagaagtttatcggtaatgatgcctgtgcattagtcctgggcgataacatctactttggtcagagctttggccggaaactggatgcggcggccagcaaaacatccggagctacggtattcggctaccaggttctcgatccggaacgtttcggtgtggtggagtttgatgagaactttaaagcgctgtcgattgaagagaagccgctgaagccgaaatctgactgggcggtgaccggactctatttttatgacaccgatgtggtggcaatggcgaaggaagttaaaccctccgcgcgcggggagcttgagatcaccacgctgaaccagatgtatctggatcggggtgacctgcaggttgaactgctgggccgtggttttgcctggctggatacgggaacccatgacagcctgattgaggcctctcagtttatccataccatcgagaagcgtcaggggatgaaagtagcctgcctggaagaaattgcttatcgcaagcagtggctgagcgcggaaggggtggcggtacaggccgaacggttgaagaaaaccgagtacggtgcttacctgaaacgtctgctgaatgagcattaa

SEQ ID NO: 178999 - DNA, 891 bp, Klebsiella oxytoca
atgaaaattttactgattggcaaaaatggtcaggtgggctgggagctgcagcgtgcgttgtccacgttgggcgaagtggttgccgtggacttttttgataaaacgctgtgcggtgatctgaccaatctggaagggatcgcgcagacggtccgtacggtaaaaccggatgtagtggtgaacgcggctgcccatacggcggtggacaaagcggaaagcgagcgcgagctttccgatctgctgaacgaccggggcgtggcggtgctggcagaagagtcagcgaagctgggggcgctgatggtgcactactcaacggactatgtgtttgacggtcagggaagccactatcgtctggaagatgaggcgaccgggccgctgaacgtgtacggcgaaaccaaacgagccggggaaatcgcgctggagcaggcgaatccgcggcatcttattttccgtaccagttgggtatatgccacccgcggggcaaatttcgctaaaacgatgctgcgtctggcaggtgagaaagaggcgctgtcgattattaacgatcagcacggtgcgccaaccggcgcagagctgctggcggactgtacggcaatcgccattcgtgaagaacagcgcaaccgtgctgtagccgggacctatcatctggtggccagcggggaaaccagctgggcggagtacgcggaatttgtttttgaggtggcgcggtcgcacggcgcagagctggcaatcaaagcagtaagcggtatccccaccacggcctacccaacgccggcaaaacgtccgctgaactcacggctgtcgaatgagaaattccagcgtgtatttggcgtaacgctgccggactggcgccagggcgtggcgcgcgtggtaacagaagttctgggcaagtaa

SEQ ID NO: 179000 - DNA, 555 bp, Klebsiella oxytoca
atgaatattattaagacagatatccctgaagtgctgatttttgagcctcgtgttttcggcgatgcgcgcggttttttctttgagagcttcagcagtaaagtatttgatgaagcagtagggcggaaagtggagtttgttcaggataaccactctcagtcgcagaaaggcgtgctgcgcggactgcactatcagcttgacccgcatgcccagggcaaactggttcgctgcattgaaggcgaggtgtttgatgtggcggtcgatatccgccgttcatcgccaacgtttggtaaatgggtgggtgcggtactgagcgcggaaaacaagcgtcagctgtggattccggaagggtttgcccatggcttcatggcgttgagcgaaacggttcagtttgtgtacaaggctacgaactattatgcgccgcagtctgagcggagcattatctggaacgatccggagattaatatacagtggccggagattgcagactgtacgctctctttatctgataaggatttgcaggctcataccttaaagacagctgaagtatataaataa

SEQ ID NO: 179001 - DNA, 1167 bp, Klebsiella oxytoca
atgaaaattactatttccggtaccggttatgttggtttatcgaatggcatcctgattgcgcaaaaccacgaagtggtggcgctggatatcattcaatccaaagttgatatgattaaccaaaagatttctccgattgtcgataaagagatccaggaatatctggcggaaaaaccgttgaattttcgcgcgacaactgacaagcatgatgcctatcgtgatgcagattatgtcattatcgctacgcccactgactacgatccgaaaacgaactacttcaatacttcgaccgttgaagccgttattcgtgatgtcaccgagattaacccagacgcggtaatgattattaaatccaccatccccgttggttttacgcgtgatattaaagagcgcctgggcattgataacgtcattttctctcctgagtttctgcgtgaaggccgcgcgctttacgacaacctgcacccgtctcgtatcgtcattggcgaacgttcagaacgcgcggagcgttttgctaatctgctgaaagaaggcgcgattaagcaggatatcccgacgctgtttactgactctaccgaagctgaggcgattaagttattcgccaatacctacctggcgctgcgcgtagcctactttaatgaactggacagctacgctgaaagccagggtctgaacagtaaacagatcatcgaaggcgtgtgtctcgatccgcgaatcggtaatcactataacaacccatcctttggctatggcggctactgcctgccgaaagataccaagcagctgctggcaaactacgaatctgtaccgaataacatcatcggtgccatcgtcgatgctaaccgcacgcgtaaagattttatcgctgactctatcctggcgcgcaagcctaaagtcgttggtatctatcgcctgatcatgaagagtggctccgataacttccgcgcttcctcaattcagggcatcatgaagcgtatcaaggccaaaggcatcccggtcattatctacgaaccggttatgcaggaagatgagttctttaattcccgcgtggttcgcgatttcgacgcgttcaaacaagaagctgacgtgattgtctcaaaccgaatggctgaagagctgtcggatgtcgctgacaaagtgtatacccgcgatttgttcggtagtgactaa

SEQ ID NO: 179002 - DNA, 1005 bp, Klebsiella oxytoca
atgaaatttttagtaactggagccgcaggattcatcggctttcatacctgcaagcgccttctggaggcgggtcatgaggttgtcggcctcgacaacatgaacgactattatgacgtcaatcttaagcaggcccgtctggatttactgcaatctccactgttcagttttcacaaaatcgatctcgcggatcgtgaaggtattgcccggctttttgctaacgagaaatttaaccgagtgatccatctcgccgcgcaggcaggggttcgctactccctggaaaacccgttcgcttatgctgacgctaacctgattggttatctgaacattcttgaaggctgcagacacaacaacgttgagcatttgctctatgcctcatccagttcggtctatggcctgaaccgtaaaatgccgttctctacggaggattcggttgatcatccggtttcgctgtatgccgccaccaagaaagcgaatgaactgatggcgcatacctactcgcatctttatggcattccaaccaccggactgagattcttcaccgtctatggcccgtggggccgtccggatatggcgctgttcaagtttacgaaagccatgctggaaggtaagagtattgatgtctacaactacggcaagatgaagcgcgacttcacctacattgacgatatcgttgaggcggttgtaaggatgcaggacattatcccgcagcctaatccggaatggaccgttgaaacgggttcaccagcggatagctcggcgccataccgggtgtataacatcgggaatagctcaccggttgagctcatggattacatcactgctctggaagacgctctggggatggtggcggagaaaaatatgatgccgatacagcccggcgatgtgctggaaaccagcgcagataccaggccgctgtatgatgcggtgggattcaggccacaaacgacggttagccagggggtgaagaacttcgttgactggtataaagcctattacaaggcgtag

SEQ ID NO: 179003 - DNA, 768 bp, Klebsiella oxytoca
atgaagtataatctagggtatttatttgacctgcttgttgttatcactaataaagatctaaaggtacggtataaaagtagcgtgtttggttatttatggtcaattgccaatcctttgctttttgcgatgatctactattttattttcaaactgatcatgcgtgttcagatacctaattataccctttttctaataacggggctgtttccctggcagtggtttgcaagctcagcaacaaattcacttttttcatttattgctaatgcgcaaattattaaaaaaactgtatttccgcgctcagttatcccgctcagtaatgtcatgatggaagggttacacttcttgtgtaccattcctgtcatcgtcgcttttctttttgtatacggtatgcgtccttcgctttcgtggctgtggggaataccgctcattgctatcgggcaggtgatattcacctttggcatatccataatcttttcaacgttgaatctattttttagagatctggaaagatttgtgactctcggtattatgttaatgttctactgtacgcccattttatacgcatccgatatgattccggcaaaatatagctgggttattgactataaccctctggcgagtatgattttaagctggcgcaacttatttatggatggggttttaaactatgagcatatttcagtattatatttgacgggtatagtgctgacggttatcggtctgagtatttttaataaattaaaatatcgctttgcagagatcttgtga

SEQ ID NO: 179004 - DNA, 741 bp, Klebsiella oxytoca
atggaaccagtaattgattttaataatgtgacaaaagagtatccactttaccatcatattggctcaggtattaaagatttaatatttcatcccaaaagagcatttcaattactgaagggccgcaaatatcttgctattcaggatgtttcttttacggtcggtaaaggagaggccgttgcgctcatcgggcgaaatggcgcaggtaaaagcacatctttggggctggttgccggcgtgataaaacccacaaaaggatcggtcaccacgcgtgggcgagtcgcttcaatgcttgagctgggcggcggctttcatccagaattgacggggcgcgagaacatttttcttaatgccacacttcttgggttacgccgtaaagaggtgcagcagcgaatggagcgcatcattgaattttccgaattaggagaatttatcgatgagccgatccgcgtctattctagcggtatgctagcgaagcttggtttttctgttatcagtcaagttgagcctgatattttgattatcgatgaagtgcttgccgtcggcgatatttcttttcaggccaaatgtatcaagacgattaaagagttcaaaaatcgtggcgtgacaatattgtttgttagccacaacatgagtgatgtggaaaagatatgcgatcgggttgtctggatcgaaaatcaccgtctgcgggaaatcggttctgctgaaagaatcatcgaactttataaacaagcaatggcctaa

SEQ ID NO: 179005 - DNA, 1893 bp, Klebsiella oxytoca
atgaatagtattaagatctatacctgtcatcataagccgagcgcattccttaatgcatcgattatcaaaccattgcatgtaggtaaagccaactcctataatgatatcggctgtattggcgatgatacaggtgataatatttcgtttaaaaaccctttttactgtgagttaacagcacattattgggtttggaaaaatgaatctctttctgattatgtcggctttatgcattatcgccgacatctgaacttttcctcagagcagagctttcccgaagataattggggcgtcgttaattcacccgttattgatgcagagtatgaaaagcagtttggtttaaccgacacggcaatccaggattgtatttcagggtttgacctgctgttaccaaagaagtggtctgtgacctctgccggcagtaaaaataacctcgatcattatgagaaaggtgagtttttacatataaaggactatctggctgccctggaggttgtcgaagagctttatccggattataaagcggctattcagcagtttaacaatgccacagatggctattacacgaacatgtttgtgatgcacaaagatatgttcgtggattattcagaatggctcttcgcgattttgactaatcttgaaagccgcatctctatgaataattataacgcgcaagaaaagcgtgttattggacatattgctgagcgtctttttaacatttatattattaagcagcagcaagaccgggccctgaaagttaaagaacttcagcgcactttcgtgacgaatgagacattcaacggcaagctggaaccggtttttcctcacgctgcgccgatagtcatcagttttgatgacaactatgccatcagcggtggagccttaatcaactccattgttcgtcattctgataaaaacacccattatgatattgttgtgctggaaaataaggtgagtaaccttaacaagcagcgcttactaaaactggtctcggcccatacaaacttttcactgcgtttctttgatgtgaatgcctttactgaattgaatggcgtacatacccgcgcgcactttagcgcatcaacctatgctcgcttgtttattccgcagcttttccgtgaatatgagaaggtcatttttatcgattccgatactgtggtgaaggccgatcttgcgactttgcttaatgtcgacctcggcacaaaccttgttgccgccgttaaagatatcgtgatggaaggcttcgtcaagtttggtgcgatgtcggagtcggcagatggcgtgatgcccgccggcgagtatctgcaaaaaacgcttaaaatgaccaatccggatgagtatttccaggcgggaattatcgtttttaacgttgcccagatggtgcaggaagataccttctcagcgctgattaagacgctcaaagagaagaagtactggttcctcgaccaggacatcatgaacaaagtcttctatggccgggttgagtttttaccgctggagtggaatgtctatcacggtaatggcaatacggatgactttttccccaatctccagttcgcaacatatatgcgctttttaaaagccagaaagaacccgaatatgattcactatgccggggagaataaaccgtggaatacggacaaggttgacttttatgacgatttcctggaaaacgtcatcaatacgccatgggaaaaagagacctatttccgtcagttatctccggtaaattcatcaagtcctgcgcaaactgcagggcaaacgccagttctgcttcagactaagatcaaaaaagcgttgatgcctttccttaataaatatgctcctgtcggttcaccgaggcgaaacacgataacaaaatactactataaagttagacgctcaattcttggttaa

SEQ ID NO: 179006 - DNA, 1155 bp, Klebsiella oxytoca
atgaacagtaaaaatattctcatcgtcggagcgggtttttccggtgtggttatcgcacgccagctcgctgaacaaggtcatcacatcagaattattgaccagcgtgaccacataggcggtaactcctatgatgcgcgcgatccgcaaacggacgttatggttcacgtttatggcccgcatatctttcacaccgataatgaaacagtgtggaactatgtgactcagcacactgaaatgatgccgtatgtgaaccgtgtcaaagcaacggttaatggccaggtgttctctctgccgatcaacctgcataccatcaaccagttttttgcgaagacctgttcgccagatgaggcccgggcgctgattgccgaaaaaggggacagttcgatcctggaaccgaagacctttgaagaacaggctctgcgttttatcggcaaagagctctatgaggcgttcttcaagggctataccatcaagcagtgggggatggagccctcgcagcttccggcgtcgattcttaagcgtctgccggttcgttttaactacgatgataattactttaaccacagatttcagggcatgccgaaactgggttatacgaaaatgattgagtcaatcgccaatcatgaaaatattaccatcgaacttcagcaatcgtttaacgctgaagagagagaacagtacgatcacgtgttctatagcgggccgctggatgctttttattcctatcaatatggtcgcctgggctatcgtactctggattttgaaaaattcacctggcagggcgattatcagggctgcgcggtaatgaattactgctcgctggatgttccttatacccgtatcactgaacataagtacttttcgccttgggaatcccatgagggatcggtctgttacaaggaatacagccgcgaatgtggcgaaaaggatatcccttattatccgattcgtcagatgggggagatggctttactcgataaatatttgtccctcgcggaaaatgaaaagaatatgacgtttgttggccgccttggaacctatcgatatctggatatggatgtcactatcgctgaagcattaaatacagccgataagtacttgtcctcccttagcagtaatgagtctatgccagtatttacggtttctgtgcgatga

SEQ ID NO: 179007 - DNA, 894 bp, Klebsiella oxytoca
atgaattgctccgcattaatagtcacgtataatcgtttagagaagttaaagctgactattgccaacacggtgaaattaaattttacagcgatcgttgttgtcaataacgggtccacggatggaacccaggcctggttagccacccttagcgacccgcgagtgattgttcttaatctgccatccaacagcggtggcgcgggtggctttaaggccgggagtcaatatttatgcgacaacgtcgatagcgactgggttttcttttacgatgatgatgcctggcccgagagcgatgcgctggaaaaatttgcccagctagaaaaggctaactgtcgggtgttcaccgctttggtcaaggatcttcaggggcaaccctgtccgatgaacatgccttttgccaaagttccgtcgtcgtttatggacacattacgctacatcagaaatcctgcggagtttcttccgtcagtttcccgggcgtgtgcggtacagacggtttcctttgtcggtatgattattcaacgagatgtgctgcaaaagcgtctccacagtattcacgacgagttatttttatattttgacgatctctattttggctatcagctgacattagatggcgaagctattcgctattctcccgaggtcatctttacccatgatgtgagtatccaggggaaatgtattgttcccgaatggaaggtttattatctttgtcgaaatcttattttggcgaagagaatttttccgcgagttgccatttttagccgtctctcaatccttttacggttgattaaatatgtatcaatattgccatggcaacgcaataaattgttatattttaaatacttgcgtcgtggaattatccatggtgtaaaaggaatcagcggtaagaatcattaa

SEQ ID NO: 179008 - DNA, 1134 bp, Klebsiella oxytoca
atgaaaaaactgtgttatttcataaactcggattggtattttgatttgcactggattgatcgtgcgatcgccgcccgagatgctggttatgagattcacatcatcagtcattttgtcgacggtaaagtgctgaataaatttaaaacattcggttttaagtgtcataatgttccacttgatgctcaatcatttaatgcattaactttctttcgggccttttttgcctcccgaaagctcattaaagaaattaatcccgatcttttacactgtatcactattaaaccctgtctgatcggtgggctcctgtccaggacaaacaaccgtcccgtcatcgtgagttttgtcggtctgggccgtgtattttcaggtgatacgggtttgcttaagctattgcgcaatatcaccatcatggcctacaaatatattgccagtaataagcgcagtatatttatgtttgagcacgataaagatcgtaaaaaactggcgggttttgtcgggattgactatcagcagactattgtcatcgatggcgcgggtatcaatccggagatctataaatattctctggagcaggagcgtgacgttccggttgtgctgtttgccagcagaatgctctggagtaaagggctcggggatttaattgaagccaagaaaatcctcgaagcaagagatattcattttacgctaaacgttgccgggatactcgttgaaaacgataaggatgctatatcccttgcggtgatccagcaatggcataaagaaggtctgattaactggttgggtcacagctctaacgtctgcgacttgatcgaggagtcgaacatcgtggcattaccttcgatctattccgaaggcgtgccgcgtatactgcttgaggcttcctcggttggccgggcctgcattgcctacgatgttggcggctgcgatagcctgatcattaataacgataacggcattatcgtgaaaagtaactctccgcaggagctggccgataagcttgaattcttgttagccaatcccaaagcacgagtagagatgggtattaaaggacggcaacgcgttcaggataagttttctagcggtatgatcattagcaagaccttaaagacttatcatgatgtggttcagggatga

SEQ ID NO: 179009 - DNA, 1320 bp, Klebsiella oxytoca
atgtctgatgaatcaagtaacgttattgtatccgttattatccctgtccataacgccgcggagtatattgctgagacgctaactacggtgttagcccagtctttaaaagagattgagattatccttgttaacgatagctcaacggataatactctggatattgtcactaaaatagccagtgaagattcgcgagtccgggttatcaccaacccgagcaacgtcggtggcggcgaatcgcgaaatattggcctacgtgtagcgaccggcgaatacatcattttcctcgacgatgacgattacgccgataaagagatgttaaagagaatgtccgaccgggctacggccctgcaaacggatgttgttatctgccggtgccagtcagtcgatctgcaaaccaatacccgttctcccatgcctttgtcggcgcgtgaggatttactgcctgaaaaagaggtcttctcttcacgggaaattgctgacgattttttcagagcctttatatggtggccatgggataagctcttcagacgcgaggctatcctggcaatgggcctggagtttcaaccgctgagaaccacaaacgacctgtactttgtgagttgtttcatgctgttagcaaatcgcatctctctggttgatgagatcttaatctctcatactatccaccgcgctgagtcgctttcctccaccagagaaaattcgtggcactgcgcgctgcaggcattaacttcgctacgtttgtttatgcaagatcgtgatttactggcgtccagaagtcgtgattttaataattacgccgttgtttttcttgagtggcatctcaatacgatttctggtggtacgtttaacccgttgtttaaccaagtaaagtcgttcatcttatctttagaaatcgactgtgatgacttttatgatgactttatcaaagctgcgtatggccggatcgttaatcagacagcggaagagtatattttttctctgaaagacagagcgttacgcgagcttgaacatgcacaaatgatgaactcaacgctgcaggaagaaatgacttctcttaaacagtcgacggtatctcagcgaagtgaaattgatgttctgaaggcgcaggttagcgataaaaccaccattatccacgagctcgaacagcggaatgcgcgtttagaggacgagtatcaaactcagcaacagaaattgctcagcattgaaaatgcgtaccatgagctgactcagcgctatacagatttggtttcatctttatcatggaaaatgacgaaaccattgaggctagttaaagaaataaccgcacgaaaaaagtcatga

SEQ ID NO: 179010 - DNA, 891 bp, Klebsiella oxytoca
atgaaaccactgctggatgtgctcgtcattcttgatgccctcgacaaagagggcagttttgccgccgcctcggcgaagctctataaaacgccgtcggcgctgagctacaccattcataagctggaaagcgatctcaatattcaactgcttgaccgcagcggccaccgggcgcgctttacccgtaccgggcagatgctgctggaaaaggggcgcgacgtgctgcacaccgcccgcgaactggaaaagcaggccgtcaggctgcatcagggctgggaaaatgcgctgatactcaacgtcgacgccacttttcctttcccgctgttggttcccgcgatcgcggcgttttatcaccagcatcacgccacccgccttgaattccgccgcgatatcccgggcgcaaactggcagatgctgatggaagggcgggcggatcttctgctcggcgtgctgggcgacccgccggcgctcagcggctgcggctctgttctgctgggagaggtggcgcaggcgtttgttgttgcgccccggcatccgcttgcgcagattgccggcccgctgggctggcggacgttgcgccgtcatcgggcgattgtggccgacggcgcgtggccgcagattgacgctcaggatagcctggcggtattcgatctttccgcccggctgacgctgctgtgcgccggactgggatggggctatttgccgctatttcaggtacagcctttcatcgcccgcggcgagctacaaatattaaaaacgacggtgcctgaaccggtcaatcgcgcgtggataggctggaatgaagatatttgcgggcaggcgggcgagtggtggcgaaaggagatattagcaaatagtgctatccatcaggtctataatactaaaatcgtatga

SEQ ID NO: 179011 - DNA, 504 bp, Klebsiella oxytoca
atgccgccgctcgactggctgcggcgcttatggctgctgtaccacgcggggaaaggcagctttccgctgcgcatggggcttagcccgcgcgactggcaggcgctgcggcgacgcctgggcgaggcggagacgccgctggacggcgaggcgctaacccgccgccgcctgatgagcgaactcaacgctacccgcgaagaggagcgccagcagctgggcgcgtggctggcgggctggatgcagcaggaggccgggccgatggcgcagattatcgccgaggtttcgctggcgtttaaccatctctggcaggatctgggccttgggtcgcgcgccgaactgcgcctgctgatgatcgactgctttccgcagctggtggcgatgaacgaacacaatatgcgctggaaaaagttcttttaccgtcagcgctgtttgctccagcagggggaagttatctgccggtcgccaagctgcgacgagtgccgggagcgcagcgcctgttttgagtag

SEQ ID NO: 179012 - DNA, 1407 bp, Klebsiella oxytoca
atgacttcctgctcctctttttctggcggcccagcctgccgcccggcggatgacagcgccctgacgccgcttgtggccgataaagctgccgcgcacccctgctactctcgtaatgggcatcaccgtttcgcgcggatgcatctgcccgtcgcgcccgcctgcaatttgcagtgcaattactgtaatcgcaaattcgattgcagcaatgagtcccgccccggcgtatcgtcaacgctgctcacgcctgagcaggcggtcgtcaaagtgcgtcaggtcgcacaggcgatcccgcagctttcggtggtcggcatcgccggccccggcgatccgctcgccaatatcgcccgcaccttccgcaccctggagctgatccgcgaacagctgccggacctgaagttatgcctgtcgaccaacgggctgatgctgcccgacgcggtggaccgcctgctggacgtcggggttgaccacgtcacggtcaccattaataccctcgacgcggagattgccgcgcaaatctacgcctggctatggctggacggcgagcgctacagcggacgcgaagcgggagagattctgattgctcgtcagctggagggcgtgcacaggctgaccgcccagggcgtgctggtgaaaataaattcggtgctgatccccggcatcaacgatagcggtatggccgacgtgagccgcgcgctgcgggccagcggcgcgtttatccataatattatgccgctgatcgccaggccggagcacggcacggtgtttggcctcaacggccagccggagccggacgcagagacgctcgccgccacccgcagccggtgcggagaagtgatgccgcagatgacccactgccaccagtgccgcgccgacgccatcgggatgcttggcgaagaccgcagccagcagtttacccagcttccggccccggagagcctcccggcctggctgccaatcctccaccagcgcgcgcagctgcacgccagcattgccacccgcggcgaatctgaagccgatgacgcctgcctggtcgccgtggcgtcaagccgcggggacgtgattgattgccactttggccacaccgaccggttctctatctacagcctctcggccgccggcatggtgctggtcaacgaacggtttacgcctaaatattgtcaggggcgcgaagagtgcgagccgcaggataacgcggcccggttcgcggcgatcctcgaactgctggcggacgttaaagccgtattctgcgtgcgtatcggccatacgccgtggcaaatgctggaacaggaaggcattgaaccgtgcgttgacggcgcgtggcggccggtctccgaagtgctgcccgcgtggtggcagcagcgccgggggagctggcctgccgcgctgccgcataagggggtcgcctga

SEQ ID NO: 179013 - DNA, 1575 bp, Klebsiella oxytoca
atgatccataaatccgattcggacaccaccgtcaggcgcttcgatctctcccagcagtttaccgccatgcagcggataagcgtggtgctgagccgcgccaccgaagcgagcaaaaccctgcaggaggtgctgagcgttttacataacgatgcgtttatgcagcacgggatgatttgcctgtacgacagccagcaggagatcctgagcatcgaagcgctgcagcaaacggaaaaccagacgctgcccggcagtacgcaaattcgctaccggccgggagaaggactggtcggtaccgtgctggcgcagggccagtcgctggtgctgccgcgcgtcgccgatgaccagcgctttctcgatcgtctgagcctgtacgactacgacctgccgtttatcgccgttccgctgatgggcccccattcccggcccatcggcgtactggcggcgcagccgatggcgcgtcaggaagagcggctacccgcctgcacgcgctttctcgaaaccgtcgccaatctggtggcccagacgattcgcctgatgattctgccgacctccgccccgcagccgccgcagcagagcccccgagttgagcgcccgcgcgcctgtaccccttcgcgcggtttcggcctggagaatatggtcggcaaaagcccggcgatgcggcagattatggacattatccgtcaggtctcccgctgggataccacggtgctggtgcgcggcgagagcggcaccgggaaagagctgatcgccaacgccattcatcataattccccgcgcgccgcctccgcattcgtcaaatttaactgcgcggcgctgccggacaatctgctggagagcgagctgttcggccatgagaaaggcgcgtttaccggcgcggtgcgccagcggaaaggccgctttgagctggcggacggcggcaccctattcctggatgaaatcggtgaaagcagcgcctcgtttcaggccaagctgctgcgaattctgcaagaaggagagatggagcgcgtcggcggcgatgaaaccctgcgcgtcaacgtacgcatcatcgcggcgaccaaccgccatctggaagaggaggtgcggctggggcatttccgtgaagacctttactaccgcctgaacgtaatgcctatcgcgctgccgccgctgcgcgagcgccaggaggatatcgccgaactggcgcattttctggtacgtaaaatcgcccacagccaggggcgaacgctgcgcatcagcgatggggcaattcgcctgctgatggagtacagctggccgggaaacgtccgcgaactggaaaactgtctcgaacgttcggcggtgatgtcggaaagcggcctgatcgaccgggacgtgattctgttcaaccatcgcgataacccgccgaaagcgctgcccaacggcggccagacggaagacggctggctcgacaacagcctcgacgagcgccagcggctgatcgccgccctggagaaagcgggctgggtgcaggccaaagcggcgcggctgctcgggatgacgccgcgtcaggtggcgtatcgcattcagatcatggatatcaccatgccgcggctgtga

SEQ ID NO: 179014 - DNA, 1488 bp, Klebsiella oxytoca
atgaccctgaatatgatgctcgataacgccgtacccgaggcgattgccggtgcgctgactcaacaacatccggggctattttttacgatggtcgaacaggcatcggtagccatttccctcaccgacgcccgggcgaatattatctacgccaacccggcgttttgccgccagagcggatattcgctggcgcaactgctcaatcaaaacccgcgcctgctggccagcagccagacgccgcgagaaatctaccagcagatgtggcaaaccctgcttcagcgccagccgtggcgcggccagctgattaatcagcgccgcgacggcggcctgtatctggtggatatcgacatcacgccggtgctgaatccccagggcgagctggagcattatctggcgatgcagcgggatatcagcgtcagctataccctggaacagcggctgcgcaatcatatgacgctgatggaggcggtgctcaacaacatccccgccgccgtggtcgtggtggatgagcaggatcgggtggtgatggataatctcgcctacaaaacgtactgtgcggactgcggtggaaaagagctgctggtcgagctccagatttcaccgcgcaaaatggggcccggcgcggagcaaatcctgccggtggtggttcgcggcgcggtccgctggctgtcggtgacctgctgggcgctgcccggcgtaagcgaagaagccagccgctattttgtcgacagcgccccggcgcgcacgctggtggtgatcgccgactgcacccagcagcgccagcagcaggagcagggccgtctcgaccgtctgaagcagcagatgaccgccggaaagctgctggccgccattcgcgagtcgctggacgcggcgctgattcagcttaattgcccgatcaatatgctggcggcggcccgtcggctgaacggcgaaggcagcggcaacgtggcgctggacgcggcgtggcgcgaaggcgaagaggccatggcgcgactgcagcgctgccgcccttctctcgagctggaaagcagcgccgtctggccgcttcagcccttctttgacgacctgtacgccctctaccgcacccgctttgacgaccgcgcgcggctgcgggttgacatggcatcgccgcatctggtcggcttcggccagcgtacccagatgctggcctgcttaagtttatggctcgatcggacgctggccctcgccgctgaactgccctccgtaccgctggagatcgagctttatgccgaagaggacgagggctggctctcgctgtatctcaacgacaatgtaccgctgctgcaggtgcgctacgcccactcacccgatgccttaaactctcccggcaaagggatggagctgcggctgatccaaacgctggtcgcctaccaccgcggcgcgattgaactggcttctcgaccccagggaggcaccagcctcgttctgcgattcccgctctttgataccctgaccggaggtgagcaatga

SEQ ID NO: 179015 - DNA, 531 bp, Klebsiella oxytoca
atggcgaacattggtattttctttggcaccgataccggtaaaacccgcaaaatcgcgaaaatgatccacaaacagctgggcgagctggcggatgccccggtcaacattaaccgcacgacgctggacgactttatggcctatccggtgctgctgctgggcacgccgacgctcggcgacggccagctgccggggcttgaggccggatgcgaaggcgaatcatggagcgaattcatcagcggcctcgacgacgccagcctgagcgggaaaaccgtggcgctgttcggcctcggcgaccagaaaggctacccggacaacttcgttagcgggatgcgtccgctgtacgacgctctgcgcgcgcgcggcgcgcagataatcggcagctggccaaatgagggctatgaattcagcgcctctgcggcgctggagggcgaacgctttattgggctggtgctggatcaggataaccagttcgaccagaccgaagcgcgtctggcgagctggcttgaggagattaaacgcacggtgctgtag

SEQ ID NO: 179016 - DNA, 801 bp, Klebsiella oxytoca
atgaacgcatggcaacgttttgcccggcagcggctggcgcgcagccgctggaatagcgacccgacggccctggagccggccgatacgcaggcttttgaacaggcctggcaacgtcagtgccatatggagcaggcgatcgtcgcgcgggtcccggaaagcgatattccggcggcgctgctggagaatatcgccgcctcccttgccgtctggctcgacgagggggaatttacgccgccggagcgcgcagccatcgtgctgcatcacgcccgactggaggtcggctttaccgatatcgcccgccaggcgccgcagccggatctctccacggtgcaggcgtggtacctgcgccaccagacgcagtttatgcgcccggagcagcgtctgacccgccacctgctgctgacggtcgatggcgaccgcgaagccgtacaccagcggatcctcggcctgtatcggcaaatcaacgtctcgcgggacgcgtttgctccgctggctcgccgccattcccactgcccaagcgccctggaagagggccgtctgggctggattagccgcgggctgctctatccccagcttgagacggcgctgttttcactggcggaaaacgccctgagcctccccgtcgccagcgagctggggtggcatcttttatggtgtgaagcaattcgtcccgccgcgcccatggagccgcagcaggcgctggagagcgcgcgcgattatctttggcagcagagccagcagcgccatcagcgccagtggctggaacaaacgatctcccgtcagccgggcctgtgcgggtag

SEQ ID NO: 179017 - DNA, 447 bp, Klebsiella oxytoca
atgagaccgaaattcacctttagcgaagaggtccgcgtcgtacgcgcgattcgtaacgacggcaccgtggcgggcttcgcccccggcgcgctgctggtcaggcgcggcagcaccggctttgtccgcgactggggcgtttttttgcaggatcagattatctaccagatccactttccggaaaccgatcggatcatcggctgccgcgaacaggagctgatccccatcacccagccgtggctggccggaaacttgcaatatggggatagcgtgacctgccagatggcgctcgcggtcaacggcgatgtggtcgtgagcgccggccagcggggacgcatcgaggcgaccgatcgcggagagaccggcgacagctacaccgtggactttagcggccgctggttcagggttccggcgcaggccatcacccttatagaggagagagaagaatga

SEQ ID NO: 179018 - DNA, 261 bp, Klebsiella oxytoca
atgatggagtggttttatcaaattcccggcgtggacgaacttcgctccgccgaatcctttttccagtttttcgccgtcccctaccagcccgagctgcttggccgctgctgcctgccggtgctggcaacctttcaccgcaaactgcgcgccgaggtgccgctgcaaaaccggctggaggaaaacgcccgcgctcactggctgctggcgcgacgactgctcgcggagagctatcagcaacagtttcaggagagcggaacatga

SEQ ID NO: 179019 - DNA, 1143 bp, Klebsiella oxytoca
atgggacgcgtgctgattaacgataccaccctgcgcgacggcgaacagagccccggcgtcgcctttcgcaccagcgaaaaggtcgccattgccgaggcgctttatgccgcagggattacggcgatggaggtcggcaccccggcgatgggggacgaggagatcgcacggatccagctggtgcgtcgccagctgcccgacgcgacgctgatgacctggtgccggatgaacgcgctggaaatccgccagagcgccgatctgggcgttgactgggtggatatttcgattccggcttcagataagctgcggcagtataaactgcgcgagccgctaacggtgcttctggagcggctggcgatgtttatccgccttgcgcatacgctcggtctgcgggtatgcatcggctgcgaggacgcctcgcgcgccggcgtccaggccctgcgcgctatcgccgaggtcgcgcagcagtgcggcgccgcccgcctgcgctatgccgatacggtcggcctgctcgaccccctcaccaccgcggcgcaaatctcggccctgcgcgaagtctggtccggggaaatcgaaatgcacgcccacaacgacctgggtatggccaccgccaatacgctggcggcggtaagcgccggggccaccagcgtgaatacgacgatcctcggcctcggcgagcgggcgggcaacgcggcgctggaaaccgtcgcgctgggcctggagcgctgcctcggcgtgaagaccggcgtgcattttccggcgctgcccgcgctctgtcagagggtcgccgaagccgcccagcgcgccatcgacccgcagcagccgctggtcggcgagctggtgtttacccatgaatcaggggtccacgtggcggcgctgctgcgcgacagcgagagctatcagtcgatcgccccttccctgatgggccgcagctaccggctggtgctgggtaaacactccgggcgtcaggcggtcaacggcgtatttgaccagatgggctatcaccttaacgccgcgcaaattaaccagctgctgcccgccatccgccgcttcgccgagaactggaagcgcagcccgaaagattatgagctggtggctatctacgacgagctgtgcggtgaatccgccctgcgggcgagggggtaa

SEQ ID NO: 179020 - DNA, 1203 bp, Klebsiella oxytoca
atgaaacaggtttatctcgataacaacgccaccacccgtctggacccgatggtcctggaagcgatgatgccctttttgaccgacttttacggcaacccctcgtcgatacacgattttggcctaccggcccaggcggctctggagcgcgcgcatcaacaggctgcggcgctgctgggcgcggagtatcccagcgagatcatctttacctcctgcgccaccgaagctaccgccaccgccatcgcctcggccatcgccctgctgccggagcggcgcgaaattatcaccagcgcggtcgaacatccggcgacgctggcggcctgcgagcacctggagcgccagggctaccggattcatcgcatcgcggtggatagcgagggggggctggacatggcgcagttccgcgccgcgctcagcccgcgcgtcgcgctggtcagcgtgatgtgggcgaataacgaaaccggggtgcttttcccgatcgccgaaatggcggagctggcccatgaacaaggggcgctgtttcactgcgatgcggtacaggtggtgggcaaaatgccgattgccgtgggcgagacccgcatcgacatgctctcctgctcggcgcataagtttcacggaccaaaaggcgtaggctgcctctatctgcgccggggaacgcgctttcgcccgctgctgcgcggcggtcatcaggagtacggtcggcgcgccgggacggaaaatatctgcggaatcgtcggcatgggcgcggcctgcgagctggcgaatattcatctgccgggaatggcgcatatcggccagctgcgcgacaggctagagcatcgcctgctggccagcgtgccgtcggtcatggtgatgggcggtagtcagccgcgggtgcccggcacggcgaatctggcctttgagtttattgagggtgaggccattctgctgctgctcaaccaggccgggatcgccgcctccagcggcagcgcctgcacgtcaggctcgctggaaccctcccacgtgatgcgggcgatgaatatcccctataccgccgcccacggcaccatccgcttttccctctcgcgctacacccgggagaaagagatcgattacgtcgtcaccgcgctgccgccgattatcgaccggctgcgcgcgctgtcgccctactggcacaacggcaagccgcgcccggcggacgccgtcttcacgccggtttacggctaa

SEQ ID NO: 179021 - DNA, 825 bp, Klebsiella oxytoca
atgtggaattactccgagaaagtgaaagaccatttttttaatccccgcaacgcgcgcgtggtggacaacgccaacgcggtaggcgatgtggggtcattaagctgcggcgacgcgctgcgcctgatgctgcgcgttgacccgcaaagcgaaattatccaggaagcgggcttccagaccttcggctgcggcagcgccatcgcctcctcctccgcgctgacggagctgattatcggccataccctggccgaagccgggcagataaccaatcagcagattgccgattatctcgacgggctaccgccggagaaaatgcactgctcggtgatgggccaggaggccctgcgcgcggccatcgccaactttcgcggcgaaagcctggaggaggagcatgaggagggcaagctgatctgcaaatgcttcggcgtcgatgaaggacacattcgccgcgcggtgcagaacaacggcctgaccacccttgaagaggtgatcaactacaccaaagcgggcggcggctgcaccgcctgccacgaaaaaatcgagctggcgctggcggagatcctcgcgcagccgccgcagacgccgcccgctgcggccagcggcaaagatccgcactggcagagcgtcgtcgagaccatcgctgaactgcgcccgcatattcaggccgacggcggcgatatgtcgctgctcagcgtcgccaaccaccaggtgaccgtcagcctctccggcagctgtagcggctgcatgatgaccgatatgaccctggcctggctgcagcaaaaactgatggaacgtaccggctgttatatggaagtggtggcggcctga

SEQ ID NO: 179022 - DNA, 471 bp, Klebsiella oxytoca
atgccgccgattaaccgtcagtttgatatggtccactccgatgagtggtctatgaaggtcgccttcgccagttccgactatcgtcatgtcgatcagcattttggcgccacgccgcggctggtggtatacggcgtcaaggcggatcgggtcaccctgatccgggtggttgatttctccgttgagaacggccaccagacggagaagatcgccaggcggatccacgcccttgaggattgcgtcacgctgttctgcgtggcgattggcgacgcggtttttcgtcagctgttgcaggtcggcgtccgcgccgaacgcgttcccgccgataccaccatcgtcggcttactgcaggagatccagctttactggtacgacaaagggcagcgcaaaaatgcgcgccagcgcgacccggagcgctttacccgtctgctgcaggaacaggagtggcatgaggaaccggacccgcgccgctag

SEQ ID NO: 179023 - DNA, 1386 bp, Klebsiella oxytoca
atggcagacattttccgcaccgataaaccgctggcggtcagcccgatcaagaccggccagccgctcggcgcaatcctcgccagcctcgggattgaacacagcatccctctggtccacggcgcgcagggatgcagcgccttcgccaaagtcttttttattcaacacttccacgacccggttcccctgcagtcgacggcgatggaccccacctcgacgattatgggcgcggacggcaatattttcaccgccctggataccctctgccagcgcaacgcgccgcaggctatcgtgctgctcagcaccgggctgtctgaggctcagggcagcgacatttcccgcgtggttcgccagtttcgcgaagagtatccccggcacaagggcgtggcgatattaaccgttaacacgccggatttttatggttccatggaaaacggcttcagcgcggtgctcgagagcgtcattgagcagtgggttgcgccgacgccgcgcccggctcagcgcaatcgccgggtcaacctgctgatcagccacctctgctcgccgggcgatattgagtggctgcgccgatgcgtcgaagcctttggtctgcagccgataatcctgccggacctggcgaaatcgatggatgggcacctggcgcaaggcgatttctcgccgctgacccagggcgggacgccgctgcgccagatagaacagatgggacaaagcctgtgcagcttcgccattggcgtctccctccaccgcgcgtcatcgctgctggccccgcgctgccggggcgaggttatcgccctgccgcacctgatgaccctcgatcgctgcgacgcttttattcatcaactggcgaaaatttccggacgcgccgttcccgcgtggctggagcgccagcgcggtcagctgcaggatgcgatgatcgactgtcatatgtggcttcagggccagcgcatggcgatagcggcggaaggcgatctgctggcggcgtggtgtgatttcgccaacagccaggggatgcagcccggcccgctggtggcccctaccggccatcccagcctgcgccagctgccggtggaacgcgtggtgccgggagatctggaggatctgcaaacgctgctgtgcgcccaacccgccgacctgctggtggccaactcccacgcctgcgacctggcggagcagtttgcgctgccgctggtgcgcgcgggttttccgatctttgacaagctcggtgaattccgccgggtgcgtcaggggtactgcggaatgcgcgatacgctgttcgagctggcaaacctgatgcgcgagcgccatcaccacctcgcccgctaccgatcgccgcttcgccagaacaccgaatcttcactctccacaggaggcgcctatgccgccgattaa

SEQ ID NO: 179024 - DNA, 1374 bp, Klebsiella oxytoca
atgaagggaaatgaaattctggcgctgctggatgaaccggcctgtgaacacaaccataaacaaaaatccggctgcagcgcgcccaaacccggcgccaccgccggcggctgcgcgttcgacggcgcgcagataaccctgctgcccatcgccgacgtggcgcatctggtccatggccccatcggctgcgccggaagctcctgggataaccgcggcagcgccagctccggccctaccctgaatcggctcgggttcaccaccgatctcaacgaacaggacgtgattatgggccgcggcgaacgtcgcctgtttcacgccgtgcgccatatcgtcgcccgctatcatccggcggcggtctttatctacaacacctgcgtaccggccatggagggcgatgacctggaagcggtatgccaggccgcgcagaccgccaccggcgtaccggttatcgccattgacgccgccggtttttacggcagtaaaaatctcggtaaccggctggccggcgaggtcatggtgaaacgggtaatcggtcagcgcgagcccgcaccctggccggagagcacgccctttgccccggagcagcgtcacgatattggcctgattggcgaattcaatattgccggcgagttctggcatattcagccgctgctcgacgagctggggatccgcgtgctcggcagcctctccggcgatggccgtttcgccgagatccagaccatgcatcgggcgcaggccaatatgctggtctgctcgcgggcgctaattaacgtcgccagagccctggagcagcgctacggcacgccgtggttcgaaggcagcttctacgggatccgcgccacctccgacgccctgcgccagctggcggcgctgctgggcgatgacgaccttagccagcgcaccgaagcgctgattgcgcgggaggaacaggcggcggaactggcgctacaaccgtggcgcgaacggctgcgcggccgcaaagcgctgctctataccggcggggtgaaatcctggtcggtggtatcggcgcttcaggatttgggcatgaccgtggtggcaaccggcacgcgtaaatccaccgaagaggataaacagcggatccgcgagctgatgggcgaagaggcggtaatgctggaagaaggcaacgcccgcacgctgctggatgtggtctatcgctatcaggccgacctgatgattgccggcggacgcaatatgtacaccgcctataaagccaggctgccgtttctcgatatcaatcaggagcgcgaacacgccttcgccggctatcaggggatcgtcaccctcgcccgccagctgtgtcagaccatcgacagtcccatctggccgcaaacccatgcccgcgccccgtggcactaa

SEQ ID NO: 179025 - DNA, 663 bp, Klebsiella oxytoca
atgtccgacaacgatacccttttctggcgcatgctggcgctgtttcagtccctgccggacctgcagccggcgcaaattgtcgactggctggcgcaggagtgcggcgagacgctgaccccggcgcggctggcgaccctgacccagccgcagctggccgccagctttccctccgcgacggcggtgatgtcccccgctcgctggtcgcgggtgatggcgagcctgcagggcgcgctgcccgcccatttacgcatcgttcaccctgcccagcgaacgccgcagctgctggcggcgttttgctcccaggatggcctgatgattaacggccatttcggtcaggggcggctgttttttatctacgcgttcgatgagcaaggcggctggctgcacgatctgcgccgctatccttccgcgcccacccagcaggaagccagcgaagtgcgcgcccggctgattgaagactgccagctgctgttttgtcaggagatcggcgggcccgccgccgcccggctgatccgccaccgaatccacccgatgaaagcgcagcccgggacgacgattcatgcgcagtgtgaggcgatcaatacgctgctggccggccgtttgccgccgtggctggcgaagcggcttaaccgggagaaccctctggaggcgcgcgttttttaa

SEQ ID NO: 179026 - DNA, 219 bp, Klebsiella oxytoca
atgcccatcgtgattttccgtgagcgcggcgcggacctgtacgcctatatcgcgaaacaggatctggaggcgcgagtgctccagattgagcataacgacgctgaacgctggggcggcgcgatttcgctggaagggggacgccgctactacgtcaatccgcagccggggcgccccacctttccgataagcctgcgcgcgacgcgcggcgcgttgatataa

SEQ ID NO: 179027 - DNA, 1563 bp, Klebsiella oxytoca
atgagccaaacgattgataaaattaatagctgctatccgctattcgaacaggatgaataccaggagctgttccgcaataagcggcagctggaggaagcgcacgatgcccaacgcgtgcaggaggtctttgcctggaccaccaccgccgagtatgaagcgctgaatttccagcgcgaggcgctgaccgttgacccggcgaaagcctgccagccgcttggcgcggtgctttgctcgctgggatttgccaataccctgccgtacgtccacggctcccaggggtgcgtggcctactttcgcacctattttaaccgccatttcaaagagccgatcgcctgcgtctccgactcgatgaccgaagacgcggcggtcttcggcggcaacaacaacatgaatctgggtctgcagaacgccagcgccctgtacaagccggagatcatcgcggtttccaccacctgcatggcggaagtcatcggcgatgacctgcaggcgtttatcgccaacgccaaaaaagatggcttcgtcgatagcagcatcgccgtgccccatgcccatacgccaagctttatcggcagccacgtcaccggctgggacaacatgtttgaaggcttcgccaaaaccttcactgcggactaccaggggcaaccgggcaaactgcagaagctcaatctggtgaccggctttgaaacctatctcggcaacttccgcgtattaaagcgaatgatggaacagatggcggtgccgtgcagcctgctctccgatccgtcagaagttctcgacacgcccgccgacggccattatcggatgtattccggcggcaccacgcagcaggagatgaaagaggcccctgacgccatcgatacgctgcttctgcagccgtggcagctgcagaagagcaaaaaagtggtgcaggagatgtggaaccagcccgccaccgaggtcgcgattccgctggggctggccgctaccgatgaactgctgatgaccgtcagccagcttagcggcaagccgatcgccgacgccctcacccttgagcgcggccggctggttgacatgatgctcgattcccacacctggctgcacggcaagaaatttggcctgtacggcgacccggacttcgtgatgggcctcacccgcttcctgctggagctgggctgcgagccgacggtgatcctgagccataacgccaacaaacgctggcaaaaagcgatgaagaaaatgcttgatgcctcgccgtacgggcgcgacagcgaagtgtttatcaactgcgatttgtggcacttccgttcgctgatgttcacccgtcagccggactttatgatcggcaactcctacggcaagtttatccagcgcgataccctggcgaagggcaaagcctttgaagtaccgcttatccgcctcggctttccgctgttcgaccgccaccatctgcaccgccagacaacctggggttatgaaggggcgatgaacattgtgacgacgctggtgaacgccgtactggagaaactggatagcgataccagccagctgggcaaaaccgattacagtttcgatctcgtccgttaa

SEQ ID NO: 179028 - DNA, 1452 bp, Klebsiella oxytoca
atgatgaccaacgcaacgggcgaacgtaatctggcgctgatccaggaagtcctggaggtgttcccggaaaccgcgcgaaaagagcgcagaaagcacatgatggtcagcgatccgcaaatggagagcgtcggcaagtgcattatctctaaccgcaaatcacaacccggcgtgatgaccgtgcgcggctgcgcctacgccggctcgaaaggggtggtattcgggccaatcaaggatatggcccacatctcgcacgggccggtcggctgcggccagtattcccgcgccggacgacgcaactactacaccggggtcagcggcgtcgatagcttcggcacgctgaacttcacctctgattttcaggagcgcgacatcgtcttcggcggcgataaaaagctcagcaagctgattgaagagatggagctgctgttcccgctcaccaaagggatcaccatacagtcggaatgcccggtggggctgatcggcgatgatatcagcgcggtggccaacgccagcagcaaagcgctggataaaccggtgatcccggtacgctgcgaaggctttcgcggcgtgtcgcagtcgctggggcaccatatcgccaacgacgtggtgcgcgactggatcctcaacaatcgcgaaggacagccgtttgaaaccactccttacgatgtggcgatcatcggcgactacaacatcggcggcgacgcctgggcctcgcgcatcctgcttgaagagatggggctacgggtggtcgcgcagtggtccggcgacggcacgctggtggagatggagaacaccccattcgtcaagctgaacctggttcactgctaccgttcgatgaactatatcgcccgccatatggaggagaaacatcagattccgtggatggagtacaacttcttcgggccgaccaaaatcgccgaatcgctgcgcaaaatcgccgaccagtttgacgataccattcgcgcgaacgccgaagcggtgatcgcccggtatgaggggcagatggcggcgattatcgccaaatatcgcccgcgcctggaggggcgtaaggtgctgctctatatgggcggcctgcggccacgccacgttatcggcgcctacgaggatctcggcatggagatcatcgccgccgggtacgagtttgcccataacgatgactacgaccgcaccctgccggatctgaaagagggcacgctgctgttcgatgacgccagcagctatgagctggaagcgttcgttaaggcgctgaagcccgaccttatcggctccggcatcaaggaaaaatatatcttccagaaaatgggcgtgccgttccgccagatgcactcgtgggactattccggcccgtaccacggctacgatggtttcgccattttcgcccgcgatatggatatgaccctgaacaacccggcgtggaacgaactcaccgcgccgtggctgaagtctgcgtga

SEQ ID NO: 179029 - DNA, 882 bp, Klebsiella oxytoca
atgaccatgcgtcaatgcgctatttacggtaaaggcggtatcggcaaatccaccactacgcagaacctcgtcgccgcgctggcggagatgggtaagaaagtgatgatcgtcggctgcgatccgaaggcggactccacccgcctgatcctgcacgctaaagcacagaacaccattatggagatggccgcggaagtcggctcggtcgaggatctcgagctcgaagacgtgctgcaaattggctacggcgacgtgcgctgcgcggaatccggcggcccggagccaggcgtcggctgcgcggggcgcggcgtgatcacggcgatcaactttcttgaagaagaaggcgcctacgaggacgatctcgattttgtcttctatgacgtgctcggcgacgtggtctgcggcggcttcgccatgcctatccgcgaaaacaaagcccaggagatctacatcgtctgctccggcgaaatgatggcgatgtacgccgccaacaatatctccaaagggatcgttaaatacgctaaatccggcaaggtgcgcctcggcggcctgatctgtaactcacgccagaccgaccgtgaagacgaactgatcatggccctggcggaaaagctcgggacccagatgatccactttgtcccccgcgacaatatcgtgcagcgcgcggagatccgccgaatgacggtgatcgagtacgaccccgcctgccagcaggccaacgaataccgcaccctggcgcagaagatcgtcaacaacaccatgaaagtggtgccgacaccctgcaccatggatgagctggagtcgctgctgatggagttcggcatcatggaagaagaagacaccagcatcattggtaaaaccgccgccgaagaaagcgcggcctga

SEQ ID NO: 179030 - DNA, 3516 bp, Klebsiella oxytoca
atgtccggaaaaatgaaaacaatggatggcaacgccgcggcggcctggatctcttatgcctttaccgaggtcgcggcgatttaccccattaccccctccacgccgatggcggaaaatgtcgacgagtgggcggcgcaggggaaaaagaacctctttggccagccggtgcgcttaatggagatgcagtcggaagccggcgcggcaggcgcggtacacggcgcgctgcaggccggggcgctcaccaccacctatacggcctcccaggggctgctgctgatgatccccaacatgtacaaaatcgccggtgaactgctgccgggcgtctttcacgtcagcgcccgggcgctggcgaccaattcgctgaatatttttggcgatcaccaggacgtgatggcggttcgccagaccggctgcgcgatgctggcggagaacaacgtgcagcaggtgatggatttgtcggcggtggcgcatctggcggcgattaagggacgcatcccgtttgttaacttcttcgatggtttccgcacctcgcacgaaattcaaaaaatcgaggtgctggaatatgaccagctggcgacgctgctggaccggcccgcgctcgacagcttccgccgtaacgcgctgcatccggatcatccggtcatccgcggaacggcgcaaaacccggatatctacttccaggaaagagaggcgggtaaccgtttttatcaggcgctgcccgatattgtcgaaagctatatggcgcaaatcagcgcgctcaccggccgggagtaccatctgtttaactacaccggcgcggccgatgccgaacgggtgattatcgccatggggtcggtctgcgacaccgttcaggaagtggtggatacgctgaacgcggcgggagagaaggtcgggctgctcagcgtgcatctgtttcgccctttttcgctggcccactttttcgctcagctgccgaaaaccgtacagcggattgccgtgcttgaccgcaccaaagagcccggcgctcaggctgaaccgctgtgcctggatgtgaaaaacgccttctaccaccacgacgatgcgccgctgattgtcggcggccgctacgcgcttggcggtaaggacgttctgcctaacgatatcgcggcggtctttgacaacctcaataaaccgctgccgatggacggctttaccctcggcattgtcgatgatgtcacctttacctcgctgcccccgcgccagcagacgctggcggtctcgcatgatggcatcaccgcctgtaaattttggggcatgggctcggacggcaccgttggggccaataaaagcgcgattaaaatcatcggcgacaaaacgccgctctacgcgcaggcctacttttcctatgactcgaaaaaatccggcggcattaccgtttcgcatttgcgcttcggcgaccggccgatcaattcgccctacctgattcatcgggccgattttatctcctgttcgcagcagtcctacgtggagcgctatgacctgctggatgggttaaagccgggcgggacctttttactcaactgcagctggtccgatgcggagctggagcagcatctgccggtcggctttaaacgctatctggcgcgggaaaatatccatttttataccctgaacgccgtggatatcgcccgcgagctcgggctgggcgggcgctttaatatgctgatgcaggcggcattctttaagctggcggcaattatcgacccgcagaccgcggcggattacctcaagcaggcggttgaaaaaagctacggcagcaaaggggcggcggtgatcgagatgaaccagcgggcgatcgagctgggcatggcttcgctgcatcaggtgaccattccggcgcactgggcgacgctggatgagcccgtggcgcaggcttcagccatgatgccggatttcatccgcgatattttgcagccgatgaaccgccagtgcggcgaccagttgccggtaagcgcgtttgtcggcatggaagacggcacctttccctcgggcactgccgcctgggagaaacgcgggatcgcgctggaagtgccggtctggcagccggagggctgcacgcagtgtaaccagtgcgcctttatctgcccccacgcggcgatccgcccggcgctgctcaacggcgaagagcaggacgccgcgccggccgggctgttgagcaaacccgctcagggagcgaaggagtatcactaccatctggctatttcgccgctggattgctccggctgcggcaactgcgtggatatctgtccttcgcgcggcaaggcgttaaaaatgcagtctcttgatagccagcgccagatggcgccggtctgggactatgcgctggcgctgacgccgaagagcaatccgttccggaagacgacggtcaaaggcagccagtttgaaaccccgctgctggagttttccggcgcctgcgcgggatgcggcgaaacgccttatgcccgcctgataacccagctgtttggcgaccggatgctgatcgctaacgccaccggctgctcttcaatctggggagccagcgcgccgtcgattccctataccaccaaccaccgcgggcacggcccggcatgggcgaactcgctgtttgaggataacgcggagtttggcctcggcatgatgctcggcggccaggcggtgcgtcaacaaatcgccgatgatatgaccgccgcgctggcgctgccggtcagcgacgaactcctcgacgcgatgcgccagtggctggcgaagcaggatgaaggcgagggtacccgcgagcgcgcggaccggctcagcgaacggctggcggcggaaaaagagggcgtaccgctgctggagcagctatggcagaaccgcgactattttgtgcgccggtcgcagtggattttcggcggcgacggctgggcctacgatatcggcttcggcggtctcgatcacgtgctggcgagcggggaagacgtgaatattctggtgtttgataccgaggtttactccaataccggcgggcagtcgtctaaatcgaccccggtggcggccatcgcgaagtttgccgcgcagggcaaacgcacgcggaaaaaagatcttggcatgatggcgatgagctacggcaatgtgtacgtggcccaggtcgccatgggcgccgataaagatcagacgctgcgcgcgatcgccgaggctgaagcctggccgggaccgtcgctggtgattgcctacgccgcctgcattaaccacgggctgaaagccggtatgcgctgcagccagcgcgaggcgaaacgggcggttgaggcgggatactggcacctgtggcgctatcatccgcagcgggaagcggagggcaagacgccgtttatgctcgattccgaagagccggaggagagcttccgcgactttttgcttggcgaagtgcgctacgcctcgctgcataaaacgacgccgcatctcgcggatgcgctttttagcagaaccgaggaggatgcgcgcgcccgctttgcccagtatcggcggctggccggtgaggagtag

SEQ ID NO: 179031 - DNA, 1437 bp, Klebsiella oxytoca
atgaaatactttgcgcgtagtgcgctttctctgggacttttcaccgtttttagcacttctggttttgcctccggcctcgttctggccgataacgaattccgcaatgatttagcctggttatccgaccgtggaaccctctcgttgagcctgtcgacctggcctctgagcgaagaggagattaagcgcgcgctggccaatgcccatccgacaacgtccgcagagcgggtggtactgggtcgggtaaatcagcgattaagcgcgctgaaagctgacgtgcgcgttaccggctacagctccactgataagccgggcacgccgcaggggttcgcccagtcttaccccgccgaccagtcgctttctctcgccctgaacaacagcggcgaatggtgggatctgcacctgcagggcaatgttgaaggcgacaagcgcatcagtaacggttcgagcgtgaacgccaacggcgcatacggcgcggttaagctgtggaaccagtggctggcgttcgggcaaatcccccagtggtgggggccgggctatgaaggtagcctgatccgctccgatgccgcgcgtcccatgaccggttttctgctgcagcgcgccgaacagcgggcgccggaaacctcatggctaagctggattggcccctggcagtaccagctttccgccagccagatgaaccagtacgcagccgtaccgcataccaaaatcttcggtggtcgcctgactttttcaccgctcacctcgctggagctgggagcctcgcgcgttatgcagtggggcggcgaagggcggccttcctcattcagcagcttctgggacggcctcaccggcaatgataacaccggcgactcggccgacgatcccggcaaccagctggccggttttgatttcaagctgaagctggcgcccaccctcggctggccggtgagcatttacggccagatgatcggcgaggacgaagccggatatttaccctcggcgcacctctatcttggcggcgtggaagggcatcaccagtggaacagcaatgcggttaactggtatctggaagcccacgatacccgctcgaacatgggccgtactaactacatctataaccactttatctataaagacggctactaccagcagggctatccgctgggcgatgcgatgggcggcgacgggcgtttatatgccggtaaggtggagctggtaaccgaagagaatcagcgctggagcgcgcggctggtctacgctgaggtcaatccaaaaaaccagcgaatcaataaagccttcccgcgcgccgatacgctgaagggcgtacagctgggctggagcggcgatgttatgccaacggtacgcctgaatacctccctgtggtacaccgacgctaaccacagcgccagcgacgatgttggggccagcatcggcgttgagctaccgttcagtttataa

SEQ ID NO: 179032 - DNA, 213 bp, Klebsiella oxytoca
atgatactgatgaccggcgacgcgcttagcggccaacgccgtgacgccgaatctttactcaactctttcgtttcggcgatcttcatcgctacctcccggctctccgacaaccaaatggccgcgcgcattcaacaccaccgtgatacccggcttgcccactggcggctggaagaacgcgggcaggctttctccgcgcggcagccgcgcggataa

SEQ ID NO: 179033 - DNA, 732 bp, Klebsiella oxytoca
atgttaagcgttttacccggatcgctcttttcgcggatccgcattttcctcggtcgcctcaagccgcacgccctgccggttgccagaaaacatattgttctggcctctctcggcgccgggacgggactggcggtgaccagcatgttcagccactggctgttaggcgaggtcaatatctggtttatcgcgccaatgggcgcatcggcagtgctgctgtttggcgtcccgagcagtccgctggcccagccgtggtcgattgtcggcggcaacgtgctctcggcgctgattggcgtgacagtgggaatggcgatcccgaacctggcgctggcctgcggcgtggcggcggggctggcgatcgccggtatgtatttcctgcgctgcctgcatccaccgggtggggcggtggcgttaacggcgatcctcggcggggcgggggtgcagagtgaaggctaccactttgttctgacgccggtattgctcaattccctgatgctggcgctgctggccatcgtcttcaacaacatggtgggacgacgctacccgcacccgctggccgcagaagaggtaaaggccaaagccgtaccgctgggcctgtcggtgacccgcgatgatattcacgcggccctgctggacggccagtttctcgatatcgatgaagacgacgtgcaggagctgctggaaaatattgaacataaagccagacagcgtatcgccagcgcccggcgatcctga

SEQ ID NO: 179034 - DNA, 1011 bp, Klebsiella oxytoca
atgacagttaatatcggtttaattggtttgggtatgattgggcgcgaccatctccagcgtttccagacggttatccagaacgccagggtcagcgccgtctgcgatatcaatcgtaatgtgaccgacgctattgcccgcgaatatggcgctcagccctattacgatgcagtcgagatgattcaatcagacgacgtggatgcgatctttatttgctctattggcccggtacataaagaacaaattctggcggccattaaagcaggtaaaccggtgttttgcgaaaagccgctaaccccgaccgcgaatgaagccaaagcgattattgatgctgaagtagcctacggcaaacgtatgctgcagctgggctttatgcgccgtttcgacccggggtacaaccagctaaaagccactctggatagcggtgaactgggggaaatattgctcatccactgcgcccatcgcaacgcctccgtgccggagagctacaccctggagatggcgattaacgattcggcgacccatgaaatcgatattatccgctatctgcttaacgaaaatatcgtttcggtgcgcgtcgataaaccgcagaagaaaacgcgcagagcctgcgcgcatctgcaggatccgttgattgtgatttttgaaactgaatccggcgtacgtattgatgatgagctgtttgttaactgcgattacggctacgacattcgctgtgaagtgattggcgaaaatgccatcagcgcgttgaccgaacaggcacttaccaccgtccgttcggcgcagggttatagccgcgctatccccaaaacctgtatggaacgtttcgccaccgcctacgatcgcgaggtgcagaatttcgttgaccgggtaaacctgggggcggagatgagcgggccatcatcgtgggacggatttgtcgtggcgatggtatgcgatgccggcctggcgtcgctgaaggatggcgaaaagcacgccgtctctctgccggagtgtccggcgctctaccgctga

SEQ ID NO: 179035 - DNA, 1536 bp, Klebsiella oxytoca
ttgtttacgaataatctcccgccccccggcggcgggcagccgctcgtcgctatcctgtcgccctgttcgctggctgccgaggggctgagcgggataatagcgaagggaggagccaggcccgttgtgctgcccccggagacgccgcccctgcctgccggcgttcgccgcgtggtggtgtttctcccggaaggccccgccgggctactggcaactctgaagcgggccgccgcgctgctggcgcggtcccccacgccgctgcccatgctgttcctgagccgcagcccggcaagctggctgtggcccaccctggtgcatcaggtcgcagaccggcgtttgcttaccgccgtacgggccgccgcttccgatttgccggtcccctgcctggcggcgctgctgcgcgacgccgtgctcgaagaatacccctctcttgagcagctggcagaggatgaaacgcgagcgctcggcaagcgccccgccgggatcacccggccggagctggacgctatcctcggtttactctgcggctaccgcgccagcgctcaggctcaacgccgcggcatcagccacaagacgctctacaatcaaagaaccgcaggattaaaaaaaatggtggaacaccaccctgaaatggccgcccgctttcccggcagccagataagagaccagaaaagcgagagcatcgccgccctttccgctttcgagcgtgaacttgtccatgcgatccacagccgacagatttttccggtatttcagcccattaccgatgaacaccagcaggtaaagggaatggagatcctctcccgctggaaccgaaacggcagcgtgctggctgccggcgattttttaccgcaaatacgctcggaatatgcctggctggtgctcaccgcgtttgtccttcaggaagcggtgcagaatattaatcagcattccggcgagtgttatttcgccgtgaatattcccgccgccgtcgccggcaacgagaacctgcttcgcatgatggaaaccgcgcgccagcagctgcgtcagccgcacaggtcgcagaggctggtgctggagtttgctgaaaataccgacctcaacggtcacggcaaaatcgccgaaaatatcgcccgcctgcaaaagcgcggcttccctatcatgcttgatgactgcttctcgcaaagcagcgtgatgtttccggtgcgcacgatgagattctgcgcttacaagctggatatgagcatcgtcaacgatatgcagcacgatccgcacgcgctggcgctgatcagaagccttatcttctactgccagctgaccggcagccgctgtattgccgaaggcgtagatagcatggagaaattcaacaaactgcaggcgctgggagtcgaccgctttcagggcaactacctctcggcgccggttggcagggagaacgtggcggagcttcttcagccgctttcgggcgaggcggagcatcgcgccggcatcgcggtaccggtaacgcccgatggaaaacatcgggcattggcgacacttcagcgcagctccggccagtag

SEQ ID NO: 179036 - DNA, 1299 bp, Klebsiella oxytoca
atgatcgttggaaaaactgccagtgagatcttcgatagcatccgccatctggtacaaagcggcgcactcaagcctggcgatgttttaccgccggtccgcgagctggcgggcaagctgtcggttaaccgcaataccgtcgctgccgcctataagcgactggtgacctctggcctggctatcagccaggggcgtaatggtaccgccattaaaacgcataataccctgcccgcccttgaaggtggcgatccctcttcgccgctgaaggatatctccagcggcaatcccgaccccgctcgcctggcaaacctcaagcactatctcagcgcaattgcgccagcgcctcgtctgtacggcgatgcggcggttgaaccacggctggccgcgtgggccagccgctgggttaacaacgatgtgaacctggatgccgatattaaccttgccagcggcgctgtcgatgcgcttgagcgcctgctgtgcgccctgctgctgcccggcgatagcgtggccatcgaagacccctgctttctcagcagcatcaatatgctgcgctacgccggttttagcccttcgccggtaccggtcgacggggaaggcatgcagcctgaagcccttgaagaggcgctgagcaacggcgcccgggcggtcattattaccccgcgcgcgcacaatccgaccggctgtagcctcagcgaatcccgcgcccgggcaatacgcgaaatactggcccgctatccgcaggttctggtgattgttgacgaccatttcgcgctgctctccgccacgccctggtactcccctatcgccgcggaaagtcagcgttgggcgctggtacgctccctgtcaaaaaccctgggaccagatttgcgtctggccatcgtcgccagcgacgctgacacgtcggcggcgctgcggctgaggcttaattccggtagccaatgggtcagccatctgttgcaggatctggtcatcgcctgccttaacgacaacacctttatggcctctctggcggaaacccggcgccactatcgtcagcagcatgaaaagctgattgccgccctcgccagccgcggaatcacccatctgacgccgggagacggccttaatttttggttcccgctggaagagccgagccagccggtagcgctccgtctggcgcacgccggctggctggttcgcgaaggcgaaacgttcggcattcgcgccccttcgcacgggctgaggctgtcgcttgcgacgctcagcgacaatgaaatgaataagctcgccaatgacttataccagatattacaacaacagtga

SEQ ID NO: 179037 - DNA, 123 bp, Klebsiella oxytoca
  misc_feature (103)..(107): n is a, c, g, or t
atgcgcctgtccgggctaccggacctgcagacgagctggaaacccgtagcccgggcaaggcgcgttaagcgccgcccccgggaaaagagcgcagagtggggtnnnnngggcaaggcgcgttaa

SEQ ID NO: 179038 - DNA, 2001 bp, Klebsiella oxytoca
atggatgaactgcgtcacctgacggcgcagatggcgcgcgaaggcgttcgtcgtctgctggttctcagcggcgacgatgcctggaccctgcgtcaggcgcaaagagtacgtaccgcactggcgggcgacgggctgtgggtcggcccgcgtccgatgcccgagccgtacgtctcgtctgctgccctgaaatcgctgctgggccgcgaattccagcacgcctttttcgatgcccgcgagggttttgatgtggcggcctttgccgcattagccggtacgctgcgcgccggaagctggctggtattgctcactcccgactttgcgcaatggccggcccgtcctgatgcggattctctgcgctggagcgacgctcctgaccccatccccacgccgaattttgtttatcgtttttgccaacagattagtgcggataacgcgtccattctctggcggcagggcaatgaacttgcggtgcccgcgttacccgtgcgcccgccatggcatcccgccgacggacatccgcaggcggagcaggctgccgtgcttgccgaactggcccggttccctcccggtattgcggcgctaaccgccgagcgcgggcgaggcaagtccgcgctcgcgggaatgcttattcgccatctggggggagatgccatcgtcacggcaccggcgcggggagcagcggaggtgatggcgacattcgccggggaggctttccgctttatggcccccgacgcattgctggcttccggctgcaccgccggatggctgattgtcgatgaggccgcggccatccccggaccgctgctgcgccagctggtctcccgcttcccgaggacgctgttgaccactaccgttcaggggtacgaggggacgggacgcggctttttgcttaagttttgcgccagttttgcgcacttacggcagtttagcctgacgacgcccatccgttgggcaagcggctgcccgctggaggcggcgattgcgcggctgctgctgttcaacgacgagacctttcagcacgcgccaggcggcgatatcgtgctggaaagcgtcagccaggagagctggcggcgacagtctgcgttaccggaagcgatgtatcagctgctctccggggcccactatcgcacgtcgccgctggacctccggcgcatgatggatgcgccggggcagcattttacctgcgcccgcggcggggagcgcatcgccggagcgctatggctggtggaggagggcggtcttgagccgccgcttagccaggcggtgtgggccggctatcgtcgtccgcgcggcaatctggtggcgcagtcgctggcggtgcacggcggtagcccactggcggctacgttggcggggctgcgcatcagccgtattgccgtgcatccggctcgccagcgcgaagggctggggcagcggctggtggcccgggcggcgtcgcaggctgcggaccgggattatctctcggtgagttttggctacacgcctgagctgtggcgcttctggcaacgctgcggttttacgctggtgcggctgggcacgcatcgggaagccagcagcggctgttacaccgcgatggcgctctatcctctcagcgaagcgggccatcgcctggcaagcgaagaagcccaacggctgcagcgcgacgaattctggctgcgcgagtggcgagatgaacctgtgccgctgacggcgctgaaagcgactattcttactgaagaagactggctggaggtggcgggttttgcttttgcccatcgtccgctgctgacctcggcaggtagcctcaatcgcctgcttatattggtggagctgccgcttccggcgctgcgggcccgcctgcagcagcaggatgaggccgcgctttgccaaacgttaggcttatccggacggaaagcgctgctggccaggctgcgcgaagaggcggcgcaggcgctgctcagcctggatgaaaaccgcgccaacgacctgcgccggcaggttcaaatgctgcaatttttttaa

SEQ ID NO: 179039 - DNA, 333 bp, Klebsiella oxytoca
atggaacagcaggtgacctttgagtacacgcttacggtaaagcactgcatcgacacaatagcgggttttctgaagcgtgttgatgttgagccgcgtccggttatcgcagatattctcacacagtttgagagtaccgtaggccagttccccttgggctgccagatttgccccgaattgctgaaaattggatgcgccaaataccgggagtttaaccacgctgaaggctaccgggttttgtattccgtagacggaacgttagtgacagcacatgcgatcctggcacatcggcaggatgttcagcagctgctgtttaagcgtctgataatggcttga

SEQ ID NO: 179040 - DNA, 234 bp, Klebsiella oxytoca
atgaaagtagagacaatcagctacgttaaaaagaacgcagcaacgcttgatctgtcagaacccatcctggtcacacaaaatggtgtgcctgcttatgttatagagtcctatgaccagcagcaggaacgagagaacgccattgctttgctgaagctgcttaccctgtcagagaaagacaaagcggaagggcgcgtgttctcgaaagaccagttgctggatggacttgcggattaa

SEQ ID NO: 179041 - DNA, 645 bp, Klebsiella oxytoca
gtgaccagtcccattcgtcagaatctgtttgaacgggaatgtgatatgccgctgctggaagcgcggcatctcgcccttctgcttctcggcctcgatgcttcccaaccagcaaacgccctgccggaagaacatcaggagaattaccgtatcctgcacgatgccatcagccgcactatcaaagccacaggcatggtcagcgccccggcgaacaaacgtatgttctatgccgatgagatgttcgcgctggcctggcggcttattgatgacgaactcacaccgccagaaattaaggtccgcagcctgaaggcggtgatgaaactgtcgcgtcacagtcgcggccgcaagtggctgaagacactcggcgacgacgcgcttccggatctcactgcttccacacaaccttcccagcgtgggatgcataaacgcgacaaggctcgggagaacactgccaggctctgctggttactggttcaacttctggttgaggagactgacgggcgttatggtacgtctgataaaccgacttcggatcggatacttcgtaagctgaagacgctggcgcaggagcgtgaattaccgtctgatgggcttggacgggggacgttttatgaggtgatgaagatggggcgggagaagagaacgtag

SEQ ID NO: 179042 - DNA, 900 bp, Klebsiella oxytoca
atgaacaaacttgatgctctaaagttttttgtcatcgcctctgaaaccctgaacttccgcgaagcagccgtcaagctgtcggtttcaccatcagtagtaacccgaacagtcgctgagttggagaaacaacttggtgaacctcttttcaaacgcaatactcggtcgatctttctcaccagtttcggtgagttatttttaccccaagcgaagcgactgctggaagattctgaaaagttatttctgatggcgaaagatgataatgaaatgaaaggtattgttcgcatcacattacttcgatttccaaatcatgagcaaatcttgtatgaactgttgactgcactgcgtccatatcctgagttatttatcgactggcgtttagatatgatgaaacttgatactatcgagcatcgtatcgatataggcatacgcgtagggcgagagcctaatccaaactttatcattaaaaatatcgggcaagttgaacatattttggttgcatcccctgaactcattgcgcgcctgggagcaccaactgatttagaagatcttcgacagcgttatccatttagtggtttaattaatcctgaaacggggaagtcatttgagtttatgagtgacgcagtgaatacttttgtccctcgtcatattgaattttatactacagatccatacgccgaaattcaggctgcattggccgggaaaacggttgtacaatccagcgattttatctgtagggattacttagcaagcggccaacttgttcccccactgccagaactgcgacaggagaaatggcaattttatttatatcgaccttaccagctgattactcccaaaagggtcacggtcgttttctcgctattagaaaaaatattacgcaaatatttcacatctaaataa

SEQ ID NO: 179043 - DNA, 573 bp, Klebsiella oxytoca
atgtcaattcaaccagtagagttaaacaaagcctatcgtttattgcaggtcgggccaacgacgatgatatcggctaaaaatgatggcattgaaaatgtcatggcagcggcctgggtggggttagtaggtaataacaaagtgatggcttttataggtccacaggcatttactcgcggacttgtagaaaaaagtggatattacgttgtccagatcccagtagtaaaacagatggaaatggttttatatgctggaggccacagttattctgacacacccgataaaaacagtaaaattccactattttatcagaaagagtttgaccttcctttagttgaaggttgtgctggctggctagtctgtaaggtcatacccgatgtagaaaatgaaaaacagcacaacttgttcatgggggaaattgtcggagcatggagtgatgaccgagttttcagaaatgggcactggatttttgatgatgcgcctgatgaattacgtactgtccattacgtagctggcggacagttttacgccattggtaaaggtacaaaattcaattatggtccaggaaaagactaa

SEQ ID NO: 179044 - DNA, 771 bp, Klebsiella oxytoca
atgcttagtttttactcttcacaggctggcgctatagtgcgctggctcgacctgcccggtcgcggcgaccctgttgtttttatccacggcctgggctgcgcctcgacctatgactatccgcgcgttgccgccgacccggcgctggccgggcggcgaatgattcttgtcgatttacccggtttcggctacagcgataaacccgagtccttcggctaccgtattggcgatcaggccggggtggtggttgagctgctggaccgcttagggcttgagcgctgctatctttatggccacagcatggggggcagcgtcgcgattgaagcggccgagcggctcgccggacgggtgcgggcgctgctggtggccgagcctaatctctatcccgggggcggcatgtacagcagacgtatcgccgaacaaactgaagaacgctttattgctcgcggctacgccgacatgctgtccgccgacgcttcgccttgggccggctgtctgcaaaacagcgccccctgggcggtatggcgcggcgcgaccagcctggtgaagggcgttaatccctcctggtttagccgctttatccacttatcctgtcctaaggctctgatatacggtgaagattcgctaccggcccgggaagcgacggatagcgaagccgccgggatcccgctgctggtgataccccaggccgggcactcaatggcgtgggaaaacccatcggcgctggcccgtacgctggccgatttttactccaccatagaggcagaagcctga

SEQ ID NO: 179045 - DNA, 285 bp, Klebsiella oxytoca
atgcgaacattcggcgcaatttgttgcttcgaagttgatattgttttgaaaaaaatagcgtgtttcctttttgtggcctgcgccacggcgatgctttacgggaattttccggccaaacagattatgggctgtgaagagcagggcgtcgcggaaccggtctgcatggcggccgcatgggatagtgaaaaagtcgatcttttgccggcctggaatcccgacgtccagaagctgattaccgcgcaaaagaccctgtctgctgcggagccggggtctttcaaatcgtaa

SEQ ID NO: 179046 - DNA, 930 bp, Klebsiella oxytoca
atgacgatggcgattccgtccgccaccaccgggcgcgtatccgcgctgttctggcgtaaaccctcgctggccctgtttttgcttctgcttggcccgctcatgtggtttggcattgtctatctgggatcgttgctgactctgctatggcaaagcttttacaccttcgacgatttcaccatgtcggtcactcacgacctgacgctggccaatctgcaggcgctgattaacccggcgaactacgacatcattatccgtaccctgacgatggcgctgtcggtgaccgtcgccagcgcgattctggccttgcctatggcctggtacatggcccgctatacccggggcaagatgaaggcgtttttctacatcgccgtgatgctgccgatgtgggcaagctatatcgtcaaagcctatgcatggacgctgctgttggcgaaagatggcgttgcgcagtggttcctgcgccatcttggcctggaaagcgtactgagcatggtgctgacgatcccggcggtcggcggcaatacgttatcgacgtccggactggggcgcttcctggtgttcgtctatatctggctgccgtttatgatcctgccggtgcaggccgcgctggaacgcctgccgccatcattgcttcaggcctctgccgatctgggcgctcgtccgcgccagaccttccgctacgtggtgctgccgctggcgattcccggcattgccgcaggttcgatttttaccttctccctgacgctcggcgattttatcgtaccgcagctggtggggccgccggggttctttatcggcaatatggtctattcccagcagggggcgattggcaatatgcccatggcggcggcgtttaccctggtgcctatcgtgctgattgccctttatctggcgtttgtgaaacgtctgggagcgtttgatgcactctga

SEQ ID NO: 179047 - DNA, 234 bp, Klebsiella oxytoca
atgttcagaagaagcgttttaacattactgctggcgtgcgccctgttttccgggcacgtgctggcccgccagcacggacacgatttcttcccggtacagagtctcgaacagcagttacagcacgaagccgatagcgacgagctgcgcagccaggcggaagacgccgcctccgacctgcgcgagcagcaccactggcagaatgcgcggaaaccaaaaatgcatcactaccagtag

SEQ ID NO: 179048 - DNA, 276 bp, Klebsiella oxytoca
atgaaaagttcaccctgccgcctgctcgcaggcaccttcatgttagccgccgcctcggctcaggcgttaaaagccccggaagtggacctgcgcgatccgacgatttgggaagagaaagcggcgtctccgctcaccgccagcccacagccctgcgaggtgttcagcggcccgcactgcgcggtctgggaagatgagaaatcggatattcagcgtgaacgggagcggcgggaacagcggcgatggcagaatggttatgaaaacctgcggcgggagtaa

SEQ ID NO: 179049 - DNA, 528 bp, Klebsiella oxytoca
atgcgcgataaatattctggcctgcaaattggcatccactggctggtgtttcttttagtgataggcgcttacgcggcgatggagctgcggggctttttcccccgcagcgcgcggcccgtcatcaatatgattcacgtctcctgcgggatttctatttttgttctgatggtggtgcgcctgttggtgcgtctcaaatctccggcgccgccaattgtgcctaagccgtcgccgatgatgaccggcttcgcgcatctggggcatctggttatctatctgctgtttatcgcgctgccggccatcggcatggtcatgatgtactaccgcggtaacccgtggttcgcgtttggcctgaccatgccgcacgcggcggaaagcaactttgagctggtggataccctgaaagcgtggcacgagctgctggccaataccggctactttatcattggcctgcacgcgctggcggcgctgttgcaccactacttctggaaagataacacgctgctgaggatgatgcctcgcaggcgttaa

SEQ ID NO: 179050 - DNA, 165 bp, Klebsiella oxytoca
atgaacactttcagcataatagccatccccctctttgccgcagcggtggtgatgttgacgttgggggcgacccggaaaaaccgtgcctgcgctatcgtcggcggcgttttgatggccgcgaccgtggttaacgcggtgaccggcatggcgctacagggcgggtaa

SEQ ID NO: 179051 - DNA, 792 bp, Klebsiella oxytoca
atgtcagagcattttccatcgctgccggaggcggtactggccgcggcgaaccagctgggggcctggctggcgcaggatgatttaccgcaggatccgcaaatagagctggtggtgctggcaggcaatgcggtgatcccgaccattgatttcgcctgccggctggcagcgcatcacgccgttcctctgctgatcagcggcggtatcggccactccacctcgtttttataccagtcggtgttgaatgacccgcgctacagcaccattccggtagacgatcgcgccgaggcgcatattctggccgacattgcccatcagttctgggcgattccgcgccaacgaatcgtggtggaagaccgctccaccaactgcggcgagaacgcgcgttttacccggcagatgctggagcacaacggcattgcgcaccgtacgggcgtggtggttcaggatccgaccatgcagcggcgaacgatggcgacatttgcccgcgtctggcaagacgacccgcgtgcgccgacgtggtacagcgcgccgggcggttcaccggtgttgtgtaacgggcgtgacggcgtcacgttcagcgggaaagaggcgggtctgtggccggtggggcgctatctggcgctaatcctcggtgaactgccgcggctggcggataacccgcagggctacggccccctgggtaagggatttatcgctcatgtggatattccgccgcacatcgctcaggcgtggcagacgctgcgcgacgaccgcctgctctccgatgcgctaagcgcgcgtcagctggcttag

SEQ ID NO: 179052 - DNA, 1047 bp, Klebsiella oxytoca
atgagcaacaggcttacgcagcagcttgatattgattaccccattattcaggcgccgatggccggcgtgtcgacgccggaactggcggcagcggtcagcggggccggcgcgctcggctcgctgggactgggctcgtcaaccgtagagcaggctgaaacgctgattaaccggacccggcgcttaaccacccgtccgtttaacgtcaatctgttttgccacgccccggcggtaagggatccgcagcgtgaagcccggtggctggcgcggttgcgcccggaatttgcgcgctttggcagcttgccgccggagacgctggcggaaatttatctcagttttcagcagcagccgcggatggctgagctgctgctcgacctgactccggcggcggtgagctttcattttggcgtgccggatcgtgaaacccttcgccgactgcgggaaaaggggatcgtcaccctggcgagcgcgaccagcgtggcagaggcgctgctggccgtagagcagggaatcgatatggtggtggcgcagggctacgaggccggcggccatcgcggcatctttgatccgctggcacccgacgggcagatgagcacctttactctggttcagacgataagacggcataccgatattccgcttatcgccgctggcggcgtgatggacggcgcgggaattaacagcgtaatgaaccttggcgcagacggggcgcagctagggacggcgtttctgctgtgccctgaatcgtccacggatggcggataccgtgaggcccttaaaagcgcgtctgacgggcaaacggttttaacctcggccatttccggacgcccggcgagatgtctggttaacggctggcgtgaaataaacgatccgccgctgattccggcttatcccgtggcttacgacgccggaaaggcgctggcatcggcggcgaaagcgcagggagatcgtcagtacggtgcgcactgggccgggcagggagtgagcctgattcgcgagctgccggcagcggagctgatacgcaccctggcgcgcgaaagcgggttttaa

SEQ ID NO: 179053 - DNA, 390 bp, Klebsiella oxytoca
atgacgcttaacgctatccgcatcgccaggccggtcaccgacctttcactcagtagccacatgtactgcacaggcctggggctggagcaaatcgcgcagtttgccgatcatgacggctttagcggcgtgatggtcggacgccgcgatctcggctggcatcttgaattcaccctctgccatcatcatccggtgaagccctctccgggcgaggaagatttgctggtgctttattacccggaagccgcggaatggcgggaacagtgtgcgaaaatgctgaccgccggttttgcgccggtcagcgcgttcaatccgtactggaatgtgaacggtaaaacctttgtcgacggcgacggttatcgcgtggtgctgcaaaacagaagctggccatag

SEQ ID NO: 179054 - DNA, 219 bp, Klebsiella oxytoca
atgctgatttatgacgtattcgggcgccatattggcgttcagcgccagggcgaacgctggctacttttccgcgtcgatctgaacgagcggaaatgttcgccgctgcgtgggatcatcatcccggacgatctcccggaggcggaaattcccggctggctgggcgatatttttcacgaagcggcaagcccgcgccatcctgacgtccggcttatggagtag

SEQ ID NO: 179055 - DNA, 3114 bp, Klebsiella oxytoca
atgattgccgccgttatccgctggtcattgcgcaaccgcctgctggtattgctggcgacgctgattatggccgcctggggcgtctggtcggtacagcaggcgccgctggacgcgctgccggatctctccgatacccaggtgatcattcgcgtgagctatccggggaaagcgccgcagattgtcgaagatcaggtgacctacccgctgaccaccaccatgctgtcggtgccgggagcgaaaaccgtgcgcggcttttcgatgttcggcgatgcttatgtctatgtgctgtttgatgatggaacggacccgtactgggcgcgctcccgcgtgctggagtacctgagccaggtccagagcagcctgccgccggaagcgaaagcgtcgctggggccggatgccaccggcgtcggctgggtgtttgaatatgtgcttaccgacaaaagcggccagcatagcctcggcgacctgcgggcgattcaggactggatcctcaaatatgaactgaaaaccgtgccggatgtttcggaggtggccagcgtcggcggaatggtcaaagagtatcaggtgatccttaatcctgaccggctgcgggcgctgaacgtcacccacgagcaggtgattagcgcgatccagagcgccaaccaggaagggggcggttcggtgctcgagcttggcgaagccgaatatatggtgcgcaccaccggctacctgaagtccatcgacgactttaaccaggtggttatcgctgcgcgcagcggcgtgccggtgctgctctccgacgtcgccagcgtgcgccggggaccggcgatccggcgcggcgtcgccgagctcaacggccagggcgaggtggcgggcgggataatcattatgcgctcgggtaaaaacgcgctcagcaccattaacgcggtaaaggccaaactggcggaagtgcaaaaaagcctgcccgcaggcgtggagattgttccggtctacgatcgttcgcagctgattaaaaactccgtcgagaccctgacccataagctcattgaggagtttatcgtcgtggcggtggtctgctcgctgtttctgttccacttccgcagcgcgctggtggcgatgatcacgctgccgctggggatccttggcgcgtttattgtgatgcactatcagggcgtcagcgccaatatgatgtcgctcggcgggattgcgatcgccatcggggccatggtcgatgcggcaatcgtgatgatagaaaatatgcataaggttctggagcagtggcggcacgagcaccctgaacgccagccgtcctccgccgactactggcagattgcccagcacgcggcgtcggaagtggggccggcgctgttttgcagcctgctgattatcaccctgtcgtttattccggtgttcaccctcgaggcgcaggagggcaagatgttctcgccgctggccttcaccaaaacgtattcgatggcggtggccgccggactcgggatcaccctggtgccggtgctgatgggctactttattcgcggcaaaattcctgatgaaaccgccaatccgctcaaccgctggctgattcgcgcctatgagccgctgctggataaagttttgcagtggccgaaggcgacgctggcggcggcgggcctgctgctggttgccacgctgtggccgctggcgcagctcggcagcgaatttctgccgcaaattgacgagggcgacctgttgtatatgccctccacgctgccggggatctccagccgcgaagccggacgcttgctgcagcagaccgaccgtctgatcaagaccattcctgaagtgcaaagcgtattcggcaaggccgggcgggcggacagcgctaccgacccggcgccgctgaccatgctggaaaccacgattcagttcaagccgaaaagcgaatggcggcccggcatgaccatggataagctgatcgaggagctcgacaatacggtgaaggtaccggggatagctaacgtctgggtaccgccgatccgtaatcgcctggacatgctggcgaccggcatcaaaagcccggtcggcatcaaagtgaacggtaacaatctggcggagatcgaaaagaccgccgaagagattgagcgcatcgtgcgtagcgtaccgggggtaacgtcggcgctggcggaacgccttgacggcggccgctatatcgatatcgctattgaccgggtgaaagccgcccgctacggcgtgtcggtgaaggagctgcattcaatcgtcgccagcgtcgtcggcggcgataacatcggcgaaaccatcgaggggcgagaacgttacccgatcggcgtccgctacccgcgcgaaatgcgcgactcgctgcaaaagctgcgcgatctgccggtagtgaccagcggcggggcgcaggtagcgctctcggaactggcggacatcaccattaccgacggcccgccgatgctgaaaagcgaaaacgcccgcctgtcggactggatctacgtggatattcgcgggcgcgacttaaaatccgcagttgatgaaatgcagagcgaggtcggcaaacgggtcaggctgccggaaggcatctcgctgacctggtccgggcagtatgagtacctcgagcgcgccaccgcgaagctgaaaatcgtgctgccgtttaccctgatgattatctttatcctgctttacgtcactttcagccgcgttaaagacgctctgctgattatgggaactttgccgttttcgctgatcggcggcgtctggctgctctggctgctgggctacaacctgtcggtagccgccgccgtgggctttattgcgcttgccggcgtggcggcggagttcggggtgattatggtgctctatttgaaccaggcgatcgcgaaacgccgccccgagctgaacgatcgcgcgctcaacgaggcgattcatgaaggggccgtgctgcgcgtgcgcccgaaagtgatgaccgtggcgacaatcatggccggactgctgccgattatgtggggagggggcaccggatcggaggtgatgcagcgtatcgccgcgccgatgatcggcgggatgatcaccgcgccgctgctctcgatgctggtgatcccggcagtctatctcctgacgcaccgtaacaaacgctaa

SEQ ID NO: 179056 - DNA, 1248 bp, Klebsiella oxytoca
atgcacatcttcaataaggcggcctgcgggctgccgcttttactgtcgctgatgtccaccaacggctgggcaacgacgctttctgaggccctgtcggcagcggaaaactactccgccgagctctccgccaacgatcatcaggttaacgctttgaagaatatggcggattccgcgatgcagctccccgatccgaagctgaaatttggtattgaaaacgtcccgctgggcggcaataacgccggccgtctcacccgcgaggggatgaccatgcaaagagttggcgtgatgcaggactacgtcagcagtaccaagcgtgaacggaaagccgactccattaccgccgaggcgcgccagaccgccgctaatgccgatgttattcgtgcccggctgcagcgggaaaccgcccaggcgtggctggcgctggcgctggcgcagaagtcgctgcgctcggtgcagacgttgattagcgaaacgtcccggcaaatcgacgtacaaaaggccggcgtcagcagcgccagcgccagtcccagcagcgtgctggacgttcagctggcgctgaatgcgatgaaaaatgagcaggataacgcccgccgcgatgtacagatcgcccaggcacgcctgttgcagctcaccgggaaggagatccgcgatatctccggcccgctgccgcgcattgaacgtctgcctgccgacgaagccgacttaatggccgggattaaacttcacccggaagtgatccaggccgccagagaagccgatctggcgaaagcgaaatcaggtcagtcggaagtcgcggcgatccccgacgtgggcgttgaggtttattacgcccgacgcggtgatgattatgacgacatggtgggggtcatgtttaccgtcgatatgcctatttttcagggcaaacgtcaggacaaagaccacgcagcggacgtctcccgtacctatgaagccaacgatcggctgacgttattgatgcgcgaacatcaggcgcagcagtatcagctgatttcgcaatataacgccgcgaaagccatttacgatcgccagcaaagcgagatgctgccgctgctgcgcaagaaggtgagtctcgtcaatgcccagtatcggggcggcagctccgcgctgcctgaactgctcgccgcccgtcgcgatctcctgagcggagaaattgccagcaacaatgcggagaaagcgcttgccgatgcgtgggccgctattcgctaccttattccacaggatgttaaataa

SEQ ID NO: 179057 - DNA, 369 bp, Klebsiella oxytoca
atgcgttcgacctctatttttctgcttattaccagcgtactgaccttttccttcagcgcatttaccgccagcgcggaagacgccgcgatgcaccatcacaccatgtcatccatggcggatatgccggagatgaagaaggcggatgattccgccacgctttattcggccagcggggtcattaaagcctggcgcgacgatgccgtcgtgattgcccactctcctgttaccgagctgaactggccggcgatgaccatgagctttgcgctcgctgataaccacgataaaaagctggcggtgggagagcaggtcgatttcaccttccgccagaccgactccggctacgcgatcgtttcaattaccgcgcgataa

SEQ ID NO: 179058 - DNA, 801 bp, Klebsiella oxytoca
atggcgttaatcattaaggtgttactcgaaaaccggcttggcaaggggcaggacagactgctgcaggcgaaacccggattaagcctgcttgtggaggatgaaaccagccgggtgctatttgataccgggccagacggcacttttcttcataatgcgcagcgtatgggcgtctctttatctgacctgaccgccacggtgctctcccatggacattacgatcactgcggcggggtgccgtggctgccggacaacagccgtattatttgtcatccgcagattggactcacccgctactcggcgttatctctcgcaggacgcaactggaaaatcaaaaagctgtcgcgagacatcgactactcccgccaccgcatggagtacagccgcgagccggtggcgatcggcgaacgactgctgtggtccggtgagattacggtcgctcacccgcgtgcctatggcctcctgacgggtcaatcccagggtgaggactatattgtcgatgaaggcgtcctgatctaccgctcgatgcgagggttagtcattatctgcggctgcggacaccgcggattgatcgatacgattcgccactgccagaagatcaccggcgtccagcggatacgcgccatcatcggcggccttcacctgcgcagcgcgccgccgtgggggatacgtcggctaaagcagttcttgcgccagcagaaggtcgaggaggtgatggcctgccactgcaccggttcatgggggcgctggtggctagcggagagtagcgcgccggcaaccggcgatacgttggtgctggaataa

SEQ ID NO: 179059 - DNA, 753 bp, Klebsiella oxytoca
atggcagactggaatccttcactttatttgcaattcggcgctgagcgtacgcggcccgccgccgagcttctcgcccgcatcgcccaccatcccgccacgctggccgttgatctgggctgcggacctggcaacagtaccgctctgctgcgcgatgcctggccagatgccacgattatcggcgttgataattctccggccatgctggaagaggcctcccggcggctgccggactgccggttcgtcgaggcggatatcggtacctttcgccccgagcggccggcggacgtcatttatgccaatgcttcgctgcagtggctcacggatcatcagcgccttttcccatatctggtcagcaatcttgcgaaaaacggcgtacttgcggtgcaaatgccggtgaactggcaagagtcctcgcacgcgctgatgcgtcaggttgctgaagagctggggcatccggccagtgggcggcagccgctgccggatgtgtcggagtattacgatatgctgaccaccagcggctgcgaggtggatatctggcgcaccacctaccatcacccgctggcatcgcaccaggccattattgaatggctacagtcaacgggcctgcgaccgtttttacaaccgcttgatgaacagcagcgccaggcgtttctcggacgctatctggagcggctgaaacagcactatccgttacagtgtaacggaaaggtactgctgcgatttccgcgcctgtttatcgtcgcgcgccgctag

SEQ ID NO: 179060 - DNA, 441 bp, Klebsiella oxytoca
atggtcattgaaattcgtgaagtgtgccagcaggacaaagcgcagtggctacagctttgggaaggctatacccgtttctacggtagcccgcagccatccgacgtcacggaatatacctggcagcggatgcttgattccgcttctcccatgctgggccgggttgccctggcggatggcaacatcgctggatttgcgatttgtgtccttcacgaaggcacctgggtaaagacgcctgtttgctatctggaagatctgtttgttgccccgccgatgcgcggaaaaggcatcgccagggcgttgatgcaggcgctgcaagcggaagggaaagagaaagggtggtcgcggctgtactggcacactcgtactgataatccggcccggcgtctgtatgatgaatttacgccagccgatgactatgttcgttaccgcgtgacgctctga

SEQ ID NO: 179061 - DNA, 1011 bp, Klebsiella oxytoca
atgactgaaaacgctgaaatcctgacaatctcatccgtgacgttgtcacgccaccgggttgtcgccctcgcctacgatggcctgtgtacctttgaatttggcgtcgccgtagagatcttcggcctgccgcgcccggaaatgggcgaacgatggtatcgctttgccgtggccgccgtcgacgacggtgagctgcgggcaaccggcggaattcggctcatgaccgatggcggtatggcgctattaggcgaagcggacaccatcgtggtgcccggctggcgcggtattgactcccccgtgccgtcagcgctgtgcgaggcgctggtcgccgcccatgcgcgaggctgccggataatttctatctgctccggggttttcgttctggccgcggccgggctgctgaacggccgccaggcgaccacccactggcgctataccgaccagctgcgggcgcggtttccgcgcattgaggtgatcgatgacgtgctgtacgtcggcgccgaaggcgtcatgacctccgcaggcagcgccgcgggtatcgatttatgtttgcacctggtgcgcgaggacttcggcgtcgaagcggcgaatcttgtcgcccgacggttagtggtttccccccatcgcgacggcgggcaggcgcagcagattgttcgcccggtggccaaagcgcgggagagccagaggctggggcaattatttgatttcctgcaccagaatctcgccgctggccacaccgtggcctcgctggcggaaagagccggcatggggcatcgcacgtttttacgccgtttcgaagacgccaccggcaaaacccccgcccgctggctgcttgacgagcgccttcagcgcgccacgcagcacttgacccacagccggctgagcgttgagcagattgccgagctttgcggtttctcaaatgccagcaccctgcgccatcacttccgccagcagtttgcccttagcccgttgcagtacaggaaaagcgcgctggcgggtaaaaagggggagtga

SEQ ID NO: 179062 - DNA, 978 bp, Klebsiella oxytoca
atgaatcaacaatttacctttactattaaacgcactctctttgatgaaaactataacccctcagaaaatacgcgtattacaaccaactttgctaatttagcaagaggggaaaatcgccaggagaatctgcgcaataccttagtcatgattgacaatcgtttcaatacgctggcgcactgggataaccccaaaggcgatcgctatgccgttgtgctggaaattatttcagccgaaatgaatatcagcgccaccggcgatacctttccggtgattgaaatattgcaaaccagcattattgataaaaagaccgatgaacgtattgagggtatcgttggcaataatttctcttcgtacgttcgcgattacgactttagcgtattgctgttagaccataataaaggacgcgcaggttttagccttccggaaggattcggcgatttgcacggcaacatatttaaacatttcgtcaattcagcggagtacaaggccaatttcaaaaaatcaccggtcatttgccttagcgtctccagcaaagacacctatcaccagaccggaaatcaacatcctgttctggggctcgaataccggccagagggttcatcgttgactgagcaatattttggcaaaatgggcctgaaggttcgctactttatgccgaaaaacagcgttgcgcctttggccttttatttctcaggggatttgctgagcgattacacgagccttgagctgattagcaccatcagcacgatggagacgttccagaagatataccgcccggagatctacaacgccaactctgccgcaggactctgctatcagcccgatctgcatcatcaggaccattcattaaccaaaattgtttacgatcgtgaagagcgcagccagctggcggtagagcaggggaagtttaccgaagagcactttattaaaccgtataaaaatattctgcagcaatggtctgctcattacgctctttaa

SEQ ID NO: 179063 - DNA, 282 bp, Klebsiella oxytoca
atggtctggcgtcagcccatgctgtatctcgttgaacagagccagccgctcttgccaacgagcttgtcctcccggttaaacatccgcacattttcctgtcgcctgtatgagttgatgctgaagcaagaaacatcagaggtcggccaggctaaacacgacctcaagcctggcgtctttgttttcaacaaccgttctcttcatgctcctttgcgctctgtcgggcgcgatcgttggaggaatatggaagtgggaccggcgcgttttcatgctttactttggtga

SEQ ID NO: 179064 - DNA, 1209 bp, Klebsiella oxytoca
atgctgacaactctgatttacagaagtcagatgcatttaacacaagaaaccgatctcatactgctggttgaaaaagcgaatgctgagaacgcagcacgcgggattacgggcatacttcttttaaaagataatgtttaccttcagatacttgagggggatgagtgcgtgcttgagcagctattcagcacgatcaagcaagacgatcgtcaccatcaggttgtcgagctgatgcgtgattacgcgccgcgccggcgctttgaaaacgtagggatgatgttttttgacctgaataaactgcaaaccgctgacgtcctgacaaaggttcgccagcttagccaactgaaaggttatctttccaccgaagagcgcgtctataaatttatccatacttttatcagtcaaaaaagcgctgctgcgccgtcaccctttttacggcctgacaaatggtcgcttcattcgcggaaacatgcatttcatgcgccgcaagaatcgttttttgccggtcaatgctgtcagtttgctttccagcccattatcgaaccgttggccgggaatatcacttcgcttgaagcgcttattcgtgataaagacggcggtagtcccgccaatttctttgcctcgattccgccagagcaacgttatgaagttgatctcaaagcgaaatcagttgcctttgccctggcgaaagaaatcaatattggcgaccataaaatatccattaatatccttccgatgtctctggttgttattcctgatgccattgaatacctgctgcgggaaataaaaaaacagggtcttgaacccgaacaggtgatcgtggaggtgacggaagatgaaatgatctccggttttagccagttcagcagcgcgataaaaaaactgcgcgtctctggtatggggctggcaattgatgactttggcgccggttatgctggactctcgttgttgacaaagattcagcctgataaagttaaaatcgaccgcgagattattaccgatatccatcagagcggccctaaacaagcggtggtaagatcgattatcaactgctgccgtgaacttgagattgcggtggttgccgaaggcatagagcggatagaggagtggtgctggctcgaatctgcgggtattaaacgtttccagggatttttatttgccatgccgaaagtcaacggcgtcggtgacatacgctggcctggggaaaagtga

SEQ ID NO: 179065 - DNA, 591 bp, Klebsiella oxytoca
atgcgctgttttcacaccgcggtgtcagaaaatttccccggcttatacttttttatccagcataaaatgctgttgaccggggggcggcagggcgcgctttttttagcgccattcggctatgctgaaagccaaagcaggcgagtgaaaggcaacgtcatgatgatattaaaagataaagagcacgtggactcggttgactggctgacggtggcggagattatcgccgccgcaggtctcaatcagcgggacgtcgcgctggtggagcgcgcgtttcgccatagtaccttttgctggtttggctatgaaaacgggcagcttattgccgttgcccgggcgattagcgacctgacctggtgcagctatctggcggatgtcgcggtgcacccgcgctgtcagggaaaggggtacgggcagcagctgatgcaatcggtcagcgaccggctgcggccgttcggcaaaaccttcatctactcggtggtggataaagtcggcttttatcgccgctttggttttgaaacgctgaccacgggcatggtctgcgccagcgaagaggcgatagcgcgtatgcgcgagcagggatttgttggctag

SEQ ID NO: 179066 - DNA, 3108 bp, Klebsiella oxytoca
atgcaacaacacgacactcattccgccgcaggagcaacgttccatcagattctcgcccgcgaagactggcagaaccagaccattacccatctcaaccgtttaccggcccacccgactttcgccagctggcgcgataccgacgcggcgcgaaaaaaccagccctcggcgttccgccgccggcttgacggccagtggcagttctcctgggcccgcagcccgtttgacgtggatgcccgctggctggaagacgatctgccggacagccgcagtacgccggtgccgtcaaactggcaaatggaaggctacgacgctccgatctataccaacgtccgctacccgatcgacactacgccgccgcgcgtgcctgaggagaatccgaccggctgctactcgctgacgttcagcgtcgatgagagctggcgagccgacggccagacgcagattatcttcgacggcgttaattcggcttttcatctgtggtgcaacggcgaatgggtcggttattcgcaggacagtcgcctgcccgcggccttcgatctctcgccctaccttcagccgggcgataaccgcatctgcgtgatggtgatgcgctggagcgcgggtacctggcttgaagaccaggatatgtggcgcatgagcggcatcttccgttcggtctggctgctgaacaaaccgaccctgcacctctgcgacgttcagctcacgccgcagctcgatgcgctctatcgggatgccgagctgctggtgaacttaagcgtcgccgcgccggtcgcgctgctggaggcgctgacggtgaagatcgaactgtgggatgacgatcgtctggtcgccagtcaccagcagtcgccgggttcgccgattatcgatgagcgcggaagctatgccgaacgcgcggcgattcgtctgccggtagagcgaccggcgctgtggagcgcggaaacgccaaactgctatcgggcggtggtgtccctgtgccgcggcgatgaaacgatcgaggctgaagcctgggatatcggctttcgccgggttgaaatcaaaaacggcctgctgctgttaaacggcaaaccgctgctgatccgcggcgtcaaccgtcacgagcaccatcaccagcgcggccaggtggtgaccgaagaggatatggtgcaggacatcctgctgatgaagcagaacaactttaacgccgtgcgctgctcgcattatccaaacaccccgcgctggtacgagctgtgcaatcgctatggcctgtacgtcgttgacgaagccaatattgaaacccacggcatggtgccgatgaatcgtctttccgacgatccggcctggctgccggccttcagcgcccgcgtcagccggatgttgcaaagcaatcgcaaccacccgtcgattattatctggtcgctggggaacgaatccggcggcggcggcaaccatgaagcgatgtatcactggctgaagcgcaacgatccctcccgcccggtgcagtacgagggtggaggcgccgacagcaccaccaccgatattatctgcccgatgtacgcccgcgttgagcgcgatcagcggattccgacggtgccgaaatgggggatcaaaaagtggatcagtctgccgggcgagcagcgcccgctgatcctctgcgaatacgcccacgcgatgggcaacagcctcggcaactttgctgattactggcaggccttccgcgactatccgcgcctgcagggcgggtttatctgggactgggccgatcaggccatcagcaaaaccttcaacgacggcagcgtcggctgggcctacggcggtgattttggcgatacgccgaacgatcgccagttctgtatgaacggcctggtcttccccgaccgccgcccgcacccttcattaattgaagcgaaacacgcgcagcagtacttccagtttaccctgcttgcgcaatccccgctgcgtatcagcatcagcagcgaatatctgttccgcgccaccgataacgaagcgctgcgctggcaggtccaggccgccggagaaacctttgccgagggtcaagtgaagcttgagctgagccctgaaggccagggcgagctgacgctgtgcgatgcgctgacgctgcccgtgggcgccgaagcggtgtggctgacgctggaggttgtccagccgcaggccaccgcctggtccgacgccgggcatcgcgtcgcctggcagcagttcccgctcgccgccccgctggcgctgcgcctgccttcccccgtcggcacggcgccagcgctggagagcagcgacgcggcctggaccgtacgcagcggctcgcagcaatggactatcgaccgggagagcggcctgctgacccactggcaggtagagggtgtggaacagctgctgacgccgctgcgcgaccagtttgtgcgcgccccgctggataacgatatcggcgtcagcgaagtggagcgcatcgaccccaacgcctgggttgaacgctggaagagcgccgggctctacggcctcagcgcccgctgcgtacagtgcgacgcccagcgcctggcccatgaagtagttatcgatagccgctggcactatctgcgcggcgacgaagtggtgattgtcagccactggcggatgacgtttgatggcgaaggcaagctgcatctggcggtcaatggcgaacgcgccggcaccctgccgccgctgccgcgcatcgggctgaatttccaggttccggaccagcatcaaccggtttcctggctcggctacggcccgcatgaaaactatccggaccgccgcaccagcgcctgtttctcccgctggcagctgccgctggaagagatgaccacaccgtacattttcccgacggaaaacggcctgcgctgcgataacaaagcgctggactgggggcgctggcacgtcgcgggcgatttccacttctccgtacagccctacagcaccgcgcagttaatggagaccgatcactggcacaggatgaagccggaaaacggcgtctggatcgcgctcgatgctcaacacatgggcatcggcggcgatgactcctggacacccagcgtactacagcaatggctgctgcttgagacacaatggcaatatcagttaacgattcatttccaataa

SEQ ID NO: 179067 - DNA, 255 bp, Klebsiella oxytoca
atgaactataagaaagtactgaagaacacgttgctgcttgctcccgtggcgatcctgagtctgcaaacccctgtctggggcgcagaggccacgaaaacggcgacctgccagaaggcgtcgcctgcggtggacaaagaaggcgtgccgttaccgcccgttgttggtaaagagggcgcgcagccggcctccgctaaagacaagtccggccacggcggcgcaacggccaactgtcagcctgcggccatcgaaaattaa

SEQ ID NO: 179068 - DNA, 621 bp, Klebsiella oxytoca
atgactgtatttaaaagcttgctcttctttcttggcgcggcttctgcctgcgcattcgtggtattgtgcctttgggtcgatatccacttttgggattataatatttctgaattatcactcaccgaaattgtacaggagctggttttaacggccatcgtttttattcattttcggcttgcgaagcagtataacgccatgcgctactgtcatattcttgttggcggctttttccttgccatgctcattcgtgagctggacgccctttttgatcttatttctcacggcagttggctgtggtttgcgctgattgcagccctgttagccttaatttatccacttatccattatcgtcaaaccctggcacagctggcgcaatatacccgtacaccctggtacggcgtattaatcagcggcctgttggctattctggtcttctctcggctcttcggcatgcagggcttatggcatgcaattctcaatgatggatatgtcagagtggtaaaaaatgtcgtcgaagaaggctgcgaatcatttggctatatgctttgtctcaccgcctcttttggccattatcgtaattttcgcggaacctggggcagacatcatattgagccccgttga

SEQ ID NO: 179069 - DNA, 261 bp, Klebsiella oxytoca
atgtatagttaccttgatatagaaaaaatcaaagccaatcttgagtggattgttaatcaatcttcagcaaactctgagatgccctccgtttccgatcgcaaaacaatctacagccttctggagctcatacagacctatgacggactgctggagttaattgcccaatacggaattaccgtagtcgataaggaaatcatcgaaggcttgtcccttacagaaaggtttatcgctaaggtcaaatcgaatgcgaatgcattttag

SEQ ID NO: 179070 - DNA, 315 bp, Klebsiella oxytoca
atgcatgccgttgatttgatacttccaccgcgtagctatccgggacgcgttgagcagggcggtttaacccacgaacagggccagcgcttccgcgaggccattttgtctcgcggcacgggttttgatttaactgcgctttattgccagtggcgcgagcgcgctgttaagagtgaactgatgctggaaaaccgcggtgtcagggcatggctaaaatgcattcgcattcgatttgaccttagcgataaacctttctgtaagggacaagccttcgatgatttccttatcgactacggtaattccgtattgggcaattaa

SEQ ID NO: 179071 - DNA, 630 bp, Klebsiella oxytoca
atgctaaaaatcgccatcattaccaaaaacatttatttagaaaaggccatagaggaacttacccaagaaatttccagcaccaaaggcataagcgacctttgtttccaaagaaacaacatacaagatcacctcacaaaaccagacataatttttactgagatggaggttggcgagtatttattatgtcaggaaatgaaaaaatacaaatcagagtgtccagcggtggtaattttcaccaaaaaagaaataacgtttaatccttgcctgctgcctttatgcgttcaaaatgctgtcattttatttcataaaaacagccttgaaacaatcaaaaaaaacctgtctattctctttgatgaatttatcgcgggcgataagaaacgtataacgatagtgaagaatcgctgtttaaaatgcccgcatcagtcattgagtcgttcgcaactaaaaatcattaatgccataaatcttggccttaacaataatgaaacagcaaaaaatctgggcatcgatcacagaaccgtatactcccataaattgcgaataatgaagaaattccagttagaaaacaatcaggagcttatcagattctcttccatcgttatgagaagaacatctctctattttaattag

SEQ ID NO: 179072 - DNA, 822 bp, Klebsiella oxytoca
gtgctgagttcaaagtatgcagagcacaccccgctgtaccgccagtctgaaatatacggccgccagggtgtggagctgagccgctcactgctgtcgggctggatggatgcgtgttgccggctactgtcaccgctggaaggggcgcttcaggactatgtgctgactgacggtaagctccatgctgatgacacgcctgtcccggtgctgttgccaggtaataagaaaacgaagaccgggcggttatggacctacgttcgtgacgaccgtaacgccgggtcagagctggcgccggcagtgtggttcgcttacagcccggacagaaaaggtatccacccgcagagccatctcgctggcttcagcggtgttctgcaggcggatgcgtacgccgggttcaacgaactgtaccgcaatggacagataacggaagctgcctgctgggctcatgcccgccgcaagatccacgatgtgcacgttcgcaccccgtcagcgctgacggaggaagccctgaaacggatcggtgagttatatgccatcgaggcggaaataagggggatgccggcgaagcgacgccttgcagaacgtcagcaaaaagctaaaccgcggctgaaatccctggaaagctggctgcgtgaaaaggtgaaaacgctgtcgcgacactcagaactggcgaaagcgttcacgtacgtactgaaccagtggccggcgctggcttactatactgacgacggctgggccgaggcagataacaacatagctgagaatgcgctacggatggtcagcctgggccgcaaaaacggcactgttgcaaatagtcggtggtga

SEQ ID NO: 179073 - DNA, 495 bp, Klebsiella oxytoca
atgaacagcttacttcctgacaatatcgatgaactgaaacgtctccttgccgaacaggaggcgctgaaccgtgcccttctggaaaagctgaacgagcgtgaacgcgaaatagatcacctgcaggcgcaactggataagctgcgccggatgaacttcggcagccgctccgaaaaagtctcccgccgtatcgcgcagatggaagccgaccttaagcagttgcagaaagaaagcgatacccttaccggccgggtggatgacccggccgtgcagcgcccgctgcggcagacccgtacccgcaaaccgttccctgaatcacttccccgtgacgaaaaacggctgctgccggcagcgtcatgctgcccggaatgtggtggtacgctgagttacctgggtgaagatgccgccgaacagctggagctgatgcgcagcgccttccgggttatccggacagtacgtgaaaagcatgcctgtactcagtgcgatgccatcgtgtag

SEQ ID NO: 179074 - DNA, 348 bp, Klebsiella oxytoca; identical to SEQ ID NO: 16878

SEQ ID NO: 179075 - DNA, 405 bp, Klebsiella oxytoca
atgaaatcattaaccgcagtgcgtaaaaaaagccctaattatcccgttgagttcaaaatcaaaatggttgaactctcgcatcgaccagagatctccgtagcgcaactcgctcgtgagcatgggatcaacgataatttgctgttcaagtggcgccagtactggcgcgaaggaaaactacgtcctccttcaacaatagaaaacaacgtgcctgagctgctcccgataacacttgatgccgaagatgttgtccctgcaacctccccccggtcacaacctgtagctgctgcggcacctgaatcactcaatatcagctgtgaagtgacgttccggcacggatcactccgtctgaatggtgccatcagcgaaaatatcctgaacctgctgatacgggagctcaaacgttga

SEQ ID NO: 179076 - DNA, 909 bp, Klebsiella oxytoca; identical to SEQ ID NO: 98240

SEQ ID NO: 179077 - DNA, 975 bp, Klebsiella oxytoca; identical to SEQ ID NO: 98239

SEQ ID NO: 179078 - DNA, 672 bp, Klebsiella oxytoca; identical to SEQ ID NO: 129616

SEQ ID NO: 179079 - DNA, 789 bp, Klebsiella oxytoca
atgaataataatttcccggcaggtatcagggataacacacggaacacctcgatgaatctgccagtagccatcgattaccctgccgctctcgcactgcgtcagatggcgctcgtgcaggatgaactcccgaaatacctgctggcgccggaagtcagcgccctgctccattacgtgccggatcttcaccgcaagatgctgctggcgacgctgtggaacaccggcgcgcgcattaatgaagcgctcgcgctgacccggggggatttttcgctggcgccgccgtatccgttcgtgcagctggccacgctcaagcagcgcaccgagaaagcggccaggacggcaggtcgtgcccccgcaggcagtcaggtccatcgtctggttcccctttccgatcaccactacgtcagtcagctgcagatgatggtggccaccctgaaaattcccctcgaaagacgaaacaaacacaccggcagaatggagaaggcgcgtatctgggagatcacagaccgtaccgtccgcacctggcttagcgaagcggtggaagccgcagcggccgacggggtgacgttctcagtaccggtgaccccccatacgttccgtcactcctacgcgatgcacatgctgtatgccggcataccactgaaggttttgcagagcctgatgggccacaaatcgattagctcgacggaagtctatacgaaggtgtttgcgctcgatgtagcggcacgccaccgcgttcagttccagatgtcggcggcagaggcggtggcgatgctgaaagcaaagatttag

SEQ ID NO: 179080 - DNA, 837 bp, Klebsiella oxytoca
atgctgcaggccatctgcgacctcaagacactgaagcttgaatccggctcgttcgttgaggatgacctccgtcagtatttcagcgacgtcctctacagcctgaaaaccaccgccggggatggctacgttcacgtactcattgagcaccagtcttcaccggacaggcatatggcgtttcgcctgatacgttatgcggtagccggcatgcagcgacatctggaggtcgggcataaaaaactgccactggtgataccggttctgttctatacaggtaaacgcagcccgtatccgtactccacacgatggctggatgagtttgacgatccggcgctggcaggcaaactctacagcagcgcttttccgctggttgacgtgaccgttattccggacgacgacatcgccggtcaccgtagtatggctgccctgaccttactgcagaaacatattcaccagcgcgacctcgctgaactggttgaccgcctggcgcccatcttactggccggctatctgtcttcatcccaggtcatatcgctggtacactatatagtccaggcaggcgaaacagccgacgccgaagcctttgtacgcgaactggcactgcgtgtgccgcaacacggggacgcacttatgaccatcgctcaacagcttgaacagaagggcatcgagaagggaattcagctcggtgaacagcgtggtatcgaaaaaggccgcaacgaaggcaaactggaaggcaagctggaagttgcccgtaccatgctccagaacggtattgaccgcaataccgtgatgaaaatgaccggcctgacggaagacgacctggcgcagatccgccactga

SEQ ID NO: 179081 - DNA, 891 bp, Klebsiella oxytoca
atgatggaaagaattgcaataacagatgaagaattaaatagcccagaaatgattgaattggtaacctccatccctgccagcctactggatattaactcgcctggaatatctcccgaagttagaaaaaaaatacttaaagacaaatacaaacagagagtaatagcagatggtttagaaaccgggcaaataacattaacagaaaggggatatgtattcagttcatatcaaacaccaagctcttttgctgggcttgtgttcgaggcttaccttgtagagcaatttaacagtaatgaaaaggctgggctgcgagcatttcagtggtgcacagaaaggtcagaagggtggtcaaataaacctttcctagattgcaaagctgtcggaacaggactgttatctacaaaaagacagctgattggtcatttttcgccacacagtaatgccgatattatattcattcgtaaaaaccccaatgtagatgttatggagccagtgttaattcataaccaaaataacgcagcatccatacaggttaaaagcataaaattcaatttcaaagaagaaatagtcgataaggtcctgtcagggaaatacagacgagtcataactatgttaagcgatcatgataaaagacggtcatgggtcatttgccataatattttactaaaaaagttgcactccggatatatcactaaagaagaatatgctgatgcgattagtagaattcagggtcctgaatattttgagctaagtcagcaagacgcagatgactaccatgaatatattatggagtggcaccgtgggcaggtaaaccctacatcccatattactgaagccgcttctcaggagataattggttataaatacgagaacggcctcctggttcctgtttaa

SEQ ID NO: 179082 - DNA, 312 bp, Klebsiella oxytoca
gtgacagagacacgttacacaacgtctaaaagcaaaaaagccctgaataatcagagctttattactggattggaaatgacggccatcaaatccaattcaaaacacaccaaaggcatgtcctcaagtgatgaagataatagaaaactattcaatctacgtcaaccgaatgcctgcggtaacaatcccaaagccgttatcggagttacgattatgttgccattgctcgacacgttcatgaatgcccctcttctgagtcagggggctactatcctgtttcttgggcttcttatccttgcgctcaagaaccagtga

SEQ ID NO: 179083 - DNA, 204 bp, Klebsiella oxytoca
atggcaactgcgtgggtggatgtggctgataatgccgtaaaaataggtttggggtcactgttgactattttagggggggtgactcttaagctaacacaaaagcacgaattaaaaaaagaagcggcagtacagagattaaaagataaagaaataaaaaccaaacgatatgttgagtttctggtcttatctcaatctctcatgtaa

SEQ ID NO: 179084 - DNA, 318 bp, Klebsiella oxytoca
atggggcttaccggtgtgctccgcggtaaaaaagtgcgcaccaccgtcagccgtaaggccggtgccgcacataaccgtgtcaaccgccagttcgtagcaaaacgtcccaatcagctttgggtggctaattttacctacgcgagcacctggcagggctcagcgtatgtggcgttcatcatcgatgtgttcgccggcattatcgttggctggcgggtctcagcgtcgatggagacgacgttcgtactggatgcgctggaacaagcactgtggggccgtcgccagttcggcaccatccaccactcggataaaggctcgtag

SEQ ID NO: 179085 - DNA, 990 bp, Klebsiella oxytoca
atgctggttttcaaaaaccaggcgggtggcacgctgacgtacctcgggggaaaactgattgttttttgtcatcctgttacctctctcaaggagtttagcctccaggattcccggggcggttcaatgactgttgcaacccatggtagaatgttggtattcacagatgttcttagcagatttgacagcttggatggcactatgatgaataagaccttagcagaaagatttgaagaacttgaacgggactaccatgccgttatctcgacaaaatatataggaaaaaacgtgttcggtcatggaagtcaagaatatattgattcagctaaaggtaataactggattgcgagagcaaaaaaattactcgaagacagttatggaaagaattctgattattacaatgattttaatgatacaaaaaaaatctcttggtctagtaattatcagagtctggtgagtcattacaaacctctttttgatgcagctagagaagatttggcgaattgcgctattgttcagactaatacaactgaaagctccgagctggaatggattataaatattcttgagcgattccctgcgttctgtcgtcagttaagagaacggcacgacggtaggacaactcttgtaattaacgatgaatacgacgtacaggatctggttcatgcgcttctgacgctgcattttgatgatatcagagaggaagaggcttcgcccagttgcgccggatcatcatccagacaggactttcttctgaagaaggagagaatagttatagaggtgaaaaaaacccgaaaatctcttggcgcacgtaaaataggtgaggagctgattatagatatggcacgttaccgtgcgcatcctgactgcgatatgctgatctgttttgtgtatgaccctgacggctgggttaaaaaccccaaaggcctcataagcgatcttgagcagggtgatacagaaggaaagaccaaagtagtgatagcgcagttttga

SEQ ID NO: 179086 - DNA, 756 bp, Klebsiella oxytoca
atggcggaaatagcggttataaatcataaaaaacgtaaaaatagcccgcggattgtccagtcaaatgagctgactgaggcggcatatagtctctccagggatcaaaagcgtctgctgtatctgttcgttgaccagatcagaaaatccgacggttccctgcaggaacatgacggcatctgcgaaattcacgttgctaaatacgctgaaacattcgggctgacctccgctgaagccagcaaggatatacgacaggctttaaaaggttttgcaggcaaggaagtggttttctatcgccctgaagaggatgccggcgatgaaaaagggtatgaatcctttccctggtttatcaaacgtgcgcacagtccatccagagggctttacagcgtacatataaacccatatctcattcccttcttcatcgggctacagaaccgctttacgcagttccggctcagtgaaacaaaagagattaccaatccgtatgccatgcgtttatacgaatccctgtgtcagtaccgtaaacctgatggctcaggtgtcgtgtctctgaaaatcgactggatcatggagcgctaccagctacctcaaagctaccagcgtatgccggattttcgccgccgtttcctgcaggcaagtgttgatgagatcaatagccggacaccaatgcgtctctcttacatcgagaaaaagaaaggccgccagacgactcatatcgtattttccttccgtgatatcacctcgatgacaacagaatag

SEQ ID NO: 179087 - DNA, 972 bp, Klebsiella oxytoca
atgaatatttactgcgatgatggttcaactaatgttaagctggcatggtttgaaggagatgagcttcagacacgggtctcagcgaactccttccggcatggctggaaagtggcggaattcagtgcggcaacgttcaattatcaggtgggtacgctgaaatacacctgggacagcgtcagccgggatgccatcccgacaaccaacgtggaatatcagtacggtgatctcaacctgctggctgtgcatcatgcgctgctgaacagcggactggagccgcagccggtgagtctgaccgtgacgctgcccctgagtgaatattacgacggggactgccagcggaacgaggagaacatacgacgcaaacgggaaaacctgatgcgtgagctggttctgaacaagggcagggcgtttaccgtaacggacgtgaaggtgatgccggaatcgctgccggcggcgttctcccgtctcgcggagctgaaacccggccccgcggagaccaccctgattatcgatctcggtggcaccacgctcgatgccggtgtgattgtcggccagtttgatgatatcagtgcggtgcatggtaatccgtctgttggcgtgtcacaggtcacccgggcagctgcaggcgccctgcgggcggcagacagcgaaaccagcgccctcatcgctgacaccgtcatccgcaaccgcaatgatcgtcagtatctgcagcgtgtgatcaacgatgccggcaaaattgacgaggttcggaacaaaataacagaggcaatcacctccctgggggcgcgagtcaccagtgagctgacggccttcaggaacgttaaccgggtattcctggtcgggggaggggcctccctcatagaagaagctatccgtcaggcctggcctctggcccctgaccgtatcgaggttataggcgatccgcagatggcgctggccagggagattgccctttacagtaaggaggactaa

SEQ ID NO: 179088 - DNA, 672 bp, Klebsiella oxytoca
gtgccggacggccagtattctttctatctgcacagcgacgatcgcaccgacatcgcggcgatggcaaccatcagcaccatctcacagcccctgcgcggtgagttcatccgtaccgctgccaccgccggggcggtggtataccaggtggatgcccgtttaccggcgctgatcccggtgttctttgccgggcagctgagtgctgtccgcctctgcgccttgatgaccctggtctccggaacctggtccacactcaccggccttccggatgagcctgatggcggcgtggtggatctgcccatgtcaccggagacagaataccagcgccggcgttacaccctgacgcttcaggggggccggagcggagaacgggtggaaagtgtgctgacggaagcgtcatcccgtctgcgtggcgatctgctgagaaacctgattatcaccggtcttgccctccacacgacggcgccggagctgccgcgcctgctggccagtatgccggtaccgcccacctcggtcagtgagctgcaggcactggttcagcagatggccggcaccgctgacgtgcgcagggctgcagctgcagtaccggatacgccggcaacatctgccgtgccggtgtccgggtcggatgcccgggaaataaagaaaaatatgcggcgtgcattcggtgactaa

SEQ ID NO: 179089 - DNA, 231 bp, Klebsiella oxytoca
atgtcaccagaattcagaaaggttctccgactcgcccgcattcccgtcgacagcagtgaaccggtgcgcagaaaatttggcagccggctgattggcattgtgacgatatgtctgcttccgcttctggttttcgacgttccgcagtgggtattcattctgtcgcaggtcatctggggggcgggcgtctatattggcctgtccgtggccggggataaatccctgaaccgctga

SEQ ID NO: 179090 - DNA, 702 bp, Klebsiella oxytoca
atgtccagattcattctcgggaactgtattgatgtgatgcgcggattccccgaccgtgccgtggaccttattgtgaccgatccgccttacctcgtcggttttaaggatcgtcagggcaggcagattgccggggatgtaacggacgaatggctgcaaccggccacgctggagatgtaccgcgtcctcaaaaaagacgcgctgatggtgagcttctacggctggaaccgtgtggaccgctttatggccgcgtggaaggcggcaggattctatgccgtgggccagcttgtgttcaccaaaaactatgcctccaaccgccgtaacgccagggcccgacgcggatttgtggactactgccatgaaggggcttatgtccttgccaaaggccgccccgtgccgcctcttaaaccgctgccggatgtgctgcccttcccgtataccggtaatgccctgcatccgacgcagaaaccggtggaggcgctacagccgctgattgagtcattcagcgccccgggcgcgattgttctcgacccgtttgccggaagcggttcgacctgcgtcgctgcataccgcgccggacgccgctatatcggcatcgaaatgctggcgcagtaccaccgggccggaactgaacgactggccgccatgcaccgggccgtcaatacccccgcggcgaacgatgaatggctcccggaggcagcgtaa

SEQ ID NO: 179091 - DNA, 222 bp, Klebsiella oxytoca
atgaattacgacggacacgaagcgctgcgccgcgatatggccgggctggcgaacaatctttgcgacctgaaaaccaccctgaaagtgctggaagacacgtaccactaccggtacgacggactggcggaacggcttgccggtatcagtctgcgacgtctcagcgtcctgatggatgaggcgttcaatattgccctgatgctcgatgaaagctttctggactga

SEQ ID NO: 179092 - DNA, 420 bp, Klebsiella oxytoca
atgtacggaacccgtgaagatctttgcaggatgctgagtgagcaatatcccgcagaaaccccgctgaacctgattatctggaccccggcggatattgaagcgctgtctgacgggatggaatattccttttcagagcaggacgtaagggccgtactggaacgcatggacgctattccggaagaacaacggcttgagtcgggcgtatcagccagcctggtgatggcactgatagaccaggtgaaagagagcgggcagagggtgactgtgccggttgacctgcttgaaaccctgctgattaccgccgaacaggcattgtgggacagggaatggaccgcacgggatcgcaatcaaccggtgccggaaagcgtaatgcgccgcctggcggatacagcgaaagtgcgcgcattactgaaaagctga

SEQ ID NO: 179093 - DNA, 768 bp, Klebsiella oxytoca
atgatgaaaaatgaaacccttaacgcgcttattctgcgtcacggcgaccggatgctgcgccaggctggctggcccgacgctgttgaaatggcgcccgtcgcccccgaaaccgtacccggctggcttgccgcctgcggctctctcagtggcgtggaaatcctcacgcttacggaacagctttgtcagccgctgacgtatggccgggcagcgttgttgctcgccagcgcccggcggctggcgggaaccccggctcgtctgcatctcttttcggtgcaggcatatccgcatccggagcggctggctgattgtcaggttatccgcctgccttacgctcaggagtggctgacggcggcggaatgtgacgatctgctggccttcctgaaagcctccctcacgcagatatcggaaatcgtccaccgggatacgaagcgcatcgccgccgcgctgacgccgtccgccacgccgcgactgatagacaggcggatcggtgactggcgcttgctggccgcggagtatgatcatgataactgcctggacgaagacgagaccgacaggctggatcaggtcctcgatgccattcttattcgcgatgcgcgattctgcccggtcctgctcaccctggttaacgagcgggaggaaactatcaggagcgcaggggttatcactgatcagctgcgttttacggacactccggtccggcgctggtttgatcgccgggttttaagggaaatggtgagagacgcccgcgccatcagaactcaggagtga

SEQ ID NO: 179094 - DNA, 495 bp, Klebsiella oxytoca
atggactgcggcaccgggttgtgccgtgccgacacgtcagcccggcggaaagcggaagatgcaggggcgacaccggaggccgcagcgcagataaagcgcgaagcgggtctggacggttttcgagcgaaacctgagcgagaaaacgacgggaagaacggcgagcatcataaaaaaaactgcgaccgggcgaggatggcggcgtcagcggacccttgcatctgcagcagccgggctaaagtgaaggcacggcactacccgtcgcgatgcaggaggttgaatacagggtttttctcccccgtttttcgaccacagggagaaaagcggaagcagatgtcgcgacgcgacagacgcagtaataaggccacgaaccggagggatggggccgggtggatgcggagccggcacggcgacatccttatcgcatcagtcctcctgtggcggcaggctgacaagggaggggtcccctcccctgccgcgccgggctgtcactcctga

SEQ ID NO: 179095 - DNA, 429 bp, Klebsiella oxytoca
atgcagtatgtgacaacacgccccgtcctgaatgttgaagagtgtgaccgcctgtcttttatgccgtacctgttcggcacggatttcatgctcgcagaattgcaggtgtatgcgctggcgaaacaatggatgcctgaatacagcagtgagttctggcactttatccggctgccagagggcggcggttacatgatgccggattgtggccgggttcatctggtcaacagtgaaaactggtttgatcgcattgtgagcgccgacgccgcgggcattattctgacatcgctggccgttaaccgtcgtctggcggcccatcatgacagcagtaatccggccctgacccacctttatatgctgcgtgatgcccagctctggaatcacatcacctttcacccggaatgcaacgccatttatgccgcgctggactga

SEQ ID NO: 179096 - DNA, 507 bp, Klebsiella oxytoca
atgacttcatcagtaaccgttccggccgtctacgtgggcacatatcaccagtacaacggcggcagtatttttggcaaatggtttgatttaaccgatttcgacgacgaagacgaattttatgacgcctgccgggcgttgcatgccgccgaggatgaccccgagtttatgtttcaggactgggaagggatcccgtctcagtttgcctctgaatcctctgttaagtgggcgtttatcgaggcattccggcaggcgcaggacgaaggacgcgccgccgcgtttgtggcctgggcggaatataccggcgagtgcgactatgacgcctttgatgatgcgtattgtggcgaggctgaaagcgaggaggattttgcttatggctttgtggaggatcacggcctgttaaacgaggtgcctgaatccctgcgcgtctatttcgattatgaggcttacgcgcgggatctgttcagcagcggctatgtcttccatgaaggctatgtattcagcaactga

SEQ ID NO: 179097 - DNA, 261 bp, Klebsiella oxytoca
atgcaaatgtcaaagtggaatatcgcctcttttccaaaagaagagcaggacaaagtctccgtcgataaagcggccgccgctgttgcctggcaggaacggatgaacaagcctgttgtccacgaactcgttgagcgggaacagcctgaacacctgcgcgaatatttccgtgaacggctccgcgtacatcgactgaacagtcagcagctgccgcgcgcaaatgcgcccgaatataataaacccggagatgagcagcagaagtga

SEQ ID NO: 179098 - DNA, 321 bp, Klebsiella oxytoca
atgcgtatgtctctgatgtttgcagccgtgacgcttttaaccggtattaacctgttttttattccgtttcagccggtaccggctctgtggggggctatcctggtcgttgcttttgttctgattaatgtcgtggcggataagctgcgcctctggagtggcatggcgtggattatcgttgccggcatcatcataacgctgatgctgcaggggaaagagccgggtgacgaatttcgtatcctgatcaccgttttcgctttcctggcttcggcctggtacggcgttgttcagtacagaaaagagaagggcgaatctcagtcctga

SEQ ID NO: 179099 - DNA, 543 bp, Klebsiella oxytoca
atggcagcacgtggcgttaacaaagtcattctggtcggatatctgggacaggaaccggatgtgcgttacatgcccaacgggggcgcagtggccaatctgacgctggccacgtctgaaacatggcgtgacaagcagacgggagagatgcgcgaaaacaccgagtggcaccgtgtggtgatcttcggcaagctcgcggaagtggcgggcgaatacctgcgtaaaggcgcacaggtctacatcgagggccagctgcgcacccgcaactggcaggacgatgccggagtcacgcgctacgtcaccgaggtgctggtcggccagaacggcaccctgcagatgctcggcggccgccgtgaatccggtgtgcctgagagcgccgcgcagccacagagtcctgccgccccggcacaacctgctcaggccccggctaaatccccgaaagcgaagggcggtaagaaaggccgtcaggatgcggctccgtctcagcaaccgcctcagccactcccggatgatttcccaccaatggatgacgacgcgcccttttaa

SEQ ID NO: 179100 - DNA, 249 bp, Klebsiella oxytoca
atggaccataacgttttgtccccgcttgaatctctgccggatggcacgtttacccgcgagcaggctcagattgtcgccgcgcagtatcagaatgtggcgattgaagatgaccaggggacccattttcgtcttgtcgtccgtcatcaggatgacggcagcatgatctggcgcgtctggaattttgaaccgggcggcgaggacatgatgaaccgctacatccgggactacggagtacgcaaaacgaagtaa

SEQ ID NO: 179101 - DNA, 2058 bp, Klebsiella oxytoca
atgtctgcaacagagtctaaggtaaaaactgcaccgaaaaccagcaaaaaaacacttaagtctgccgaggctgaggcgcttaaagtggctctcgatgccgcacaggtcgagtatgtcccggtgtctgcactggtgaagtctcccctgaacgtcaggaccattccctatccggcggagaaagtctgttcaatggctgattccattgaagccattggcctgttgcagaatctggtcgtgcataacctcccggacggtcgctgtggtgtggctgcaggtggtcgtcgcctgaaagcgctgcagctcctgcagagtgaaaaacgtatcgatgccggatatcaggtgatggtgaaaaaggtacctgatgaactggctgttgcggcatcaatggcagaaaacgaacagcagatggcaatgcatccgtctgaacagatcgccgggttccgcacgctggcagagcaggggaaaactcccgcgcagattggcgatttgcttgggttcggtacccgtcatgttcagcgcatgttgaagctgaccgaactggctcccgaaattctggaggcgctggcgaaggatgaaatcaccaccgaacactgccaggcactggcgctcgaaagcgatcagaaacgccaggtggaagtgctggaatccgcccgcaaacggtcctggaataatgaagtatcagtttcctcgatccgtaacctcattacctcagaagaggtctccacaaacggcgataaattccgctttgtgggacaggccgcattcagtccggaagaaatccgggttgatctcttcagcagcgaaaacggtggctatgtcaaaagtgcatcgctcgataccgccctgctggaaaaactgcagaacatcgcggagcacctccgcgaagcggaaggctggtcatggtgtgatggtcgtcttgacccgatttctcactacgggaaggacactaaaatctggcgcctgcatgctgtcccgcctgtggaatataccaaagccgaatcagaacgtcttgcagagctggaagctctggaagctaagtatgaagacgagaaccccggcgtgaatgatgacgtcgtggccggggctctggaagccgtctgggaagaacagcagaccatcgcgcaccgggcaaaacaccgggcatggacggatgaaatgaagcaatctgccggagtggtggtttcctggactggccaggaggtgaaagtacagcgcggtgtggtgctgtgcgccgatgaaaaaatggaggagaaggatgcatccaccaatcaggcccctgaaaaagtcgatccgctggacgccgtcagtgtcccgttgctgacccgcctttcttctgaacgcacactggcggttcaggcggccctgttgcagcagccgcagaaagccgtcgcgctgatggtctggaaaatgtgtaactcggttttccataccacaacgtccgtcaaagagccgttctgcattagcgtgagtgtgtcgcattacgcgctgacccgtgaagcacctgacggtgaaaacagcgttgcgtttcaggccatccagtcagaaaaagaacgtcttgaagccctgctgccggaaaactggcgaaaggatatgaccaccttctttacgctcgatggcgcaacactgatggcactgatggctttctgcaccgcctgctccatagatggtgtacagggcaaggatgaatttggtcgtaaacaccagagttcgctggatggggtggaaaacgccattcagtttgaccttcgtgactggtggaaaccgacggcggataaccttttctcgcacatgaagctgccacacattgtacaggtactctctcaggccggactgactggcgcagcacaggacgccgcgaagatgaagaaaaaggatgccgctgaacatgcagagcacttcctctcaaaaatccgttgggttccggaatggatgaccagtgccgacaaccagaaacagcctgccgcaaagtctgaactcagtctggcaacgagtcagaacgataccgacgctgatgccggagacgtcaccgaccataacaacccggcctgtgccgcctga

SEQ ID NO: 179102 - DNA, 432 bp, Klebsiella oxytoca
atgaaaacgttactgactctggatgtcctgaaaaccatgtcttctgatgagctggaagactaccgcgcagccggtgaagatttccgccgggagctgagccacgctgtcatgcgcgatctgacctcaccgtccggctggtccgtgaatgccgagtaccggtgcgaatttggcggcttctttcctgtccagatccgttttacgccccctcatggtcactttgatgtggcggtatgcagtccgggggagctgaatcctcgctggatagtggtctttgttacccgtgacggtcagccgttctctgtcgttcgcgtgatggatgcattcaaccctgaactcatcacccatactctggatctcatcgagtgtcttgacgccggtggctactcgtttgccagcatcatcagcacgctgtcacaggagggcgcacaatga

SEQ ID NO: 179103 - DNA, 729 bp, Klebsiella oxytoca
atgatcccgtcatccagtgctcttgtatccctgaaaccagcccgtcaggcagcgctgcaggccatcatgacggtggaagaggctcgccagcgcggcgcacgtcagccatcgatgccacacgtccggacattcctgcgcctgctgacaggctgtagccggattaacagtgacgttgcccgccgtattcctggccttcaccgtgatccaaaagaccgcctttccagcctgaaacaggtggaagaggcgctggatatgcttatctccagccacggggaatactgtccgctgccgctgacaatggatgtgcaggctgaactttttccggaagtccttcatacccgaacagtacgcaggctaaaacgtcaggactttgccttcacccgaaaaatgcgccgtgaagcccgtcaggtcgagcagtcctggttactgcgtcagaacctgctgggacaggctgtaacagaactgaattttcagtcaccggaaaccgtctgcacctggtacacccggtggagcgacgagtttgacgcggcagagcttgcagcaccgttctggcgctggcagtcgcgattcgcatcgctgaaggaacttgactggcttcgcatcagcggtgagccgctgtatgcagtgatgtacgaaatcccgtttattgtccgggaaacacctgagcatgttcgtgtcgctgaacgctggcaggtgccaaataagctggctgatcggagcggtgtatga

SEQ ID NO: 179104 - DNA, 327 bp, Klebsiella oxytoca
atgaagtggcgctattccctgcgctggaaactgccgcacaggccctgcccgggtccacaggaactgatttccgttgtcgtggaggctgggcaggcggcacctgaagaggtgatgtcacgctgggtggctggctcaggttacgctgtatgcgtggattttctcggccagaaacagatccagcgctggagcgatgaacggaaagccgcggtgagaaggcgcaacatgcaggcacggattaatcgtgttgcccctttgtttgctgatgagttaatcgagcgtgaactggctgcgcgtccggcgtatttcaatggcaagtccgcccaatga

SEQ ID NO: 179105 - DNA, 375 bp, Klebsiella oxytoca
atgaggtactggttgctcgttatcttaatgaacgtgttgttctggttgaccgtgaagtatgttgctccggaatgggatggttcccctggatattatgcaggccagctcatctgcacactaatagctgcggtcatcacatggcgtgatccgcctgactggttagatgaaatcctgctcggcgttataaaattcggcgttctgattgccgggattatattctttgtctggggcgtcgggttcaagctggcattctgggggcaacatgatcctaataccatatatgcaagtgcaaacgatgttattttgcctaatcttgcgctgggcacgggcgtcttgatcgcgggatgggtatacattagatatttaaagcgctaa

SEQ ID NO: 179106 - DNA, 162 bp, Klebsiella oxytoca; identical to SEQ ID NO: 139499

SEQ ID NO: 179107 - DNA, 273 bp, Klebsiella oxytoca
atgaacttcacgataaaatcccgtaaaaacggcgaaattttcagtttttacgcacccgacaggggtggctatgttcacctggagtccccgggacgccctggtagcaccggtgctcagatttgccgtgggggagggtttatggggagtacacttttctgtgacgcttctgaggacgatctggccagtgttgcccgtaaatggtaccgccagttcgtgagggagcggcgcaaattcttaattatgtcgggacagtattctgaggataaccaatga

SEQ ID NO: 179108 - DNA, 351 bp, Klebsiella oxytoca
atgaaaaaagagatctcccgcaacccctctttcacgccttcgcctaagctgcgagcacatctgaactcccacagggaaggggtgactgaacggctgaataatatctttgatcgctatgcgcatctggttcgcgcctgtgcccttcctctcgatgacgaagaaacacaggttctgcttaatgtgctgaatggctccgttgtggaacccgcctttattgaatatctggctcaggaaatccgggactcggattactatctggagggtatccccgcggctgaatcactgtatgaaaagtgcctgtcagcgacctatccacaactgctggccaccgtcgagcggctcgatcgctga

SEQ ID NO: 179109 - DNA, 381 bp, Klebsiella oxytoca
atgaacacacagaacgtcaacgtcaaaaccgccaccaaagaatctaccgaaagatgggttgaaaaccttctggccaacacgattagcgagcaaaagagcctccttatgtatctggcggagcttaaaaacaagcgcctgagagaaagcgaaagaagtgaactggtatggggaacgttgatgcgtatggctgataacgtcctggggacgggagtggttgactggcatgcggacgttctgcaggtgcatttcggcgttgctcaaccgtggcttcagtcccggaaactcgttgagcttctttatggtgataccggtaaggaagcgtggaatgacgcacgcaaatacattgctgactcaatgcgcgctgaacgctatatgccatga

SEQ ID NO: 179110 - DNA, 348 bp, Klebsiella oxytoca
atgaacttacacctgaccgaatcctctgcagtcctgggaatgcagaccaccgcagaggcagaacgtgcgtactggttgagtcgtcgtaacgatgcggtgaaagcaccggaagaaatcgatgttcatgcctttcacgaggcgctcggactgatgtatccgctgaactggtcaacgagcgaaaacaatgaatgggagtccttcatgatggctgaaatgtactgcggtgacgtgacagagatatatgcccgctacggagccagatatttccggctgcgggatgtgtgcaacctgagccatgcgcagatcacaacgcgcattaaggaggaatttaacctgttccggaaatga

SEQ ID NO: 179111 - DNA, 231 bp, Klebsiella oxytoca
atgaacctatctattctttcaccttccaatgaggctgtaaagccccgccgtcatcagcgcaacctgcgtgatgatatcgccgcacaggagattgacccggtgctgaaggctttcggacggcatattgcccggagcgttcgcaaggggcgtggtgtccatatccccgcgatgaacaacaccgccttcgggcaggtgctccgcacgcttgaactcaaacgcgcgtgtaactga

SEQ ID NO: 179112 - DNA, 834 bp, Klebsiella oxytoca
atgtcacagatgaattttgccgatgtgttcaacatggccagagaaactgcagacaatcccccggtgattcaggtcagggcgcaggtcgcggaagtggtgccttctgttcagcgtttgatgagtgagcagcacagccggagccggtttatccgcgtctttaaagacacgggccgccatctggggcgctgggaggtgttcagtgattttctgtcactggccgccagtgagctggatatggcccgcatcagaacgccggagagcattgagcactgccggaaaatttgtgcgcgttatggggcatcagatatcgcgaacatgcaggaaatgttctgcatgatggtatgcgcactggaggcgaaatttcatgatttcctcggtgccattttcatggagcttgagctgggcgatagctttcgtgggcagtactttaccccttattcggtccagtgcctcatggcccggatgctgatgccgggcgtcagggacactatccgccgggaagggatagccacggtcagcgacccggcctgtggtgccgccgggatgctgattgcgtatgcggagtgcctgcttgaagcggatatcaatccttccatgcacatgttcggtagctgcatcgatatcgacccggtggcggcagatatggctttcatccagctgtctctgctggggattgccgccgaagtggtcacgggcaacaccctgacaatgcagttccggcgggtaagatacacacctgtgtactatctcaatgacttcgaaaaacggctggctgacctgaaccggttcagggctatgcgggacttcatgcgcggaatacaggaggccgcgtaa

SEQ ID NO: 179113 - DNA, 531 bp, Klebsiella oxytoca
atgcgcacaatgaaagtcaacaccgccactcgtgaatcagacgaacagtttaaaacagacaaatatctgcgctatgccgtaaccaatggtaaagctcgcctggattttatcccggacctcttttttacgccgttagccgataatatggccgcaagctggttacgccagcattctgagtacgacggcggttcctggtcttactgggttattccacagggtgttggcgggaatattgctcccaacagcatccagttcattaccacgcagaccggatatatcgcaccagaaggtgagcagcgttacaggatgtgcatcccgggaaattatttcgaaggtgaggtcagcgccgatgcagcaggcattattgccacgctgatgattatgaacaggctgtcctggcacgtggctgaaatggggccgcaatatgaccagatctgcaggcgtctggtttcacggcaggatgcactgaaggattatatcagcattattcagcatcccgaacggcatttaatatggcgggcaattgattaa

SEQ ID NO: 179114 - DNA, 480 bp, Klebsiella oxytoca
ttgagaaaacaactggtattagctaccctgcttttaatttccacacctgcctgggctgcggattgttttgatatggcaggacgggactatcgaatagatcccgatctgctgcgggctatttcatggcaggagtctaaatggaaggtgaatgccatcgggaaaaacccgggatctggctacggtgccggactgatgcagatcgactcgcaacaccagggtgaactgtcgcagtacggtattaaaccgggacaccttctgactgatgcctgtctgaatatttacaccggtgcttattatcttgcactggcttttaaaaaatggggagtcagctgggaggcagtcggcgcctacaacgccgggttccggagaacggacaggcaggccatacgacgactggagtacgccaggaagattgagaccatctaccttgctatcaagagaaataaaaatgccggccagtcatctttaacaaaaaactga

SEQ ID NO: 179115 - DNA, 393 bp, Klebsiella oxytoca; identical to SEQ ID NO: 100984

SEQ ID NO: 179116 - DNA, 705 bp, Klebsiella oxytoca
atgtgtgcgatggatcgtagtagccatgatggcttaagtcaatcggtaagggatgttatttcttgtgtcaagtcactttatcacaattctcctgtgtcagtttgtatacggaatgaacgacacgaacccatttatttcaatgattcatttcagcaactattttctttctttaaggccgagagtgaaaagaaaatatttcaagctggttttgttgatctcgagtatgtgctttcacaattcgaatttgactgtattgcattaggtcagggatgtgttttatgtaaagattttaagtgcggtgattacaactttcaagttcgaatggagtcattattaattcctggggagcgctcttatgttctctggcagattaatttacttattaacctgcccttaaagggaaggttgagagtggttaaaggtgagccctgtgaagataacaactacgataatgtaatctccagtattccggacaaaaatctggaatccctgtctttttttattttagggttttcatatagggaatcggcttattacatcggtttgccagcgtcaactgttagaaagagagttgaaagggcacgtgacgtaatcgttgagttctttgcctcatttgaacatttcaaagcttatttgtttaaaacaaaaaagatatttttctttcttgattactgttccaatattataagtgttaaaaaaatgtaa

SEQ ID NO: 179117 - DNA, 369 bp, Klebsiella oxytoca
atgaatgctgtattaagtgttcagggctctgctgtccctgaagaaaccaaaccgtcatttctgtctcgcgttttcaataaaaagaaagccctgaaagtcgctaaagttgcactgccggttgctgctgtggcggcgttcttcccggatgctgcgatggccaccaccacggcaaccgacctgatgaagtccggggatgcgaccgttaaaggcacgtttggtaagtcttccagcgtcgtcaaatgggtggttctggcagaagttgtcgccggcggcattatgtacatgatgaccaaaaacgtgaagttcctgtttggcttcgcgattatttccacctttatcaccatcggtatgtcggtcgccggttactga

SEQ ID NO: 179118 - DNA, 306 bp, Klebsiella oxytoca; identical to SEQ ID NO: 92373

SEQ ID NO: 179119 - DNA, 567 bp, Klebsiella oxytoca
atggaacatggtgccagacaaaataccacccgcgttatcgctgtgggatttatcagtctggggacgctcctgaccctcagtcttgcgaccaatattatccagggcataaataattaccgtcttcagacagaacagaaagtggcggtgacaccgatgttattcagtgccccctttgcggtgtctcagaaccaggccgatgcctcttatattgagcagctgggcctgtcctttatcgccctgcgtctgaatgtcaccccggaaacggttgatgcccagcatcagcagctactccggtatgtattacccgcctcgcagaacagcctcaaggtccagctggctgaagatgcgaaacgcattaaagacaataacgttaatgccaccttttatatgacgtcgatccgtgcctggccggcagagaaccgcgtggatatccggggtgagctgaaaacgtggattggggattccaaaccctacagtgaaattaaaagttatgtcattcagttcagtcgtgtcgatggtgtcagctggctggcgcgttttggagaaataaataatgaaaaaaattaa

SEQ ID NO: 179120 - DNA, 741 bp, Klebsiella oxytoca
atgaaaaaaattaactcgttatttatttcaggttgtctgctgttggtcgcccctgcgatgtcagcgacccttagcggtacgctggcgccgacagtggttcccctgaccaatggcggtcaggcaaatattgccgtgagtaacaccgatccgaatctgttcacagtacctggagatcgcatcacggcgataaacagcctggacggcggcctgacaaaccaggagcagaccgacagcggcggcgccattctggcgaccgtcagtaaaaaaccattcaccttcattgtggaaaccgaacgcgggctgaacttctccattcgtgccgtgccccgtgcgggctcaggccggacaattcagctggtcagcgagctggcgggtacccccggtccggcaaaagcctgggaagagtcgaatccctatgaatcgttactggtttcgctgaatcgcgccgtgcgtcagggcagcgtacccgatgagtatcagtctgtccccgtcacttctgaagtgctgcaggtgccggctggtctgcgcgccactgccgatcgggtctgggtcggtcatcacctgaaagttgtccgttacagtctggacaatgtctccctgtcggcccgtatggttcgtgaaagcgatttctggcagcccggaacacgtgccgtcatgttcagtaccccggcaggcctgctgactgccggtggtcgcatgcagatctgggtcacgacgtcagatgaaggagtgaagcgctga

SEQ ID NO: 179121 - DNA, 1425 bp, Klebsiella oxytoca
atggccaacttcaacacgctgatcaaacgtaagcaatatatctggctgggactcattctggcgggcggcgcggcagccgtcggaggcgggctgtatctgtcagatctgaacatgagctctgatgaggaagccccggctcagggcgaacccgcaccggatatgaccggggtggtcgacagcagcttcaacagtaaggtggagcagcacgcgacaacagaaatgcaggcgactgccgctgatctcaacaagcgttttgactccctgcagggggaagtggacctgctgagtaaagcgcgaagcgctgaccagatacgtatcgacaaactcagcagtgacaatgaagccatgcagaatcagctgaaggcgctgggcgtgaaaccggctgtctctggtggcgagcccgcgccgactcctccgtcaccgccacccggtccggaaggggagccgcagccagccagttatccgccgcaaaccggcgccgcggtaccgcctccgacggcattctatccggggaatggtatgacaccgccgccgcaggtcagctaccagtctgtgccggtaccaaaccagatacagcgtaagacgttcagttatgacaaaggaaagaaagcgaagtcattgccgtacattccgtcggggagctttgcaaaaagcacgcttatcgagggggcagatgccaacgcgtctgttaccgggaatgaatccactgtgccgatgcagctgcgtatcaccggtcgcgtggaaatgccaaacagcaaaacctacgacctgacagggtgttttgtggggcttgaagcctggggcgatgtctccagcgagcgcgccatagtccgtacccgcaatatcagctgtatcaaaggtgataaaaccatcgatcagcccattaacggccacgtctcattcatgggcaagaacggcgtgaaaggagaggtggtgatgcgtaacggaaaaatcctcggctgggcatggggggccggttttgttgatgggattggccagggaatagaacgtgcttctcagccggctgtggggctgggcgccacggcaactgtcggcgcagctgatgtactcaaaatggggattggcggcggagcgtccaaaggtggttcatcgctgagtgaatactacattaaacgttctgagcagtatcacccagttatcccgatcggtgcgggcaacgaagtgaccgttgtgttccaggatggattccagctgaaaacgattgaagagctggaagcggaaaagaacgggcaacagcaggctcagaatcaggaggcggagccggcaccgcaggctgatgcacatcatcagtcaggcggcggtatgaacggattcaatactgacgagatgctgaagaaacttgggaaactcgatccgcgtgagttctctccgggttcagcgcagcaggggggaaatgcggaatga

SEQ ID NO: 179122 - DNA, 558 bp, Klebsiella oxytoca
atgctgttaattcctctgggcagcgctttgctcttaaccgggtgtgcgggcacagagaccgaattccaatgtaatgccacgacgtcggatacctgtatgacgatggagcaggcaaatgaaaaagcgaagctgaaagaggaacgcagtgatgcaaagccggctgcggccgggttgctacaactggctgagggtaatttcagaacaacgtcagttaattcgtacccgttgccgccacagccaaatttaatgcatcccggagcaacgacaacggcaccgactaatacagtaacgtcaggattgctgacgaataacagaatagtcagtacgccggtatatcggcccgtggctgtagcgccagctgttcggccggtgagtgtatcaacttttacatcaccggggacggctcctggtaactatccccggccattaagaaaaggggaggagacaacgtcattgtggatagcgccgtatgtggactcagatgatgtatatcaccagccagcaacggttctttttgtcgtgacaccatcggcgtggggacaacctcgccttaattga

SEQ ID NO: 179123 - DNA, 411 bp, Klebsiella oxytoca
atgactgactcaatgaaatatctatggctgcttttttgcgaagagccatcatatatttttttgtttgttttgattgttggttctgccgtaatcgtgtctgccttttttcagagagtaatcacatcctggtggggtaaaaccctcagtgtgatactgtgtatggtgagtatgattactacagcaacaggagttcttgatcctgagtcaacatataaacaaattaaaaacaggaaagaaaatatcatctatacgctgaaaaactgcagagtctacgcatttgaagcgcagcaggcagggtttctggctaaagcaaaagatgcctggtcttgcccggatggcgtaacacggtatatggatgtgagatacagggataaggcagagattaataaactcagtacggaaggtaagtaa

SEQ ID NO: 179124 - DNA, 291 bp, Klebsiella oxytoca
atggatgaattattcaaatggacgatgatgctggtatttttattggcaggttatagcctgctgttttctactgacagtaatacagtgcccgaagctctttctcatcactggaaaaatgactgccggttgcttgagaccaatattgataaagggtttttctctcctgcgcaaaatcgacttcagtgtggtgatgttattgaaaatgtcagcaaggctgattatgacagagcgataagtggcgataagcaaacaactctcgcagaggcaatgaaagaaatattcattcgttaa

SEQ ID NO: 179125 - DNA, 219 bp, Klebsiella oxytoca
atgcatgcctttatttttctggtgctgatgacgccgagtagtggtggtggaatttgggatattactcctatgcctaatacagatgtctgcataaaaatgctacgggtactcgaagcacgtggaggcagaggttacggaagtaatacaggagagtgcattgaaattaaaacacgcgagcctttgaacagcgtgatggaaacattgagtgagggtgggtaa

SEQ ID NO: 179126 - DNA, 165 bp, Klebsiella oxytoca
atggctgagtctctgttaatttttgatagtgatggttatgtacgactgttttttgcaatggcaatcattatctgtggttacggctatgtaattattggtgtttttataagagatacgcttgcctatattttaatgttatttgggcttgcaggtctcagtgcttga

SEQ ID NO: 179127 - DNA, 405 bp, Klebsiella oxytoca
gtgaaagcgtactatatacttggacataacgttgcatggcttaacggtatatgcctgattctttttgttattggtgtggtcggtgcgctggcaatggttgccatccctgaaaaattcaatcttcgagttaacagaggcgatacattcatctactgtgcgcttatagcggtggttgggttttccgggatgttcgttatctccattcactcattttcgatggatgaacttgaagcaggtagacactggaaagacgactgtaagacacttgaggtcaacatgccgacaggcgcttttaccagccctgttaataaactggactgtgatggcatcatcattaatgtgcctggtgggcggtattattcgtatatccatcagtgggaattatataaagctaactcaaaatga

SEQ ID NO: 179128 - DNA, 402 bp, Klebsiella oxytoca
atggacaggcaaaaagaaattgaaaaacgctcccgggatttaataagaaaggccgataaaaaagaaagggtggagctgaatttccttgacgtaaaatatgttatttctgtagtgaatacggggcttcttctttgtctgactgtaggggcggttatttcactggattatgaagattttctcgatatgactccagccagttctgaacaactgcaggaaattatacaaagcacaccttgtgcaggtgagacgttacggatggctcttcaaactaacactggcacttcgtcagcgtcattaacttttggtgacgccaaaaaaagggcctcagaatgcaagaataaagaagaggttaaagcagtacgtgaaaaacaacttaacgcactgaacgctatgagcaaataa

SEQ ID NO: 179129 - DNA, 393 bp, Klebsiella oxytoca
atgatgctgttttttagaaagtatgggtttttgtttatccctccagtctactggctcatctatctgggagccaggctgacatacaatgtactggcaggagagttttctcctgatttccttcagggtattcgacatgaaggcctctatattatctgtagtctgtgtgtcttttattttttctgcctggaggtggaaattagtgatggggagttctcagcgaaccttctgttcctgattgttttctttcatgtggttttgttatttatcactctgcttatttgtttgtggcaaggggcgatgttgttggatgcgatctttatgggtcagattattgcatccatgtgtttattgtttttcattcctgtgctttccattataagaaggagtttctag

SEQ ID NO: 179130 - DNA, 660 bp, Klebsiella oxytoca
atggtagcgggccgggataagctggaagccacccttacggtaactgttgagcacctgctgctcggtagcgagagaggcctctgcgttatcggcggtatacgtggtgatgttaaagaagtaggacaccagagaggtctggttggtcgccagtcgctggcggatatcgccccactcctgcatttcctttatcacgttcggaaagtacttcgcgtaggaggttttgcttttcttctccacgtccatgaatttcaggttggcttcgttctgggtctttacctggtcctccaccatcagcgtcagcgtgatgacaaaggggcaggagatggagagctccgggttcagcaggttggcgtagttgtccgcagcggtccagagaaaggcgatttccggatcacactcaaggtggtaattcgtcacccgggtcacgcactctttcccgtcccgccccaggcggccaattttcagatgaccggccgtgacctgcatgtcaaagctgtcatccacgcactgatagttcaggtcctgatacgggtccagcttgtacggcacccggtacatctcatgcggatccgggttaatcagctcccgcatcagttcgaccatcccggccgcatcgaggatacgcgtcgggatgtaagccccgccgagcgatgcccgtaa

SEQ ID NO: 179131 - DNA, 2979 bp, Klebsiella oxytoca
atgacacaggaaattgaacaaaaattttataccctacaatctgcgccctggctggataagaccggttttgaaaaaggacggcagcacgatcgccagccgctgggctttattctgcccgccaatacgccgctgcacattcgccaaccggatatcagcaacggcaactcgattctgcgcctgctttgcaatgataccgcgctagaaagcaccagcacgatcgccaccggctggaaaacggtcagcgccacggtcgacaccgttccttttgtcgatacgctgtttaccgaccagtccagcgaattcaccgtcatctaccagcaacctgccgcaactaaaccgctgccgtgctggaaagcaggacaatctgaggatgaatttttcctcagctgggagaaaaatcaatccgcactcgcgctgcttgatttagatgtgattaacctgctgctgccctacgccgaccgcgataatgcgatgaaagcgggcttatcctcgctacatgcttattacacccaccttttcaaatgctataacgactgggctgggctaagcgatcgcccggatgcgccgtggaaccaggatgtcgccaaccgctactttgtgcgggcagataaacacggcgtcggcgcagcctattatcacccctggtggtgcgcacatacatcatcaacgttaggtgaaggctggctggataacgttgcgacgcagtgggttattcttcatgaaattgcgcacgggtatcagggcaaatttatgcaggacaccactctgcccgtcaatgaggtgtggaacaatatttacgccgctttctatcagcagcttaccctgagccaggataatcatctctatgtggatggctggctctataactatggtcagcaggccgtacaggaactccagctgatgacctatataaaagaccagacgccggtcgccagctggggcctgcgtccgcgcctgcagttcctgatgctgatgttgctaaaagcaggaaccaaagccttcagcgcctttaaccagaactatcgtgaactggccaacggcgatagcttccggccgtccgattatcagcttatcgatatgttggctaccgccattgccgccgccgcagggtatgatgtcacgccgtttatcgagctatgcggcttaacgctggaaattaccactaagggagatatcgccgcgctggcggcaaaaccgctctatccgctgtatcttttccttccgcaaagcgaatgggatagcgcgcggcggcagctggggctggactccttcgtgtggctggtggataacagcgaactggcggcattaggcaaaacggggacgctatccctgacgttcaatatcgaccagctggaacaaatttacgggcgaacgctgacgattaaagataattgtggcacgcattattcactggttgttaatgatgacacgttgatcctgaatgatattccagtcggcgtttaccagatcgatcctccgaaaggccgttcacaaaaatatcgtccggatatcagctatctcgtcgtaaaagaaggggcgaatgcggctaccatcaactacacccgacaacgcgatacccgcgggcgtaacgtgacaatgagctttttaggtattggcgacacgccgtttgcatatctggatatcgatttcgaaaatcagcagcttacgctgaatattaccagcgccacgccgcacaacaactaccctgacgcgctctatgccggcgtatgcgtactttccgccagcggcgaaaaagtctttgagcgcaatatgaacggcacaaactgcgccaccggtaaggtgattattcccttcggccctcactatcacttgtatattactcacgtcgagccgggacgtctgaaagcctccccggagtatttaccgctgatcgcgggcgagaaatgccagctgatgcgtattgatgagagtgggctttacaactttatcctcgataataatccggcggaagatttactggctattttcgagcatgacgctcaggcgatgcgtaaccagccttcgctattagcgcaggaagagagcgtatgtaaaaacgatctctggctgatgctctcccatattgaagagccccagcgcagcaggctgcttaaagagtatgccgatgttctgcctcaggataatagtgaaccgggcgagttcacgggcaagagcgtgaccctcaatctcagaggacagggcaacaaagatttttgccagatcgttatcgataatcaacagcacgccatgatggtcaccacccgtaccggcgcgccgcacccgtattatgtctcccatacctacgccagcattacggtaaccggggcggacgaaacggtggtttatcaccgcagctatgccggagcgaccaacaacctggcaaacagcgaaactatcgccctcgctgaaaacatgatcattgaggttttccatgatgagccattccgctccagcgccagcaatgatacgacgcatcgcgccattacgctgaagcagcacaaccgctggcgggtagtgaaggatgggctggagacctgttcgctggtgccagacccggaggataaagaaactacggatgctgaggacgaggctacagagctgtatggcgatctcttctgctggcagctacttggcaatgataatattcgttttgcgacgatggagatggatattggccgcggcgcgctcacctttaccgccagccccgtggtgccgaataagcactttacgacggcctatgccgcgatgaatatctacaatacgcgcggctcggtggtttatcgccagtccattaaaggctcatcgcagcttggcgactatatagatacggcaatacttgatgagggctatatcatcgaagtcttccatgccgaagccggcgatcgctccgtcattatcaacccacaaaacggtaacgcctggccacagcctcataccgtctcctggcaagtcacggcccgcggactgcagcgcctgtaa

SEQ ID NO: 179132 - DNA, 180 bp, Klebsiella oxytoca
atgtttatgttgttaaaaaacataataatttcccttttgttacctgatgagcatgtaaaatgctggttaagaatgtcgcggtttagtgctatcctgtatcgcctggacaacaagtaccgtgtcccgaactattctgtcgatgaagccggtaacaatgtgatttgtatggtgaatttttaa

SEQ ID NO: 179133 - DNA, 525 bp, Klebsiella oxytoca
gtgcttgttcgtcagcaagagccgtacccgcagtccgcgcccccgacggtagttggaaaaatggtgcagatcccctatgtgaccgtaccgctgtacgccgcgctgctgattgcgctcggctggttcggcggcgagcagtggcggaataagcccgagccgcagccgatgagccagccagtagcgcatgcggcgttagtgccgctgaatcaaccggcggtcaaaactgccgtgacggcggttaaagccgagccagaaatgaaggctgaaccagaaatagcgatcgatgaagatactctgccgcctctgcgctatagcgcgcacgtctacgcctcgctggcggagaaacgcagcattgtattaaacggccagtcctggaaggagggcgactcgccgttgccgaacctggttattgagcagattcagcaggatctcaccgtatttagcttcaacggtaaaacgtttaccctcgcggcgctggatgactggccgggcggggcgattgaggagagtccgcaggctgaataa

SEQ ID NO: 179134 - DNA, 2337 bp, Klebsiella oxytoca
atgattacgccgaagttaaaatacctgctggttatcttgtctttgattgcgctttttgtcgcgccgaatatggtgctctttctctggtctgcaccctttatgttggtggataagctttcgcttttacctgcggtgctcaacgacccccagcgtttatatctctatggcctgtggctggggggaatgctctatttttccgccctgatgtgggtggcggttacccggcgtaataaaggctatctggcagccgccgtggcgcaggttgtttttgtcgtggggatcacgttattcaatgtccccatcggcgagcagaaccagcggcgctggcacagtatgaatcagctggaatcacccgcctggcagggttttctctatgatcgccatgcccgttttattcagataaccctgggcggagagccgtttaatcagcatcagattattgagcaatttctcgcgcagaaaagaccgctggcggagctgccgcttggctggaatgaagaagatgccgccgctgccgatgcgctctggcaacaggcattgggctatcgtgagcaagaggcaaaagcccttccgaagatgaatgattatttgtcctggatgccggatcgtggcgatctgacgctggctgcggccgtcctgacgctgacaacggatgccaataaagcgctggctgaaagcgcgtttcgtcgggtaatcgcgattgtgccggaaaaccctgacgcctggctgggttgggcattagcgctgattcagtcccgggatgatgagcgggtgcgaaattcgcagtttcagccgcttacgcaaagcatcaccagcggattattgatggcggagggcctgaaggatagcccgcgccagcctgcgctacaacagcggttagaggagtatatcgcgcaaatgccgccagaagatcggcaaatcctgcaaattctgcgggccagaatgcagagccgttcctgcgatttgccactgaacagctatgcctcggaaaagggtgaggctggtaaggtactgcctttatctaaatcgatcgtgtttaaacaaggccctgtgcatagcgtcagcccggttaacgagcgctttcccggacacgtgagtattgaggccgaaagatatggaatcgcgaaagagacgttgtctccgatgctctatccggcgatatataaatttatcaagtcggcgacgacggtgctctcggtggatactcacgttggcggcgatctgttaaacgtggtggtcgaatgcagtagcggcgttccggagtttgaccaggcggcgctctactacgcgcagcagtggcgttttcattctaacccgcagggaaggcgtttgctgataccagtgacctttatcagcgatcgtctggcacctgaggaacactatcgggagatggagtcacgggcgatacgtatcgcccggctggcgtcccggcataataaatccgggatggaagccgccgcgcaagagatgaccgctcaattcgcccggatgaaagcgctctttccgcagaagaagctaagcgcggaagaggcgcgaaatttacagctcgtttattttaaaaagcgggatcaaagtaccaaaggccgaatggaagccttcactgaaatgaccgaggcgatggaggccctggttgatacgcatccgtactacgcgccgctattgaaggatctggcgctgagaaagagctttgcttcctttgaagataatcgtgctacgtgggcgcagctgctggcgctggctccggaggatccgcaggtatggatggcctgggggagcttgtgggccgagcgcgatcctgaactgtatatcggagcgatggtctattccctgctgctacagcctctcgctgaggatgtcgagcagaaaatagccaatacccaaattaagctgctgatgcgggttggtatgggcgaacgtaatgcgattctttcggcaaaagtgtacgcggactataccgatatcctcggggaaagagcgaaaggtgaagataccacaaaggccggagacatcttaccggcgagcaaaatgctggaccgtcatgaaaccattgttgccggtgactttccggtgagtatggcggttgatatcgaccggagtgaagtgttaaacgcgtctttcttcggggttgagtggaaggggtcgcaaatacagagtgataaccgggctgagcttaccgttgatattgataaaaatggtattccgacgctggtgctggtgagcaaaagcagcgaagtggaagagtatgatgcgcgggcggttgatatgctttggcgctggaagtttaagccgcagcctgacggcaggagaataactatcagagtgaattttcagcactaa

SEQ ID NO: 179135 - DNA, 1374 bp, Klebsiella oxytoca
atgaagaataaaaaaacactgaactgttataccgaacagcgccacccgatacgcttagggaaactgatcaagagcggcggcgcgggtagcgtctatttcctcgcggacgaccctgccggcgtcgcgaaaatttatcatccccatattgataccagctattaccagcgtaagctccgcgccatgctggcgcagcgcccgcagatacctgcgcctgccgagggagacgcggttgtccagctggcgtggcctgactatttgctcttcgatgatcgtcagcgcgtcattggttttgtgatgcctgttctggatacccagcgcaccattgaactggagtatattctgcaagccaggcaggcaaaggcgcatcaattacctgaaggcataggggcaaaagtcagcctcgcctgtaatctcgccaccctggtttcggcgctgcacgcgcgtcagcaccgggttatcgacatgaagccggtcaacctgcgtttttatcgcgacagcctgtatatcgcgctgctggactgcgatggctttagcatccagggcgagggggagcgttttccggccgggcagttcacgccggattacctggcgccggagttccagcgtatcgggcaggtacccgatacgctggaagaagcgcaggaccgtttctcgctggcggtgattatttttcaactgcttaatcacggtatccatccctatagcggccgttcgcaaacgacgaaggtgccagatgatttaccggggcgtatagccgctgattgctacgcttacggtatcaatgccgcaaaaaatatcgccccggtaccggccagtacccaccatctgctaccggctgaactgcgtgaactgtttgaccgcgcgtttagcggttcacccgcccgacgcccttccgccgatgaatgggcgcaggtactgcgtccttatgcgctgcgcagtacgcaaaaaatcatgctctgcagtaagaaacatcagcatttcgccggtatgccatgcctggtgtgcgcgcgtgaaaaacagattgttgagggcgtaaaacaggcgaagcagcataagcggatgcaaaccgctcgcccgcgtcctgcgcctgtaaaacggcagcctcatgcggcgtcagccgccgcggttcctcgtcagccaaccgtgccggggccgttaacgctgctgtggcgcaatattcgcggcaaagtcccttcgtttgtatggcatggcgccctggctcttattagtacgctggtgatggccatattagcgcgcaattttacccaactgaacggtccctggcatgcctggtacgataactcggcgtcaatcctgatttttgtctggataaccgtgatggggttgctggcgatttttcggagtaagccataa

SEQ ID NO: 179136 - DNA, 564 bp, Klebsiella oxytoca
ttggtcagtcgggagctggtcgaggggctggcaaaatttaccgccgtgcctgatgaaaatcagctggctactctggtggaaagcgtgcgtgacaccattctgctacaggcgcaggagcgggagctctccgcaggcgattttgcctgtaccgttgtggccgcgtggctgggggagagcgcctcaacggtgctgcatatcggcgacggcgtcgcggcgctgagtatcgatgctgatgagcatttatctttacctgaaaatggggaatacgctaaccagacctggttccttaccagccacgactggcgcgaacatttacgcatcagccagtttgccggtagcgtcaagcagctggtgatgatgtcggacggcgtgcagccgtttgcgttgaatcgtagcggtgacgcgctatttgctccctttattgtgccggtgatgaactatctgcgccagattccggaaaagcagggcagtgaagcattgcgggtaaccctcgacgatcctcgtacctgggccataacgggtgacgacaagacgctacttatcgttttacgcaatgaagaataa

SEQ ID NO: 179137 - DNA, 678 bp, Klebsiella oxytoca
atggcacctttaattccggatgtttcatttattgataatagtgaacagcgtacgcctttaattttggttctcgattgttccggtagtatggacggccaaccgatagcccagctcaatcaggggcttaagctactggaagaagagcttaagcatgatgtcatcgccgctaaacgcgttcgcctgctggtgattaaatacggcggttatgatgaatgtgagctatacggcgactggtgtgatgcgatggacttcacggctcccgtgcttgaagccaatggcctgacgccaaccgggcaggccgttagcctggcattgagcgaaatcgaagctgaaaagcagcgcctgaaagcggctggcgtgccctatacccgtccctggctgtttttaatgtctgatggcgagcccacggataactggcaagccgcggctcaagagtgtcgtgaagcgcaggcggcaaataaagtcgctgttttcccgattagcgtaggaaaagaagcgactgaatctatgggtcacttcagccgtagcggcattaatggcgtgaagcagctaaaaggattgcagttccgcgaactattcctctggctgagcgccagcatgcaggtggtttcgcagtcgacgccgggcggcaaagcacagctgccgccgacggatagctggtcagaaatttcggtctga

SEQ ID NO: 179138 - DNA, 864 bp, Klebsiella oxytoca
atgatccgcagtatgaccgcctacgcccggcgtgaaatcaagggtgaatggggtagcgccgcgtgggaactgcgctcggtaaaccaacgatatctggaaacctacttccgcctgccggagcagttccgtagcctggagcccgtggtgcgtgaacgtattcgctcccgtctgacccgcggtaaagtcgaatgtaccctgcgttttgagcaggacccgagcgcgcagggtgagctgatccttaacgaaaaactggcaaagcagctggttaacgccgccaactgggtcaaaatgcagagcgacgaaggcgaaatcaatccggtagatattctgcgctggcctggcgtgatgtcggcccatgaacaggatctggacgccattgccgccgaaattctgggcgcgttaaacggtgcgctggatgactttatcgtcgcccgcgaaaccgaaggccaggcgctgaaagcgctgatcgaacagcgtctcgacggcgtaacggccgaggtggctaaagtacgtgcccatatgccggaaattttgcagtggcagcgcgagcgtctggttgccaagctggaagatgcggaagtgcagctggaaaacaaccgcctcgagcaggagctggtgctgatggcgcagcgtatagacgtcgccgaagagctggatcgtctggaagcgcacgtgaaagagacgtggaatatcctgaagaagaaagaagcggtcggtcgccgcctcgactttatgatgcaggagttcaaccgcgagtcgaacaccctggcgtctaaatcaatcaatgccgaagtgacgaactccgccattgagctgaaggtgctgatcgaacaaatgcgcgagcagattcagaacatcgagtaa

SEQ ID NO: 179139 - DNA, 1260 bp, Klebsiella oxytoca
atgactgcagcagctggcaataaaaactatctcacccgcctgattgccgttgtgctgacggggctgcttgccggcctctcaggcatggttctggcgctgattttacacgcgattcagcacctggcctttggctacagccccgggcagatcgtgagcgcggagtcatttctacagggcgtcacggattcatcctggcctcgtcgcctctcggcaatcgtcgcggggggagccatcgcaggattcggctggtggctccttggacgctatgggcagaagcgggtctcaatagcgtcagcggtggcgaatccttcgctggcaatgcctgcgggtaccacaacgattcatgccctgttgcagatcgtcaccgtggcgctgggctctccgcttggccgcgaagtggctccgcgggaaatgggcgcgctgggggcagggatggtggcgcgtaagctgggactgctggcggatgaaacccgaacgctggttgcctgcggcgccggtgcgggcctggcggcggtgtataacgttccgctggccggtgcgttattcagccttgaggtaatgctgctgtcgtttagctgggaaaaaacgctggcggcgattatcacatcggcgattgctgcgtggacggcaacgctcgggttaggcgaggaatcgcaataccattttacttccgacatcctgccgcattcatttctctggtgggcgattatcgctggccccattcttggcgccggggcctggctctttcgcaaagcgaccagcacggcccgctcgcgcgttcggagcaactggcagatgccggttttctgtctgctggcgttttccctgcttgccgtcctcagcctctatttcccccagcttccgggaaacggtaaagggcctatgcagctggctctcagcgatgaactgggtttccccggggcggcgatgctgatggcgctgaaaatggtggtgattctggcggtgctgcgcggcggcgcggagggcggcctgctgacgccggggctggcggtcggcggcctgaccagcctgctgctgtgtatgctctggcaacagctgcttcccggcggagattacggcagttttgctctcgtcggcgcggcggcgtttctcgccgcatccatgcagatgccgctaacggcggtcgcgctggtgatggagttcacccacatggatcacagctatctggcccccacgctgctgtgcgccgcaggggcatttttaacctgccggatattggataagaactacgccttctga

SEQ ID NO: 179140 - DNA, 1524 bp, Klebsiella oxytoca
atgcaaaatggagtctgggcgctggtgctgtggatgctggtgggatacgggcaggcagcctgccccgcgtggccgcaggccagggccgatcgggagattgaacgtctcagccagcagataacggaatggaaaaacgcctactggcagctggggagcagtacggtaagcgatgaggtctatgaccagcttgcggagcggctggcgtactggcggcgctgcttcaccggcgaggctcccgctcacgatgcgtctcctcccctaaaaggggaggccagacatccggtggcgcacaccggcgtgcgtaaactggcaaatcaagccgacgtggcgcgctggatgcgcggtcaatccggcctgtgggtacagcctaaagtcgatggcgtcgcggtcacgctcgtgtatcggcaggggcgactgacccaggcgataagccggggtaatggcctggccggggaagactggacggccagggtcttgcagatcccctctgtgcctaaaatctctgacggcgtactggcgaatagcgttctacagggtgagctgttcctgctccgcgaggggcacgtgcaaaagcagatgggcggcatgaacgcgcgggcaaaagttgccggcatgatgatgcgccagcaggctgcggcggatcttaatcagctgggtctctttatctgggcatggcccgatgggccgcaggatatgaaacagcggctggcgctgctgcggcagggcggctttctttacagcgcgcttttttcgcaccctgtcgcggatgcgcagcaggttgaacagtggcgccagcgctggttcacttcaccgctgccttttgccagcgatggcgtcgtagtgcggcgggaaaaagcatctcccgggcgcttctgggttccgggtcagggagattgggtcatcgcctggaaatatccgcccgcctcacgcgtcatggaggttcgccgtatcagctttagcatcgggcgcagcggtaaaatagccgtggtggcgcatctggagccgcagatgctggacgataagcgcgtgcagcgggtgagcgtcggttcggtatcccgctggtacaatctggatatcggtattggcgaccagctgcaaatcagccttgccgggcaggggataccgcgcatcgattcggtcgtctggcgcacggctcagcgtaataaaccccagccaccggcggcgcgtttcaatgccttaacctgctattttgccacgcccgagtgtgcggaacagtttctttcgcggctggtctggctctcatcccgatcggttctcgatattgacggcgtgggagaagcgctatggcggtccctgcatgacgcgcgcagcatggagcatctcttttcatggctggcgtttacgccggagcggctgcaagccataccggggggtctcgacgctgcgcgggcagaggctgtggcaccagttcaatcttgcgcgcgaacggccttttctgcgctggatccaggcgatgggagtccctataccgaagacggcgtttgcccggctgaaggaggatga

SEQ ID NO: 179141 - DNA, 4092 bp, Klebsiella oxytoca
atggtcgaacttaacccgcctttgggaacgacgacgcctgaaatattcctggataacgtcaagcgggccgatcggttagtgaacggtccggccggaacggttgacgaccgcggcggggaaccgctcgatacgtggcgccagatgatggcgaagaatgatgaagtccggcagaacatcattccgctgagtaagcagtaccagacgcttgaagcggcccaggccgatatcgtcaatatccctgaggggagcaccacgtattaccgcagccctgatgattccgcgctcgctatcgaggtcattaacaccgccgggacgcttgtagcaactgggcggaaaatgccctctcaggaatctgtcaataaagccatcgaagatttgttttttgctctgaacacacaaatcagtctggtgtccagtgaaagtaaggatatcgatgagttgtatgtcaggaacagaattcgcgatctcgacactgcaatttcagggtatttgacgcctcttgactacatcagacagtacggctctgaaatcgagtattcaaaatctcataccagcgatgctatttttaagcttgaatctctgtccctcgcgggtgctgcgcgcctcagtaatttcaagatcgtcgattccctgggcgtggcggttagcatttctgtgctggaaggcgaatcaattacaggcccggtcaggacctcaagctatgtggagttcgccctaaatccggccagtttccatgatatggggatcaacactgataccgggtttaccattgtccgtattgatgttgctctgggcggcagtctcccgtccgatacaacccgaatcatccgcgaccgctccggtcgttttgcggcttacacaccagataccatatacggtgggactaccgaaggggtgacatattctgcatcggtaaaagggttgttgcttaaattaagcaacaagacaatcacagacgctgggtttgcgcttacaactgatggcgtgatctcgtacatcaaagaaaacctgacgggttttgtgttctcacaactgacagcagactcagtatcaacgccgttctgcaacgtcttccgtgtggcagcgggtactgtaactgtaacgtctactggagtggctgactcagataaaacggtaatgtgcgtgggcacattttatgtcagcaaagtctcacccaaaactaaaacatcaggccagcttgccgcctctcgtttagctgaggatattgcgaccatagaatcggtcgtcgagacggggaaaatacgaaccctggcgcctgagaatgacggtttcactgtaaacatcgcgaatgtggccacggtcggaaatgccgcattactgtcggttgacacaatcgcagacagccgttttgtactggacaaattcgcgctggccaatgtcgccagacgaaccatactgcggatggttgacgggatcggtaccgcacaggaactcgttttcctggagggtgagtatactgtcgcacagacgctgtattcaccctacgtagatttcatcttcgagccacgtgaattttataacgtgtttgcagacactgataccggttatacgtccatggatatcgccgtgacattaccgggtacactgccgtctgataccactcgaatcatccgcgaccgggccggagtatggggggcttatacgccggtgacgattaaatccggcaaaggtataacctactcggccacaggtcggcttatcctgaacgttcctaacgcggaaataacggacgccgggtacgacctgtcccagaaggggatcatttcctatgtcattgataatctgtccgggcatcgtttcagtcagctgagcgccaccgtttcatcgagaccgttctgcaatgtcttcgtgctggccgcaggaacagtatcagtcctgaccgatggtgccgctgcatccgataaagtagtcactatgtcgggacggctgttttctaagcgctccggctccggcatgaacagcctgtataaacgtctcatctgttctgtgtctaataatcttgatgttgccaccgggatgcgcccggtatacctgaaatgcaaatttgctcccggagaagttatttctgaagactgcctggttgtcaaagatactgccggggtggtgtatccgtgtcagtgggatggtgagcaggatttcaatccacgccgcaatgcaacagccggatactggcctgatggctcgctgcgatgcggatcgctaatcatttttgacaatatccaggccaatagctcgaaggattatgtgcttgaagcgcacccggccccccagacacgcaacgttttctcgcggtgtacccgggagacgcagacaagcctcctggtgaccgcagacgatggcacgcaggcgcgttttgacagtgttgtcggctggctgttgtacaagctgaatcgcgacggaaagacttatagctatatctgccagcatctactgattacacgcgtttctggttcagcaaccacatacagttgcggctatgctaatgcccggtatcgtgtgttaagcgatggtcctctgttcaccgaagtagagaccacatttaaaaatttcgtgcaaccggcctatcccacagtcgataaacagtacctcgaaatgaggtaccgcacgaagatcttcaaaaatggctatatcaaggttgacgcgcagcaccgtctgctgatggacctcccggataacaccctttacggcagcgaatgccgtgttcagcttgattcttcggaggctaaaacctaccgcgcggggtataacagcatctggacggacaatgctgtcagacgcagtatctcactgcactatgcaaatggcgatgtccgacgggatgatggtgagattaataccctggcccaacgcccgtcagtcattaacattaccaccacgtcgtcatatacgcgtgcagatgtgggatgggcgcaattcagcagctcgatactgggtgcacctaaggactgggcatggacaatgggtttttccatcaacatgaacgaaccggaattcgataatgttgtcctgtctaatctggagcataaccctgtcaccggatttgcatcggcggtgtcgctgtatcctcgtattcgcacggccgcgatcatggctaaactggcaaatctgatttccggtatcgtgtcctggtctgaactggatgcatcgacaactgacacagccaatggggcgttcaacactctggcaggatcgttagtccgtcatctctattcaggccagggctctttcgatgctgagtacgcgaaattcgatgcatgggccactgctatgtacggtgggatagaaagcattcacatggggagcgcagctgaatacaagggattacagttcgccagcaggctagtccttccgcaactgaactggttctatcaggttgcattgaaaaaaggcgatacagcgaaagtggcggagttgaaagtggccattgcaaatatggcgtctgactgccataacgctttcggagggatcgggaaagctaactcgaacttttacgcagcatcccatcgggcatggggtcttgcagttatggcggggcttgacccgagcggaacttacgcggctgacatggatatggtggatggccagttctcctcttcggactacttcgaaggtgtgaccaatattattacggataacccgcgggagaatgttggtggtatgcgttacctgcattaccagatgtatgcgtataacaactatttgctgggatgcaaagcggctgaccggactccagtaattgacatgaagacgtatatgcttaatgccatttctgcttacggtggtctgcgtgaaattgatttttgtgtcgcagagtcacggcgggggaacccaaccacagtggcgtttatgctttacccgttgttgcattcaggggatgtatcttgtctggatgcagctgacagagtgttgaacgctttcgaggaatacgcgggttctaatacgtcaggacaaataaaactttgggatttgaattttctgtcagtaatcaccaccagtttttctgagtatacattcgcctgcaatattatggcagatgtgtggatgcagtactggcttgataataaccgataa

SEQ ID NO: 179142 - DNA, 747 bp, Klebsiella oxytoca
atgccgataccagccgttttcattgattcagacctgccggaaaccccgggacagaaaaatattgacgattttatcgtaaaaaactggtttacagacttccctgcggtcgacggaacaaaactgggtgggtattacttcggaaatcccgtaagtaatctggcgatgaactcatttaacaatgccgcacctgcgacattgaatggatcattcgataactcacagggttatattaacgttgatgttaataactatctcgacaccacacttaaagcgcctgttgccctaaaagtgctggcggtcatcagacgaccatcaaatccttctgtggcaaattatttcatttctgacttttccggcacgggagtagcggggctcggatttgggcttggcactgccactgacggtaaattgcggatagttggtcaaaacgacgctaccacagcggtggcatcggtggatttcccttcttcaattgcggtcggtgacctgtgcgcgatagcggcacacgttattcagggagcggtatatgttgcaatctacaatcctgcaactgcgacgtacgtcgcaggaaataccgctatgtcaggtactcgttcagcaggtacaaagaatatccttattggcaggaaaacagataacaatacctcatccgcttcaacggcaatcaagtctgcagtgctgataaacggcgagatcacaggagctcagcaacttgcggcaatgcaatacctgctggcgatggattaa

SEQ ID NO: 179143 - DNA, 1728 bp, Klebsiella oxytoca
atggtcgaacttaacccgcctttgggaacgacgacgcctgaaatattcctggataacgtcaagcgggccgatcggttagtgaacggtccggccggaacggttgacgaccgcggcggggaaccgctcgatacgtggcgccagatgatggcgaagaatgatgaagtccggcagaacatcattccgctgagtaagcagtaccagacgcttgaagcggcccaggccgatatcgtcaatatccctgaggggagcaccacgtattaccgcagccctgatgatagtgcccttgctattgaagttatcaacaacggaggaacacttgaggctaccgggcgacagatgccttctgtcgttactatcgggaaaaaattagatgagcggattccactgggggatttcaaaccatcatatttcccactatggtatgacagaaatggaaaagtcattgtctggtgcaaagatggatatccagatttctcgggtttcggggaaaacgcacaaagcatcgtagcagccatccctaacgagtgggcccagtatcatcttcggcagttcgactttagtccctcgtacttccctctctggttcgacagaaaaggcaaagtcctggcgtggagtaagaacggcacggtggattttgtcattggagagagcattcagagtcaggttaaagaactggttggcgcaaattcttcgagttcattcattgaaggtgatcagtttaaatttatttttaagcggggccgcatcgctgcgggcgtagcagccagccttaatgtcggctttggtatggattcatggggagaaaagagcaccataccgcaggcacttattaatatcctgggtggtggatacaaagaccccgggtatatcagttgctctaccaggacagatggggttatggccggaatcactttggtggtcaccaactttacgaaatatgacggtgataatgaaaacaacaatgcaccgcctccgtacggctcaggccctgatggcaacgcttactggaataataatacggtgggaactctgacctggtcgaatgtaacggccacggacctctcgttattttattttgacagcacggggaattttactgtcgctatcgacggtggagcacctgtgactatcaccggaacaaatagcggcacggtaaaaaaatatgacattaccggactgactgcgactgcacatactgttgttgtaaccagttcagggacgggtgttgtttccattctctgtatgtatggaaaaaatagcgccagaaccaacggaatcaccgtttcgcgcatggggaatggtggggctatggcaaaagactatttgcactggcaggactatattaccccgattgttactcactttgacctcgatttattttttatgattcttggtaccaacgatttcaggaaaagcgcgggtatcgctgagtttgtcaatgggctacaggtagttatcgataaatacaaagcggccacgccgggaatttgtatttgcctggtttctgcggcgcaaagcaacgcaaccggaacgcctgccttatctgaatatgatgaagccatgcgtacgctggcaatcgagaataacgttaattttatcagcctctaccagttgtttccaaagacgtacgataactccggtggcgcatgggctgacgcattgcacctgtcagaccgtggcgcgtatgtactggcgcgtaaaatcaaaaatgaatttttccaggagtaa

SEQ ID NO: 179144 - DNA, 3078 bp, Klebsiella oxytoca
atgacgattaagttttttccgtcccggttgccgggtaaccccctggagacgcacgaacatggcgcgatgaccctgcatgagtggatggtcaggaatgtcccgagctactcgcaggacagaaagcatcctgttgctgtcgaactggacggccgggctgttccacctgcggaatggccactatgtttgctgcggccagacagcgatgtgcggatttacccaatcccgtatgggactggcctggaaatcgccgtgtgggtatcggttgccgtatctattgcctctacggcctatgcgctgtttttcgccccgaaaccagagctgggcgggttttcgtcaggcaattcagcatcactggacctgaatccggcaaaagcgaatacagccaagcttggcgatcctgttcgcgaggtcttcggaagaaacagaatttatccggattacctggtgcagcctgtcactcgctttgaccccaatgatcccacccggatgacggtcgaaatgtttgtgtgcctcggatacggtcgtttctcatacacaggtggtgattttcgggtaggtgaaactcctgctctgccattaggcgatggcttttcttataccagctatgggcctggcgataacgtggcgggtgaccgtcgcagtgagatctggttcaactcaacggaagtcgggggaacgtcaagtgggagcggcctcgatatggctcagactgctcctgaagccagtgatatcgttgctgatgccatgactgttagcggtgcatctgtttcgttttcaggtctcgatgtcgatgatgacaacgatgatgatgaagatgagaacaaactgcctcctggctggattgagggtgcaattgtcactctgaaagcgccggtgaattatcaggtatcgattgaggatggttttaacgttctgacaggtgacgccgtggcagaagtggcgccatataatggtatgcctgtaacgctgacatttagcggtaccgattacgatctgcagattgccacgtataccccccaccaggacgccattccgggaacgggtggatcgactgcagcattgcgcgccagtgcgtcgccatccacgtatgattttacgacaaccagccagacgtttgctctgacctggcagggcgtcacctataccctgtccctggttgctgactacggcacaatgtccggtttgctggcggcgattaacagcgggctcaccggatcggggttgattgctctggatgacggcggcgtgattcgtatcgtggaaatctccagcccgtggcgtggcggttccattacgtcatcattcctgcccgcgtcagtttttggagacagccctgtgtttactgccggtacagcatccagtggcggaagcccggcggtcacagccagtgtcaggctggcatacgattccggtaccgcattttctgggctgccggacggcacgcagcggatttccctggctcaccgtggcaacgaataccagatagcatcgactgacggatcgtctgcgaccgtacagagagtggttaacggtgccgttgacaacacctggtcaggttttctgacccgtaccgtcgtagattttgccgcgtctggtattaacgataatgaaacatggctcggcccctttctggcctccccgcaaaatgaagttgtggacgccttcgaggtcaactttgctttcccaaacggaatttgcggattccagaacaacgggaataagcgggttcgccatgttgagtatgaaattcagtaccgcgtatatggttccggatcggggtggacgagtaagcagggggtgtacgcgcttaaaaacgttaatggcctcggttttacagagcgttttgatctgtcttctcccgggctggtggaggttcgatgccgccgccgcaacgagcaggggagcaacaacgcgagagacagcatgttctggcaggcgctcagaggtcgtttgctttcccgtccgacctcctacgcagggatatcaacaatagggatcacggttgaaaccggcggccagctggcggcgcagtcagacaagcgtgtgagtgttgtcgccacgcgaaactatgatggcggtggtgacaggacaatcagcggggcattcctgcatctggcccgcagtctgggttatcgcgacgaccagatcgacatttccacaattaacatgcttgaggctaactactgggcgccacgaggcgagtattttgaccatcaggcaagcagtgacagcacgtccgcaaaggatattttcgacaagattgctgaagcaggcatggggtattttctgctgtctgacggcttactttccgtcgggcgtgaaggggtcaaaagctggaccggtattatcaccccccaggatactgtcgaggaaatgcagacatcattcagggttccttcggaggatgattttgatggtgtggatgtgaaatacatcaatcccgtaacctgggcggaggagaccgcacagtgccggacgcctgaaaatccgtttccccggaaaacggaggcttacaccatcgatgtcgtcatgactgcggatcgtgcctggcgtatcgggatgcgccggttaatgaaatatctccatcaacgccggacgtatacggccacaacagcaatgctgggatggtgccatgattttggtgaccatatcattttgtccgacgacattcgaacagggaaaacccaaagttgcctgattgacgcaatgatatacgacttccaggaaattacgctgcacgttacggagccactggactggagctacgcgaatcctcgctgctggatacagtttcaggacggtcgaccatcatcgcgaatgctcacgccgcaacgggtggatgatttcacgctgacggtgccgtacaacgacgacctgcatccgggcgactggattatggacgacccagatattgatccgccgaagttattgttctgcgacagtgaaaagggcgcccggcatgggatagtccaggaggttgccccatctggtgacagcaactgtcagattaccgcgccggaatataaagaaattttctacaagtacgacgacgccacataccccggcgacgtcgcttaa

SEQ ID NO: 179145 - DNA, 312 bp, Klebsiella oxytoca
atgcagttcctgatggcgctggcgctccggatgggccgcacgctgggcgaactgcgacaaaccatgacggttggcgaattcagaatgtgggctgaattcgaccgtatcagcccgatcggtgatatccgtggcgatattctcaatgcccagctggtttcagcgatgtacggggcgcagggcggtaaagtcaccatcgaagatgctcaactcaagtggagcacagaagaggatgaggtaatcgacagtggcgacccatttgccggattagaggccgctttgctcgcggcatccgaggggagatacaaaggatag

SEQ ID NO: 179146 - DNA, 405 bp, Klebsiella oxytoca
atgtcaaaacagaatcttaaagcgctggcgctggccccgatggcgggttttcgtaaaaaagaagtcaccgttccggaatgggaaaacgccaaagttatcattcgtgaaccatcggctgaggcctggattcgctggcaggggattgccagcccggaacaaccaaaactaccggaagggcaggaagcgcaagaggtgccagaactgaccccttcagaacgcgcgttccgcacgatgcgggcagatgtcacactcttcattgatattctgctggataccgacctgcagtacgttttcaccgtcgatgataccgaacaggttgaagcgatttatggccctgtccattctcggttgctgaaacaggcgcttgatctcattcgtgatgcggatgatgccaaagcaaagtaa

SEQ ID NO: 179147 - DNA, 711 bp, Klebsiella oxytoca
atgtcagcactatttgaacgcgcccaaaaaacggtagtaatgattacatcagtgccggtcactgcggaagagctggcatcggcgacctggctcaacctgagttgcaccattaaacaggccagctttactgctggtcagaaaaacgatattgacgtgacaacgctatgctccgaagaaacggaaaatatcaacgggctcccggcaccgtctgagatgtctctctccggtaacttctaccgcaacccggcgcaggatacgctgcgtactgcttacgataatgacggcgtatacggctttaaggttgtgttcccttccgggaatggcttcctgttccgcgccgaagttcgtcagcatacctgggattcacagaccaacggtgttgttgctgcaacgttctctctgcgtctgaaaggtaagcccagcaatattgattcgacaggtattctgtcattcatcaacgatctttcaccttcgctatcagtagcggcaggaagcgccctgacaatgggtgtggtcatccagggtggcactgcaccttatacctacgactggaaaaaaggttcgtcaaccgtcagcgggcagaccagcgcaacgtttaataaggccagtgcagtttctggtgatgccggtgtttactcctgtgtagtcactgactctgccactccggcgaacgttatcacctcatctgactgcaccgtcaccatcagttaa

SEQ ID NO: 179148 - DNA, 348 bp, Klebsiella oxytoca
atgacagaggatgatatctatgctttgcttgctagtctggcagacgggcgggtttatccgtatgtggtgccgcttggcagcgacgatttacccgcggtggccgctccttacatcattttctcgataccgactgatgttgccggggatgtgttctgtgggcaggccgaatcgacgctgcacattcagatagacgtgtgggcagaaactaacgatgaggcaagggcgttgcggattgaggccctttcccggctggaagtgctttcacctaccgaagtgaccaaaatccccggctatgacactacaacacacctgcatcgggcaacgcttgaaataaccgtcattgcctga

SEQ ID NO: 179149 - DNA, 450 bp, Klebsiella oxytoca
atgattgatgtgaatctggatttttccggtttgcaggatatcgcccgagacctgcaaacactcagcaaagctgaaaacaataaagtcctccgggattcgacccgcgccggggccgaagttctccggcaggaagtgattgacagggctcctgagaaaaccgggaagctgaagaaaaacgttgttgtcgtcacccagaaaagccgccgtcgcggtgaaatctcctcgggggtgcatattcgtggtgttaatccgcgaacgggaaacagcgacaacaccatgaaggccagcaacaagcggaatgctttttactggcgctttgtcgaacttgggactgctacggctccggcacatccctttgtgcgtcctgcgtttgatacccggcaggaagaagctgcacaggcagcaataaaccgaatgaacaaggcgattgatgaggtgctggcgaaatga

SEQ ID NO: 179150 - DNA, 483 bp, Klebsiella oxytoca
atgccgcattggtccaattttcatcatcccctccggctaaacacccatttgaattcgccagggattcagcaaccagcgtgcgggtcctgggatatcaggactcagatcatccccgcggttttcatacaaccagcccactataagaagaaccgcgctctgaatggagggcgtgatgataagcggacgatcgccggcactttcattctcaacagcactatccagagcagcctggtcagcaaaaaagcgacggttaagaaactgcatagcagcatcctccgcagcggcaagatacccctccaccatcgttttatcgatttcatcatccagcctgagatgttccatggctgtttcagtgttgattaccgtcataaccattaccctttggtttcgggggcgcggttcattttgttatcagggacttcaccaactatcgtcaccagcccgttacctttgagctcggcagcacgtaagcgagagacatga

SEQ ID NO: 179151 - DNA, 255 bp, Klebsiella oxytoca; identical to SEQ ID NO: 111839

SEQ ID NO: 179152 - DNA, 1221 bp, Klebsiella oxytoca
atgtaccagaaaaaatcggctgacgatcagccacaaagtattggcgaaatctcctcccagctcaccatggtgattgatcaggtcaaaaacttcggcgaagacgtgaagagaaaaatggaggcaggagaaaccgtttcgctggaactgaaacaaagaacggacgaaagcattaatcagatgaacgagctgaaagaacgtctcactgagctggagcaaaaaggtgcacgccgcccgaacgaagcacctgcacagcgaaaatcgctcggtgagctggtggtcgaaagtgaagagttcaaaggcatggacagttcggcccgtaagagcatccgcgtcaagctggaacagaaagatattatgaacgtgccggcaactacgggcactggcgtgagcacaaccaacagtctggtggtctccgatcgtgttcagggcattatcgccccgccggaacgcactctgaccatccgtaatctgcttatccccggtaataccgcatctaacggtattgaattcgttcaggaaacggggtttaccaataatgctgcagctgtggcggaaggtgctctgaagccaaaatcagacattaagtttgagctgaaaagtgcgccggttcgtaccattgcgcattattttaaagcgtcccgtcagatcctggacgatgcgcccggtctggccagttatatcgatggccgtgctcagtatggtcttcgctttaaagaggagcagcagttgctgagcggcgatggcaccggagcgaatatcctcggtattctgccgcaggcaacagaatttgctccagcgcttaccctgtccaacgccacgccgatcgaccgtcttcgcctggctgttctgcaggccgttcttgcagaatatccggcgtctggttttgtactgaaccctattgactgggcaggcatcgagttaaccaaagataacgaaggccgctacatcattgcgcagccggtcaatggtggtgttccacggatctggggtcttcctgttgtggaaactcaggctatggcgcagaacaacttcctgactggagccttcaacatggctgcgcaaatcttcgatcgcatggatatcgaagtgctgctctccactgagaacgaagatgactttattaaaaacatggtcaccattcgtgcggaagagcgtctggcgttagcagtttatcgtccggaagcatttgtcaccggtaatgtaaccgcttctggcggctga

SEQ ID NO: 179153 - DNA, 708 bp, Klebsiella oxytoca
atgtaccggaaaaacgcagccatgaaagtaaaggcattcgacttcgatattaaggccgtcaacgatgacggccttttttctggatacggttctgtcttcgatgttgtcgatagttacaacgaagtcgtggcgccgggtgcgttcctcgaaagcatcgaggaaacacgggcgaaggggagaacgttcccggttctctggcagcatcgcaccggcgaacccatcgggaactgggatatctcgaccctgaaagaagataaacatgggctttttggtgaaggggccctgtggcttgaagacgcggcctacgcgaaaaccgcctggcggggcatgaaaacccgggcaattactggcctttccattggttattacgtccgtgagtcaaattacgatgagaaaacccggatccgcactttaacgcagctcgatctggttgaaatctcgattgttaccgtcccggccaacgacgatgcccgcatcgacgtcattaaatcgaaattgtcacacggtgatcttccttccttacctgaatttgagaagttcctgcgagaggcaggtttctcgaaaagtcagtccgctgcggtcgcctcccgcgggctgtcctatctgcttgaccggagtgagtccgggggcgaagacggcgaaaccaaagcggctattgcggctatgcgccagcaactgagccagttttctctcccaaaaattctctaa

SEQ ID NO: 179154 - DNA, 1320 bp, Klebsiella oxytoca
atgaataaagagaagaagccaggccggataaaaagcgccgttcgccggtggctaggcgtacccatctcccttaccgaaggtgaattctgggctgcttatgctggtgggcagtccgcagcaggcaaatccgttacggttgataaagccctgcagttatcggcagtgtggtcatgcgtcaggctgttatccgaaaccatcgcgacgttacctgttggtttttacgaaaaaacggctgatggtcgccagagtgcaaatgatcacccgctttatgagctcctccataatcaaccaaatgctgacatgaccgctgtggagttctgggaaatgatcatggccagtctgcttttatgggggaatgcttacgcagaaatcgaccgtaccggaaagcgtattacctcgcttgtaccgctcaggccagaaaggatgaaggttgatttaagcaagagcggagatcctatttatacctaccgtgactggccttcaggtacatcccgaaacattgatgaacgggacatcatgcacatccgtgcgttcagcaccaatggtgtcatgggcctgtcacctgtcagttatgcccggcagacacttggtctggcaatggcaacagatgaagccagcgccaaagtttttaaaaacggtatgcggcccagcggcgttctctcaatggatcaaatcctgaaaaaagagcagcgcaatgaagtacgtgaaagcatggctgaacaattttctggatccatgaataccgggaaaatgatggttcttgaagcgggaatgaagtttcagccagttgacctcaacccggaagacgcccagatgctgcagtccagggcattcaatatcgaagagatttgtcggtggttcagagtatggccggggttgattggacacagcgcccaggggcagacaatgtggggaagtggcgtcgaacagatgctgattggctttttaacgttttcacttcgtccatggcttacccgtattgagcaggcgattcgtaaaagcctcctggctccgggagaaagaaataagtacttcgcagagttttccatcgaaggtctcttacgtgccgacagcgccgcccgtgccgctttttactcaacgatgacccagaacggtctgatgacccgcaatgaagcacggcaaaaagaaaaccttcagccaaaacccggcgctgatcaacttaccgttcaatccaacctgctgccaatagatcagcttggcaagtccggcgacagtgaatcggccaaaaacgcattgcgggaatggcttggcattaaatcagaggagacgccggaatgtaccggaaaaacgcagccatga

SEQ ID NO: 179155 - DNA, 1737 bp, Klebsiella oxytoca
atggcgaagaccccgaagaggacacgctcgacaagttcttcggttgatcctgcaacccaatatgcgatggatgtaacctcgggcaaagaactggctggtcctgacatacgtaactcatgccagcgccaccttaacgatctacagtcatgtcatgcccgtggtctgcactgggatgttgaggcggcgcaacgctcgattgactattttgcgaaagttctgaagctcaatggtggtgatttcgaaggcgagcctttcgtgttgctgccatggcagtgcttcatcgtcggttcgatttttggctggaaaaacgccagaggttttcgccggttccgaatggtctatgtggagtccgggaagggatccggtaaatcccctctgtctgcgggtataggactttactgtctcactgcggataaagaagcacgcgctgaagtttatgccgctgccacgaagaaagaccaggcaatggtccttttccgtgatgcggtggcgatggtcgatcagtctccagctctttccgcacgtattcagaaatcaggtggtgccgggaaggaatggaacctggcttttcttcagtctggttccttctttcgtccaatcagttcagatgacgggcagtccggcccgcgaccgcattgtgctcttattgatgaagttcacgagcataaaagcaatcaggttgttgaaatgatgcgtgccggtaccaaaggtcgtcggcaggcgctgattttcatgatcaccaacagtgggcacgataaaacgagcgtctgctatgactatcacgaatatggccgaaaggtttctgccggttcgatagaagatgacagcttttttgccttcatttgttctctggatgaaggagacgatcctttcaaggatgagtcctgctggaagaaagctaacccttcgctgggtcacacctttgaagaaagctatcttcgtgagcaggtgactcaggcccgcgggatgccatcgaaagagagcatcgtcagacgtcttaacttctgtcagtgggttgacgcggctaatccgtggatgagcagtgatgtctggatgggttgtgaggagagctttgatccagatgaactggaaggtgaggaatgctatggcggtttagacctgtccggatcgcgtgatttgacggcactggcgttgttttttccaaaacaacgtaagttgctggtggagttctggaccccgaaagatacattactggaacgggccaaaacggaccgggtaccttatgacgcctgggagcgagatggtcacatccacaccacacctggcaaagcagtgaaatacggctttgttgcccagcgcattgcagatctgactcagaagtttgatatcaaggccatcgccttcgaccagtatcgcattaaatatcttgagccggagcttgaggaagcatctgtttctgttccgttaatccctcatgggcaagggtattacaaagcgaaagattccgggctatggatgcctcactccatcgaattgtttgaagagttgcttgatgacagcgtcattatcatcaggacgaacccttgtcttcgctggaatgcggcttcagcagtgacggaggctgatcagaaagaaaaccgaatttttgccaagaaaaaaagtaccgggcgtatcgacggcattgtagcgggcgctatggcaatcggtgcctccgaaggctatgaggatgattctggcgatatcgacgactttttcagtaatcccatcattgtgtga

SEQ ID NO: 179156 - DNA, 465 bp, Klebsiella oxytoca
atggcaggacgacgcccgaaaccgacccacctcaaagtggtctccggcaacccgggcaaacgtaaactcaacgataaagaaccgactccggcgcgagaaattccaagcccgccggcgcacctgaccgactggggaaaggtcgcctggggaaggttgactgttctccttgacgggatgggggttttaacggttgccgacaccttagcccttgaacggctatgcgatatttacgctgatattcttcagttgcgcgacaccatcgcagtagagggaagaacctataccgtccagaccgagggtggttttcttatcaaagctaacccggccgtttcgatgttggccgatgccgaccgccgttttaaaagttacctggttgaattcggtctgacgccagcggcaaggacgaaggtgaaagtgaatggcgaagaccccgaagaggacacgctcgacaagttcttcggttga

SEQ ID NO: 179157 - DNA, 342 bp, Klebsiella oxytoca
atgaacaaagaaccgcgcatatacggcagcaaatgggaccgtgagcgccttatattccttcgtgcgcaccctttatgcgtcatgtgccaggagcaaggcagggtgacagcggccactgtagttgaccacatcataccgcacaaactgaaagaggctctgcgctctggtgacagccaggcaatagcgaaagcgcaaaagcttttctggagccggaagaactggcaagggctgtgtaagcagcaccatgactcaacgaagcagcgaatggagaagcgcggcaccgttatcggctgcgatgaaaacggtattccgcttgatccaaattctcactggttcagatga

SEQ ID NO: 179158 - DNA, 228 bp, Klebsiella oxytoca
atggtcgaaatcaccgacgcccagcagattcgtctcaacctgctgtcaaccctgaactacgacacagcagcagcaaaagtcgccgtagaatttgttcaggatgatccgcttaagtatcagctgtttattcagcaatacagccgtgtcacatcagagacggaagtggtggcaaagacgatgaaagcagtacaggaagcgaatgaggctttggcgctgtttgatgagtag

SEQ ID NO: 179159 - DNA, 201 bp, Klebsiella oxytoca
atgttaacagtacaagtgatgtcgcctggtggcggtgaagaaattcattgtggactgagcgttggcttcaaccccaaccagcagagtattgccgtatcgggaatggaccagaacgtattcctgaagcagggagaagtggcctacgtgatgaacgcaaacggcaagaccatttcacgttacgaacacctggaacgacagtag

SEQ ID NO: 179160 - DNA, 198 bp, Klebsiella oxytoca
atgacgatgttgatcgggagctgcgcgaaaagtttacccgccccggtagtcgttgatacggcctgcaactgggtgagggtcatctacctgaccgaccacgatattgaagttctcgaccgtcagacgaagcgcgacattctggcgcacaacaactccgtgctggctaactgcgagaagaaacccaccaataatcagtaa

SEQ ID NO: 179161 - DNA, 276 bp, Klebsiella oxytoca
atgggcattgaaatgattattggtctggcaactgcgttgctggtcattgtcgctggcgcatttgggttaggtcatgcgcgaggcactaataaagcagaagccaaagccgaacagcagcgaaccgaagagaacgccgctgctaccgtcgccgtggcagaacgccgggctgatgcaacgaaaggggccagtgatgtacaggaagacgttaagcgtatgggcgatgacgatgttgatcgggagctgcgcgaaaagtttacccgccccggtagtcgttga

SEQ ID NO: 179162 - DNA, 630 bp, Klebsiella oxytoca
atgaataaatcacaattccagaaggcggctggtatcagcgccgggttagctgcgcgctggtttccgcatattgatgctgcgatgaaagaattcggcatcactgctccactcgaccaggcgatgttcattgcccagatggggcacgagtcaggaggctttacccggctggtggaaaatctgaactatgcagcagatagccttgtgcctacgttcggtaaacaccgtatcaccgcccagcaggccgccgcactcggcagaacggcaacacaaccagcgaatcagcgagcaatcgctaatctggtgtatgggggcgagtggggaaaaaagaatctcggtaatcaggttgccggtgatggctggaaatatcgcggtcgcggactgaaacaagttacgggcttgagcaactatcgcagctgcggacaggcgctgaagcttgaccttgttacccagcctgagctgctggagcgagatgattatgccgctcgttcagccgcatggttttatgtttcccacggttgccttcttcattccggtgatgttgagcgcgtaaccctgcttattaacggtggccgcaacggtctggataaacgccgagcgctgtttaaccaggctaaatcagtactgatgtga

SEQ ID NO: 179163 - DNA, 282 bp, Klebsiella oxytoca
atggtaacaagtgatccgagcgcaatcatcaatgcggtgatatgcgctgtaattgttgttgcgttgatgttctaccggcgcgacgggtcaagacaccgccccatgatatcgctgatggcttacttcactgtgctggtttacgccagcatccctttccgtttcctgtttggcctgtacgagtcatcccactggctggtggtgctggctaacattcttatctgcggcgcggttctctggttcagggggaatgtggcgcgactggttgatgcactgaggcactga

SEQ ID NO: 179164 - DNA, 396 bp, Klebsiella oxytoca
atgtccgatcctgtttctgccacaacgatagcagctggtggactgttcggcgccagcctattcggccttgcaactggtattgattacggcgtggtatttggtgcgtttgctggtgcggtgttctatgtcgcaacggcggtgaatattagccgcataaagctggtgggctattttatcacttcattcatattcggtgtgattggtgctcctctgctggggtcgtacttctcaaagtggactggttacaacgacaggccgcttgatgcactcggagcggtaatcgtggcagccatagccattaagttgctgacgttcgtaaacagtcaggacctgggtagcctgtttgggattctctctcgcttacgtggaggagggacaagcaatggtaacaagtga

SEQ ID NO: 179165 - DNA, 411 bp, Klebsiella oxytoca
atggaaattatttcagtaatcggagtgatactgacactgctagggctctttattccgtcactaatcagtaaccattcgtcacgtaaggcagagttcaggaagcattccgcaccactgctgggaaagttagtaagcgaaattgaggctattgaaggaggctcttatccattcaggcttatcagcgatgctgatttcaaccagttgctaccttacgccccgaggcgcaggaaaaacgctctccttgatgcttacaccagttatctcgacgctcatacgatggccaccacgaagcactggcacgatgaacatccatccgatggaatgctatttttcccgacgggtttctcagtcactaattcagatgaggtactgaagaaaatgcaacctctgaaaaaagaactcagcagatag

SEQ ID NO: 179166 - DNA, 426 bp, Klebsiella oxytoca
atgttcggtatttttaaaaagaaagcccgtaaagccgttgttgaagtaaaaaaaatggaaaaccgcgatgccgtagaagccacggtctggggagcgtactcgattgcatacgccgatggtacctgcgatgcaaaagagattgcagtgctggagaagactatttcggccctcccggcattcgcgccatttgctggtgaaattgcccagatgagttcgaatattcgcgctcgctatgaagcatcacctcgttcagccaacgctcaggcgttgcgcgaactggctgacgttgccgggacggatgacgctgtcgatgttctttgcctgtgtcttgatgtagctgataacgacggcatcggggaagaagaagagaaacagctgaagaaaattgcccaggctctgcaacttcctctggaccagtacctgtga

SEQ ID NO: 179167 - DNA, 501 bp, Klebsiella oxytoca
atgaatctatctcttgaaacggttaggaactttttttcatacgatgaaactacgggcatcctttattgcaagtcaccttttgggagtaaaagtcctggcgacactcttggcgtcaagactgatactgggtatttaagggtattcttcaatggaaagaatatacgtgtgcaccgaataatttgggtcttgaaatacggtgaaattccgtcaacccttgttgttgatcatattgatggcgacaagttgaataaccgtattacaaatctcaggctctgcacacaaaaccagaacactcgcaatcgacggatacacagcaataacgcagctggacttaaaggggtctatttcaacgattccccccgcaatagaaaaaaatggattgcgcaaataagtattgcaaagaaaaaaattcgacttggtcgcttccacactaaagaagaagcgcacagggcgtatgtagctgcttccaggcagtaccatggtgatttttcatctatttaa

SEQ ID NO: 179168 - DNA, 192 bp, Klebsiella oxytoca
atgctaaatcagcaagatatgacggaaacagccaaggctgtttttgatgagttaagtgacaaaccggctacggctggggagattgctcagaatactcacctgagccgcgaacgctgccagctcatacttacgcagctggtaatggcggggttatctgattatcagttcggatgttataagcgcctccagtaa

SEQ ID NO: 179169 - DNA, 831 bp, Klebsiella oxytoca
atgaatattgaatcaattcccaaatttttcgcgcccaaaggaatgcatatttccgatagcggtcgtgcaaccgccagtgagcaactcactgtgacagatgtaatggccgctctggggatgacacaggcagaggcaggaataggcctgtcaatgtttttgggtaaagctggaatcagcgaacacgacagaaaggcatccgtcagttggttggctgaatatgcaaaatcaaaagcgcctcgatcgataagaaaagcagcagggaagaagttcccgctgtgtatgctgataatagctcggttcgcttataacgactatgcctcgtctgcagctgacagcgtagattgcaggaagtgttctggttcaggcttcataaaaaaaacctcaatggtggaaaaaagccactacacaatgagattaccgcaatgggcaaaagacctcaggcagtcaccttcggattttgaagtaaaacgtcaggtggaagaggttgaccatgttctttgcttcaaatgcggcggcaccgggaaaatcagcaagcgatgccagtgcggcggtacgggaaaaaacctggaccgtaaagagtcagagctgcagggagtgcctgtctacaaagtatgtaaacgttgtgaaggccgcggttttagtcgtcctaagtcttcaaatgcataccggggtatgctctctgagctgcctggtctgccagaacgtacctggcgatacagctggaaacctttctatgaaagtctggttacaaaatgctttgaggaagagagttataccgactcacagcttaaacgtgtgacaaaggtgtctgatttgataaatatcgcataa

SEQ ID NO: 179170 - DNA, 1056 bp, Klebsiella oxytoca
gtgcgggcattgctaactccggaaattgttccgcgcctgggcgttgttctttttaaaccaggccgcgaattgatgtctctctttaccggcggtcgtgtcctgatagagcgtcagccagagaagatgaaaacactgcccactgggcggatcgccgatgcacgtcagccgcttgcagaaatggacattctgcgttttttcatgagggatgagagggttattaacgcagctggtggaattaacgctcttgaggcctggcttctacgacatgtcagagagtgccagtacccgcattcccactatcaccaccatgaattagtgactatgcggcatcctcctggcgccatggttgtctgctggcattgtgataatgaattacgtgagcagaccaccgaaatgttgtcagagctggcttatcagaatctggttcagtgggtgattgaaagggtgctgatcagccttggatacaataaggagcgcgaattatcgatggcggagctctgctggtgggctgtgaaatccggcattgctgacgcaataaccgagacgatggcgcaacaggccttaagactgcctgaggaacctttcctgtccgtttataaggatagcgatattgtcccgtcatttgctgcaggtgaaatccttcaggatcttgtcgagggcatagacctggcgaaagccagtgtactcattgagcaacctcagagtgaaagtaaacccattctgaggcttagtgtcgatccgaacagccccgaatcatttatgcgccgcccaaagcgccggcgctggacctgcgaagtttacactcgttgggttaaaactcagccatgtgaatgctgtaggcaaccatcagacgatccacaccatataatagggaatggtctggggggaactggcaccaaggcccatgatctcttcgtgataccactgtgcagagtgcatcacgatgaattacacgccaatacatcagagttcgaaaagaaatatggcactcagttagagctgtgggctcgttttctggatcgggtaatgggtatcggcgtcattgtaaaagcttga

SEQ ID NO: 179171 - DNA, 525 bp, Klebsiella oxytoca
atgagaatgacacctccacacctgcaaccagttctctccagggtaaagcgttttgtagagaagcaaccagaaggcgcaacgctaacccacctgacacacaaagtggcggcatacagcgggctcaatcgaaaagacaaagagactctgatcgatattatccgggaaagcgggatgctctgcgtgatcgatgatggaagatccactaccttgcaccacccgaaatatggtcacaactctgtggcgcctgtaatgacacctcctcagccgacgatggaatgcaaaatgaataaacagctcgaagtaactccggaagcattacgtaaacaggccgacgccttgatcaaagcggcagaggaagcggagaaaaaagccggggatcgtgcagaaattaagaaacagctcgatcccttgaagttggagattctccaggcatatggaatggccagcaggaagtttgacgagttcgtagatgctatggctgaagttggaaaagccgtgcagaagcttaaagatctgactgtttag

SEQ ID NO: 179172 - DNA, 831 bp, Klebsiella oxytoca
atgactaaccacgtcatgggtgctgctgcatccaataatcacactttttttgttattgatggtatttctgttcgtcgtgatgtccttggtcgttattgcctaaacgatctccatcgtgcttccggctcccttgaccgccataagcctgcattctggctccgtaacgaacaaactgcgcaattgataggcgagttgcaaaatagcaactcggatatttcagaacctgtaagtgtcatccgcggcggaaatgagcaaggtacctatgtttgccgtgagttggtgtatgcctacgcgatgtggatcagcgctgtttttaatctgaaggtcatcagaacgtttgacgcgctccacactgctggggctgcaaccgtcaataccgatcgcattcaggctggcataatcctcctggaatctgcagccaaaatgctcaatctctctaattcgtcaaagctcggggcatatcagaagcttcagcaggtagcagggctgcctgatttaatgccttcatatgccattgatgcaccagctggcgcgcaggatggttccagcagaccaacgctgtctcttagcgctttgcttaaagctaacaacatcagaatgaccgcgaaccaggcttatcaccttatggctggtcacggcatagtcgagcagaaggagcgtcgcagccgaacgggtatcaatggcgtgaaaagattctggtctgttacggcaaaaggttgtctgtacggtaaaaacatcaccagcccggcaaatccacgtgagacgcaaccgcacttcttcgaatcgaaatttcctgagcttttaaagctcattggcgttgtcacgcagtaa

SEQ ID NO: 179173 - DNA, 399 bp, Klebsiella oxytoca
atgaaatttattcttccattcccacccagcgtgaacacctactggcggtccccaaataaggggcccgcaaaaggtaaacaccttgtcagcgcagccggccgtaaattcaaacatgcagtacgttcagcgatcattgagcaactgcgtgcaataccaaaaccatctaccgcgccagcagctgtagaaattattctctatccgccagactatcgccggcgtgacctggacaattacaacaaggcacttcttgatgctttgacttatgccggtatctgggaggacgacaaccaggttaagcgtatggctattgaatggggtgaaatcgtcgaaggaggtagggtagaaatcaccatagtctgctatcaaaaagtggtggatacatgtacagctgtgggttga

SEQ ID NO: 179174 - DNA, 1971 bp, Klebsiella oxytoca
atgcgtgagattattgtcgataattttgctggtggcggtggcgccagtacaggtattgagctggcgatagggcgtagcgttgatatcgcgattaaccacgatgttaacgccgttgctatgcaccgcactaaccatcccgacacgcttcactattgcgaaagtgtgtttgatgtatccccattagccgctaccagtggcaagcctgtcggcctggcatggttctcgcctgactgtcgtcacttttctaaagcgaaaggtgctaaaccagtagagaaagctattcgagggctggcatggatcgtcattcgttgggcgctggatgttggcccgcgagtcatgatgctggaaaacgtcgaagagtttaaaacgtggggtccgttactcgcggcagaaatgcgaccggatccggcacgcatcggtgaaactttcaatgcatttgtcgggatgcttaccaccggtattccagcagatcatcctgcactggtggagtgttgcgagtttctggagttttcaccggatagcgagcaggccaagcgcttaattgccgggctgggttatgtcgtcgattttcgcgagctgcgcgcctgcgattatggcgcgccgaccatccgtaagcggttcttcatggtgatgcgccgggacgggaaaccgatagtctggccggaagccacgcacggggatccgaagtcttccgccgtgctggcgggacggctggaaccgtggcgtacagctgcggaatgcatagactggtcaatccccgcgccgagcatcttcggtcgcaagaagtcactggcagagaatacgctaaaacggattgcccgcggcattcagcgctttgttatcgaaagcgcttcgccgttcatcgtgaagtgcaatcacacaacgacacgtggcaaatacgactgtttccggggacaggcgctggacgatccgctacagacgattacgaaaacccacggctacgcaattgcggtacctcatctgacaaaattccgagccggagctaccgggcaggaagtcaccgatccgttgccgacggtgacggccggtaccgcaaaacgcccgggcgggaatggtcacgctctgggtattgttgaagcagagctggctccgttcctggctggcaatggcggcagcgagtaccaggctaaaccacgcccgctcgataaacccgctcacaccattatgaaagaatcgcgcgcctgtgtcgtcgctccggttatcgcccggcagttcggtgccagcatcggacaccgtgccgacgaacctagcgcaaccatcaccgcgggcggcggaggtaaatcgcagctggtatccgcattcctggcgaaacactatggcgggaattatcagggcgccggtattgacttggatgaaccagctcattcagttactaccgtcgatcatcatgcgctggttactgctcagattgttggtgttggcggtcgcgctgggcagagcaggccacgtgacgttagcgagccactgcaaaccatgacgacaaaggctgatgccgcaatggttacgtctcatctggtcaagctccgcggtacttgccgtgacggccagcctactgacgagccgatgccgactatcactgccggcggccagcacgtaggggaggttaaaacgactctggcggtcgaggactacgacgaagagcgcgcgcagcaggtgctggcgttcctgcaggaatactgcggagaggaatgcaccggtctggtggaaatcggcggagtgacttaccgcatcgttgatatcggcatgcgcatgctgcagccacacgaactttaccgggcgcagggcttccccgagtggtacatcattgaccaggattaccgcggcgtgaaatacgcgaaagataagcaggttgcgcgctgtggcaatgccgtcccgccgccgttcgccgaagcgctggtacgcgccaacttaccagaaatgtgcgtgaacagagaggagcaggcagcatga

SEQ ID NO: 179175 - DNA, 954 bp, Klebsiella oxytoca
atgagtcaggaagtacaagaagctatgaccgcagaagagcaaactttaacaaaaaccatcaacccttattgcctggcacttgaggaacagcgccggcgcagtgcgcattatttgaaagaggttggcgatcaatggcggacaccagatctgctgttctggggcgttaacgctatgtttggcccgctggtactggacctgtttgcagacgacagcaatacaaaatgtccggcatggtataccgctgaagataatgcgctgacgcaggactggtctggtcgtttggtagaactcggaggtgcggcctttgctaatccgccgtacagccgttcgcagtaccatgaaaaacaagccatcactggcatgactcatattatgaactataccgccgagcagcgtgaaaagggtggtcgttacatttacctcgtgaagtcagcaacaagtgaaacatggtggccggaatatgccgatcacatcatgtttattcgtggtcgtattggattcgatctcccaacgtggtttgtgccggccgacgaaaagcagaagcccaccagcgccttctttgccggggccattgcggtatttgataagacctggcgcggtgaacattttagctatatcgatcgcgttgagctggaagcaaaagggcgcgcaagtatggcgctggctgagtttgctgcaggaaaattcctgtcaccagtttcgccagttcagtctcctgaagtgatcatccccgatgctgttgcatcattggctgagcctgaatcccggatctggccactggaagttggactcgtctttggacaggtacaaggcgcagaggatctggagttctcccagcagaacaagctgaaggcccacattaaccagttgtggctggagcgcgtgcccaccagcgaaatcatcaccgttgctggtgggctggtcggcagcatgagggggaccgctcatgcgtga

SEQ ID NO: 179176 - DNA, 459 bp, Klebsiella oxytoca
atgaacatagccaagtcgatctttgaatttattgagaggaatccaggcaaaatgctgcgcgatatcactgcggcatttcctgaaaccaaaccggtaacagtgaagagcgctgttcatcgcctgtactacgacggggaacttgccagcgttgaagttactggtgggtttatctacttcgttgcgggatccatcgatattgaagagtacctgcctggtgggctttcgggggagattcttgcccttgaagcgacagccaaaaagctggaagagaaacgctattaccgccgtgcggcgacggtatggcagcaactttgtgacagcaactgtacggctaaagcaagagagcggtacctgcgtcttaagaatgcttctgttcgaaacgccagaaacatgaatgattccgccgggtcatgctatctggccggaaattactgcggaggtgacttgtgctccgattga

SEQ ID NO: 179177 - DNA, 912 bp, Klebsiella oxytoca
atgagcagtaaattacacggcctcgtatgggaagcatgcgctttcaaagggctgataatctcagaaatagcggtcatggctcgcctggcagatttcagtaatgacgaaggtgtgtcatggccagcggtaaccactattcagcgacagatcggcgccaagagcgagaatactgtccgcagcgctatcaaaaagcttcaggctaaaggctggctgaagaagcaggaacggcgcgtgggcggaaagaataattcgaacgtttataaactcaatgttgacatgctggaacgtgcagcagctgaagcaaaaatcttctacgcaacgccacgtgaacaatcaaaatttgatgcctcagaatttgagggttcaaaatttgaggagtcaaattctgatgcctcaaataatgggtctgtaccccctcaaatattgcgggaggacccctcaatggttgaaggcgatccgtcattagatccgtcattagatccgtcatctaaaaaaccttcttgtcgggctcctgcggaacccgacgataagccggatcctgaagttgttattaccgataacgcgatcgaagttctggcacacctgaatctggtcagcggttcccgttaccagaaatctaagacctcgctggagaacattcgcgcccgcctccgcgaaggtcataccgttagcgacttgaaactggtaattgacgtcaagcatgagcactggcatggcaacgacgagcaataccagtacatgcgacccgagacactttttggacctaaaaaattcgagggatatctgcaaagcgctatccgctgggatgctaaaggccgcccgccaagggagtcgtgggacaaaaccagaccgcgggatgttaattcaattagtccagtacaaaccacgattccacgggggttccggggatga

SEQ ID NO: 179178 - DNA, 180 bp, Klebsiella oxytoca; identical to SEQ ID NO: 111817

SEQ ID NO: 179179 - DNA, 552 bp, Klebsiella oxytoca
gtgggtatagaacctgaatggaaagttgataagcagccggcttggctggtagctgcgattaaaaaaacgatcactgatttggacggggggtatgcagaagcagctgaatggcttggcgttactgaaaacgcattgtttaaccgcttacgtgccgatggtgatcaaattttccctctcggctgggcaatggttctacagcgtgctggtgggacgaatcatatcgccaatgcgatagcgcgccactcgaacggggtctttgtgccgctggcagacattgaggatgtggacaacgccgatattaaccagcgcctgatggagtctatcgagtggatcggaaagcactcacagtatctccgtaaagctacagctgacggtgttattgatcaggcagaacgcgagcagatcgaggagaacagttatcaggtgatggcgaaatggcaggaacatttgacattgcttttccgtgtcttttgccagccagaaaagagtgacgcccgcgagtgtgcagctccgggcgtcgtggcgaataaatctttgtgtatggagaaataa

SEQ ID NO: 179180 - DNA, 204 bp, Klebsiella oxytoca
atgttgaaagctaaagtcgtcacgttctatggcggtatatctaaaaccgctacagctctgggagtgacccatagtgctgtatgccagtggggagatgttatccccgaaaaacaagcgctctacattgagcggctcacagatggaaggctgaagtacgacgcttccctctatcacaagaatatcaatccaacgactcagcagtaa

SEQ ID NO: 179181 - DNA, 633 bp, Klebsiella oxytoca
atggataccgttggcagcagattaagatttagacgtaagcagaaaaaacttacgcaacgtgatgttgctgagtgggccggcgtcagcgcgtctgcggttacacaatgggaaaatgattccaccaagttatcaggcgagaatcttgtattggcatgtcagtgcctgagatgttctcccgaatggcttatcttcggtacaggcgatatcgagaacggtatcaacattaacctgatatctgttagagaagtgcctgttatatcttgggtacaggcaggtaactggaccgaggttattggcgacccagctaacgaactggttaaaactacaaagaagctatctgaatcagcttttgcattacgtgttaaaggtcactcgatgacttcgagccaagagcttagcattcctgatggttcggttgtcattgtcgagccagaatacggttttgttgatgaggcaaatggcaaaattgtgatagcccaaaccgttactggtggtgaagcgaccattaaaaagctcgccatagaccctccattttcctatctcatacctctaaacccggcgtttaagcctatagaggtgaaccaagatacaaaactgatcggtatagttaagcaaataatcatcgatctctaa

SEQ ID NO: 179182 - DNA, 372 bp, Klebsiella oxytoca
atgagtaatgatcgcatgacagtagtgcccgatttcctgggtgaactggacgccggcgtattcatgaacaagattgcggcggctcttaataccaccgcgctcggcgttctgaacaacggcaacaaaggcaaggttgtcctcacctttgattttgagcgtatgggcaactctgttgaagagaagcgcgtcaagattaagcacaagctgaactacagcaccccaactccccgcggcaaagcgtcggaggaggacaccaccgaaacaccaatgtgggttaacaaaggtggcaagctcacaatcctgcaggaggatcaggggcaactcttcggtatcaccggcgcggtggacggaaagcttaaagcggctcagtga

SEQ ID NO: 179183 - DNA, 198 bp, Klebsiella oxytoca
atggcacacgtaaaggtaaaagacatggttgcggcagcacatgacgcttcaaaggaattgccaccagcaacagccacgttaatgcgcaacacggctactcacctggacgttacctacgtcgcattaactgaagcaatggaccacaacacggcgctggcggcggagatcgaaagattgcggggagttaccaaaaaatga

SEQ ID NO: 179184 - DNA, 129 bp, Klebsiella oxytoca
atgaacgatgaaaccaattaccgaagcttctggcgctccgtcgttatttgctgtgttctgtgcgccatcgctttctggatcccggcaatcatcatttctgtctactactacttcgaggttcaattatga

SEQ ID NO: 179185 - DNA, 498 bp, Klebsiella oxytoca
atgaaagaactgactattgctggcagcagtaatgacgagattgttcagacagcacagcagaacgatatgagcattgagtttgttcgctggttcttcaacaaaaagaaagctgactgcggtgaacattggtttcttatgctgggtgcgatgtgggaaggctggaagggctgcagcatcgaaatggataggctggctgcggagaatgtggcgctgaaaaatccagataactggctgtcacagagtgattgcggctacgaagcggccgaagttgccacacaaaatggagcaaatgaagaggaatccttaagggctgggatgatcgcgattattaatcgtattgaaacccccgccaccgacgcttacctggccgggattaaggctgatgccgttaaggggatttacaacttcaacgaggttgattgctgcgtgtacctggatggtgatgtctgtatgctgattgacgcttatgaagcgagtttacgcggggtggcagaatga

SEQ ID NO: 179186 - DNA, 729 bp, Klebsiella oxytoca
atgattcacctccacaatgcagattgctttgacgtttttccgcaaatcgcgagcggtaccgttgacctggtatgtgctgatattccctacggtaccactcagtgccgttgggattcaattctcgacttgccgctgatgtgggagcagctctaccgcatcgctaagcctagcgccgctattgtgctgttctctgcgcagccgttcaccagtgtgctgattaacagcaatctgcgggactggcgttcggagtggatttgggagaaaggcaacgctaccgggttcctcaatgccaaaaagcagccgctgcgggcgcacgaaaacatcgaggtgttttaccgccgtcagccgacctataacccgcaattcacccacgggcatgagcgccgcacgtcgaagcgtaaaaccgtcaattcggagtgctacggcaaagcgctgacgctgacgaaatacgactcaacaagtcggtacccgcgcgatgtgcagttcttctcgagcgacaaacggaccggtaattaccacccaacccagaagccgctggcgctggtgcaatacctgattgaaacctacagcaacccaggcgatacggtgctggatttcactatgggaagcggtaccgccggcgtcgcctgccaacaggtcgcgcgtaacttcattggcatcgagaaggatgccgccattttccgtaccgcatgcgagcgcatggggattaagcaggagcgtgccgcatga

SEQ ID NO: 179187 - DNA, 594 bp, Klebsiella oxytoca
atgacaactgatatcaccgaactggcgcagagagtaaaaacagaagcatcagtgattgatgatacccattggtatctggctaagccttcagaaatcaggtcgctggtagaggcgctggagaaggcgcagcaggagcgggaaaactggcgtaccagctttgataacgagcgatttcgtgcggataagttggcgacaacgctgagcaacgaaatagagcagtcagcgaacgtgagagggcaattattgatagctcacagcacgttattaaatcagcaggcaaagatttcagagctggaagaagcagagcaaaaactctgtgccgctaacgtgacgctcgatgctcgcgcggaattggctgagcgccagctggccgagctggagtcccgcaccgtgaaactgccagagggtgatgagcgtgatgatttggtcatttccataacggaagaaatcgcacatcttcagcgctgtgttgagcgctacagaaaagagggaatggcaagcacgacacaggtgatggagcagagacttttagtgcagcaaattgcactttcagtcctgaatagtgcagctggcatcaagtgggaggctgagtga

SEQ ID NO: 179188 - DNA, 273 bp, Klebsiella oxytoca
atgaaaaattatttgagtaacctggcgtcaactctgcagggtatagctggcgttatttcagacggtgagcgagtgcagcatgaatgccctgcacatttaaaatctgcgctcctggaggcgtcccatgcattagatgggcagtcggttcgggttcactatccgcctgcaggcaagcccgaaatcataaacgccagaggaaaacgcaggcaactcagccttcgtgagcggattgcaatccgcatcctcggcggcagaacggagattaggccatga

SEQ ID NO: 179189 - DNA, 702 bp, Klebsiella oxytoca
atgaccaaatcaaccataaccagagagcgcctggcggaattagtggcgttcaaaccattacctagcacagatatcaactcggccacccgggatgaatggatggctatggccgcagagctacaggaacgccgcaaggccgcaatgggcagcgagccggtggcaaaggtagaggatgtcggggtttgttggtatgcagataacggcttgcctcgcaagcctgctgttggtacagagctattcaccaccccgtcagctccggtatgtatacccacattcgaggaatggtgtgagcggactgagcagaaacctgtcggctgggtgcgagacgtcatgaaagaagcgtatgacgcctgccgcgccaccatgctccaggcttctcctgtttgcacctgccccagcggcgatggttcgctacgctggccatgtccggtgcatcctggcagctccccggtaattccgtatggttacgtgatggtgccaatcaggctaactgctgagaacggcgctaagggggcgctatcgggtgagttttcagaagccaagttcgtaaactgcccggaatgctttggtgatgatgaatgtgaaacatgtgacggtagcgggaaaattgaaataacagtgcctgtcacctggacgaccatcaaagctatttgggttaaaggtgtcgagcattttgcagccacagcgcaggagaatgattaa

SEQ ID NO: 179190 - DNA, 432 bp, Klebsiella oxytoca
atgaacataaatcaatggcttgagaagacgttgagctcaatcaggtctactgatccaaaagtgctcgttgaaaagatggagcaatatggattggttgaagacgatcttgatgatgctaaatcgttacaaaatgtaacgacggatgaaatcggttttaagatcgagtttgttggctgccatttctcttctggtgatttggttgctacccaatctgtatctaatataatgttcactccaaatattaggttgtccaatacttatttttctaattcttatacggtagaaaaaagtattgattctcaagagttaatctttacagcaacgccgcgtaatgcggcgtttttctgctcgtatgatgataatgctctaatggcaattgctgagggtggaattgttttaagtcaatcaaatgacattgcacaggcagcataa

SEQ ID NO: 179191 - DNA, 555 bp, Klebsiella oxytoca
atgcagtggacaggtttccatggaacgagtgtttacaacgcttcatctataatttcttcaactttccggattagttcaagagagaaagattggcttggctctggtgcatatttcttcatttctgccaaaggtttgttggatccgactgaaaaagcagcacagtgggcaagttctagagccccttcaagcaagcctagatattcttttttatcagtacttgaagctattattgaaaccaactctttccttgattttgatgatgaaacacacattgttgcactgaatctcatcagagatgaatacgttaagatcattaagggacaaggcaagcggccaacaggtaagatgttggttgacaaatgtgccttttgtaactatgtaatgcatgagcatgatgtcgacgccatcgtccggaaagagtatattaaaacaacggctgacgaattggattttggagttgatgctggggtaccgaactgtcgagttatgtgtgttaaagatcccgctgcaagcatcaaaagcataagctatgctgtagaaaggaggagagtataa

SEQ ID NO: 179192 - DNA, 1248 bp, Klebsiella oxytoca
atgcctaaggtattgaaatccctaaccaataccgagatcgctgccgccaaaccgcagaagactgagtatatgctgcgcgatggcgacggactggcgttgttgattaagccatccggcagaaagatctggtacttcgaatacgctcccccggcgctgaaaaaacggaccaaaatcagcattggcccctacccggtagtcaccctcgccatggcgcgagatttcaggttgcaataccggcgtttacttgtgcagggcatcgacccgcaggcccatctggagcaggttgcagaggagcaacgactccagaatgaatgcacgctggaaaaagttgcggaacagtggctcaaagagaaaaaacggaccagcgatcttagcgaagatcacgccaaagatgtctggcgctcgctggagatgcacgtcttcccttctctgggcagtacgcccgtcaccgagatccgccctaagatgctcaaggagcacctcacaccgctggaagaacagggtatcctcgaaacgctgcgccgggttatctcacgactcaatgaaatcttccgcttcgccatctccgaagagctcatcgagttcaatccagctgacaacctggtcgcccgcttcaagaaaccgaaaaagcagaatatgcccgcccttcaccccagcgaactgggcaggctaatgctggcgctacagagcgcctctatccgcaaggaaactcgctgccttatcgaatgggagctactgacctgggttcgccccggcgaagccgttagcgcccgctggtgcgacatcgatatgaaaaaagcggaatggcgtatccctgacacctttatgaagatgaaccgttcgcacacggtgccgctcagcaaacaagcgctgcgcgttcttcaggttatggaaccagtcagccgccatcgcccgtgggttttccccagcatccgcaaacccctggagcatatgcaccagcagaccgcgaacgccgcgcttatccgtatggggttcggcggtgaactggtcgcccacggcatgcgcagcatcgccagaacagcgggtgcaggtcattttccccgtgaagtactggaatctgcgctggcacaccagaaagaagacgagatcgaagcggcctacaaccgcagcgactatctggaacaaaggcgaccactgatgcagtggtggggaaactacgttgatgccgccagacggcaggcattgctcggtgaagaagaaccgctgcggatcgtggaaggagaataa

SEQ ID NO: 179193 - DNA, 648 bp, Klebsiella oxytoca
gtgaccagtcccattcgtcagaatctgtttgaacgggaatgtgatatgccgctgctggaagcgcggcatctcgcccttctgcttctcggcctcgatgcttcccaaccagcaaacgccctgccggaagaacatcaggagaattaccgtatcctgcacgatgccatcagccgcactatcaaagccactggcatggtcagcgccccggcgaacaaacgcatgttctatgccgatgaaatgttcgcgctagcctggcggcttattgatgacgaactgacgccaccagaagtgaaagaccgcagcctgaaggcggtgatgaaactgtcgcgtaatagccgtggccgcaagtggctgaagacgctcggcgacgatgcgctgccggatatcactacttcagcacaaccttcccagcgtgggatacataagcgcgacaaggcacgggagaatactgccaggctctgctggttactggttcaacttctggttgaggagactgacggacggtatgggacgtctgataaaccggcttcggatcggatacttcgaaagctgaaggctctggcgcaggagcgggaattgtcgtcagatggacttgggcgggggacattttatgaggtgatgaagatggggcgggaaaaggaatgtagttag

SEQ ID NO: 179194 - DNA, 999 bp, Klebsiella oxytoca
gtgaaagctggggaactggatctcattttgggaggcccgccttgtcaaggtttttcgacgcatcggattaatgatgcaggaaaagatgatcctcgaaacgctttgttgctccgttactttgattttgtcgaaaaattcagaccaaagatttttctagttgaaaacgtacctggccttctctggccgcgtcatgccgagtatctgactcaatttttctcattaacacatgagcatggctatcgagtgattggtggaaaacctttcattcttaatgcaagggattacggtgtcccacaaaacagaaggcgagctttcatactagcggttagatcggatatagataccagcggttttgtatggcctcccgaacctacccataccaaaactggcaaacaagaatgggtcacatcttcttgcgttttcgaacgcccgccggagtcgactttaattgaattcagagagcgattagtcgaaaaattcaacatgtcgattgagcttgcagaaaatcgtctaaaacaattgcaatggggttcaccgatccccaaagaagatccatgtaatgttcatatggaacattcagctgaaatgcagttgttgtttaaaaatacgccattactaggagacagaaccgaatctgggagacaacttgcctgccacaagaactacagtggtcatctggacgtgtatggtcggatttatccacatttgccttcgaacacaataaccactggttgtaacaacccgtcgaaggggagatttgtccatccttggttgcatcatggtattacattaagacatgcagcccgtttacaaacatttcctgatgactatatttttcatggtggaacgatggccattgccaaacaaataggtaatgccgttcccgtaaaattaggtgaagcattacttaaatcgattattaatttgctatcaatacagaaaattgaagtcgattcggctaaatgtggatatattgattatgataaggaatgcatttga

SEQ ID NO: 179195 - DNA, 2967 bp, Klebsiella oxytoca
atgactgatcatgtcacttttcaaactagggcaaggacaattgaccatctaggccgagagcagatagccgattgccctacagctatttctgaattatggaaaaatgcttatgatgcctatgcacgtgatgtagcccttcatatttttgatggtgatctcaacgtttcagccatagtcgataatggtcacgggatgaatcgggatgagtttgagtcgaaatggcttgttgttggtactgagtccaaaataaatggattcaatattcctgaagatgatcgagatggtttgcctgaacggcctaaacaaggtcaaaaaggtataggacgcttatcctcagccgctatcggacctctattactgcttatatcaaaaaggaaaaatagcgattttgttgctgcacttattgactggcgtttatttgaaaatccctttttattcttaagtgatgttcaaataccagttagagaatttagtcataaaaatgagctttgtgaaatacttccccttttgtttgaccagatgatggggaatgtatggggagactctcatgatcttgagcgaaccaagagaattgcagcagcatgggattcttttagtcgtcaagagttagaggatggtttagacatcacaactcaaaagaaaatagagcaaaccctgatccaggatgtttttaaagaaaaacattttagtaaatggtcagtatggaatggcgagtcattacatggaacggctatgttcattgcagatgtgcaatatgacttatacattcaactttcaaatgcagatcttaaccaaactgatgatgcggaaaaaagtacccgggagcgttttttccaaacgctttcaaacttcaccgatccattttcgaaaaatggcgaaccattaattagtgattttaactacagcgtaactggttgggttaatggtttgcctaaagtaattataggtgaaaatcgcgaatttgatttacgaaacttagaagacttagaacatatcattgaaggaactgttgataacgagggatactttaagggacgagtaaaagtttttggtgagtggattgaagattatgtcataaaaccaaagcaaatatacaaaacaagaaaagacagtgcttttggcccattccatctgcgaatcggagcatttgaactgaatattaacagcacatcactcaatgattcacagcatgctcattttatggaacagtctgaaaaatattcaggcttcagagtgtatcgagatggtttgcgagtaatgccatatggacgtgctgatagcgattatttctctattgaagagcgtcgttcaaaaaatgctggtagatatttttggtcaggtcgccgtatgttcgggcgtatcgccattactcgtcatgacaatcctaatttaaaagataaagcaggacgcgaaggatttattgaaaacagagcatctaaaatattccgtgaaattgttcaaaaaatattgatcgattctgctgataaacatttcggcagttattctaagggaagaggcgaagctttagaagatattagggaaaagaaaaccctacaaaaagctatagatgatcgcaataaattgctttccaaagaaaggaaaagaatacgcacatccataaagaataacttaaatcccttacacaatttagcattaacaatctccgattttagtaaaaacttagaaaatcgaataaatctaaattcaatcgatgatctccaagccttaaagggaactgtagatgatttttctgagcagattcaaggattttctttaagtccaatacctactaatttaggcagattagaagaggactatcgcgcttacagaaaggaagagcttcaatgcaaagaaatgataaaaggacttacatatctaatcaacagagcaatagaagagtctactgacaagagcgaatacgagaaagcaagcgaggtttatcgaagtaaggtcgctagtattaataatagtattacaaagtacgcttctcgaggtaaagatatgcttgtgaagcaacaaagcgagttcgaggagctagttaagaattgtcgcgagcaatacaaaattgcaatggaagatagccttgaagacctaaatcttcagaaagtttccctcgcctatgtacttgagaaactagatgcagaacatcaaaaaatagaaatagaaaatgcacagaaactttccccttatataactgctttagaaagaattaatgagcagattgatttggagggattggcaatacatagcatgaatgagtctgttaggtatcaagaggaaataactcgacttcattccttagcacaacttggtatcacagtagaaattattgggcatgaacttgatgggctagaccaggaactcacgcatgctctcaaaatgatgagcaatactgagcttacagacttccagagaaaaaatttagaactggcacttacataccatgaatctttaatagataagttaaagtttctatctcctttaaaactttccggtaaaaaggaagtacaacgaattacaggttatgatataagtgaatatgtgagaggatatttcgctaaacatttcgagaatggcaatataatattcacatgtactcctgagttcaataatatatctcttatggaactacaatcacgtatttatcctgtttttattaatttgataaacaactcagtatattgggtacaacgacaaaacagggctgataaagaaataattctatcattcaaggatgatgagataattgttagtgataatggtcccggtgttgatgaagatgatatagatagtctgtttacgctcttcttcacccgtaagcaaagaggtggacgaggagtcggcctttatctctgcaagcagaatcttatggctggtgggcatagtatacgctatgaaaccagaaatgattttaaaactctttgtggtgcgaacttcgctctttcgttgaaaggattgataaaatga

SEQ ID NO: 179196 - DNA, 1794 bp, Klebsiella oxytoca
atgactgattcgacaattacatattcttctttaatagaagaagcatttataaaacctatcagaaatgtcacagtcattgatgatgaatatccgactcttctatcattaatagagtcacaattttctggttcggttcccccccctgaaaacagcactgttgatgcaaatatagagcggttaaagaaaatcattaatatgtgtcatacaacataccagtggggtattgatgtttttagcgggcgctaccctgctattggagggggtagtaacgtcccgccacatatacatcatagtgatttagttatattagattatcatttggatggtgaaccttcaattgatgatggaacacgagcaagagaaataataaagtctcttgatgataataatcactataatttaattttggtacacacgaagggctatgctgatgatataaagaaagtatttattgaaatcctttgcgaactaataacgatagatttcagtaatgagctaaaaccctcagataacactatcagtagaatgaatgattggcttgatgataacaatgatggagcggattactcatggattaatagctccctggatttgcttccaattttaacttcttataaaaacaataacagctctgtttttttaaatatagaaaatgaagaacataccatgcatggttttcattcacaaatcactgaactttctatggaaactggtatagatgttaacgaattagttaaatggaaatttcaggacttattaagaagcaaaataaatttagagaaagagatccgtcctgattttgaatgggattggagtgaagaatcaaatttcataagcacaggtaaaacatttatatcagtaataaaaaaaagctcagatgatccagctgaagagttgatcggttcattacatgcagcattagtcaaacgaaatgcttcaccaatgcatctacttatggccaaaatgcgttatgaactagatgaaagaggtattgagcaggcatgcaaaattataaataataggccagcccaagctggatggctctttaatctcctggagaacgctgataatgattctgcccacgataaagcaattaatcttcattgggagcagttagcgacagcctctcgattagagcttagggatttttctaaaaaaatcattaaagctgcgggttgcgagacatctcaagataataaggaatttgtcaaaggtttctttagcgagtgcatgatagatagagataagactttaggtcttttaaacgcttacagttgctcgatgtcagtaaacaataatcatttaaaaactggaactatattaaaaattggagatgaaaaatgggtgtgtgttacccctgcttgtgatatggtgccaggtcagagagtgaagcagtggcaatctcgtataggagactcttatttagcctttaaggcagttaaattagaatccgtccccattaaggatgctaataaaaatgcgaatcgaaatgaatatcttttcttgaatgatggagatactcccttagcttattctctaggaaaggacaatatcgtatgggacactttttttgcaagtggccaaggaaattataaagacgaacaatcaataaccctatatgctgcaagagaagaaatttcagaagatagcaaagcactggtaatgaaagaagtgagggcagttgcaattgctgaattacgatatgaatatgcattaaatatattacataaatttggggcatctcaaactcgtgtaggtcttgattttcaggatattaggagcatgtgggcctaa

SEQ ID NO: 179197 - DNA, 375 bp, Klebsiella oxytoca
atgatgatttactgcgcacgtatcgttgccatcgggctgttcgtcgctgatggcctcaccgacaaaatgctcatcaccttcgacagcaacgggccgaaggactgccttgattactccctgtcgctggagccatcgttccgggaagagagtctgatgatactccccggcgaccgcctgctgctggcgggccatgattatctggtgaccagtgttggcaaaggtgcacagcaggcgctgtttgaactcggccacctgacgctggtgttcaatggtgacctgaatccctgccacgtcggggcggttcacctctccggcccggtgccgaacctgcgtgacctgcacggcaatctggtgatagaggagggacgcccatga

SEQ ID NO: 179198 - DNA, 522 bp, Klebsiella oxytoca
atgcttctggtctccctggctgaaggctttatccacctgttccaggccgcaggcaaaatcttcctcgacatgatgaccgggcttatcccgatgctcatctgcctgctgctggccatcaacttcctgatgaagctggtcggcaccgtgcggatggagaagatcgccaccctgctcggccgctcgcgcattctcacctacggcgtgctgccggtgctcggctggttctttatgagcagccccggcgcgctaaccctcggcaagcttttacctgagaagagcaagcccggttatgaagatgcgctcggcaccaccgcccatccgcttaccagcctgtttccccatgtggtgccgtcggagctgtttgtctggctcggcgtcgccgccgggattaaggcactcggcctgcccgtcaccccactggcgctgcgctatatcgccgccgccatgctgattggcctgatacgcggaattatcaccgagtacctgttcctgcgcttaagcaaacgggggaatgcgccatga

SEQ ID NO: 179199 - DNA, 276 bp, Klebsiella oxytoca
atggctaaaaaagactggcaccccgccgacattgttgctgccttacacaagcgcggtaccagtctggcgaaactgtcgcgggaagcgggactggcctcatcaacgctgtcgaataccctgaaccgcccgtggccaaaaggcgagtggctgattgccatcgcgctcgatgtgcatccgtcagagatctggcccggccgttacctcaattccagtaacaaacgtgaaccccgaaaaccgcttcaccccatgacaacaaccgacaactccgggacataa

SEQ ID NO: 179200 - DNA, 330 bp, Klebsiella oxytoca
atgaatacaagtaaccattacaacgatattttttgccgtcgcctgaagcaggctcgactggcaagtgggttttcccaaaaacgtctggggatcgccgcgggcattgatgagttcgtcgccagtacgcgcatcaatcggtatgaacgaggggtacatgaagccagcattgaaattgtccaacagttggcaaatgtcttagaggtacctcttgcttatttttatattgaagatgacgatttagctgagttaacgatgttattctcggcactgccaaagagtgataaagatgacattctttcactggtgaagttgagagccggaaaattttag

SEQ ID NO: 179201 - DNA, 837 bp, Klebsiella oxytoca
atgaatgaagaagctggagaaaaataccttctatatattgatattcttggctttagcaagttagttggcgagggaagaagtaaagttgagatgatttatggaattttaaattcattgaatgttcatcttcatggcgattttactacgattgtgttctctgatacagttttaatatacaataagaaagatcctgtaagtgaaagcgaacatcaatatcttataatgtatctcatagaatttgcagaagatttgcatcataggttaattggtcaagacatctactttagagctattttaagacggggggagtttatacattatgaacttgagcaccttgacgctttttttgggcatgcacttattgagtcttatttgagtgaaaaagaaattccttcattaggtttatttatcgatgatgaatgtaataaatacaatagatttatgaaaacaagaaggtttggaaaagatctaagctttgtctttttgtgtcgaaatgttgtctctatggttaagcagtatggtaagtgcttgcctttaaataatgatgttgcatatatgctccgtgtggcagatgaactcccatatttagcatgggatttaaaattcttggaagatgtatacaggaatatgcgaagtcaagaaaatccactcgttaggttaaaatatcttacagcttgggatttttacgatcaagaatatcgcgaggttttgcaatatataattgctagtgatttttccatagatgctttgtgtccgacatttgatttcagtgataaaaagaaacttttgttacagtctatagaacataattcaaagataagtgtaaatagaatttaa

SEQ ID NO: 179202 - DNA, 2649 bp, Klebsiella oxytoca
atgaatgaacgtcgcggcctgaccgaacaggcgctgaataccagctaccgcaaaggtccatcgtttgttgactggctgccgtgggtggagtttttgccggagtcgcagacgctgctgctggaagatggccgctcggtgggcgcggtgtttgagctaatacctgttggcaccgaaggccgctcgacggcctttctcgaacaggtgcgcgataccgtcaccgacgcattacaggatgcctttgatgagcatgaacgtgcgccgtgggtggtgcagtttttctgccaggacgaggacgacagcgaggcgtggctggcatcactttcagcttacgccgcaccggaaattcgcaactccgcctttacccgcgaatggctcacgcagatggcaaaccatatggcgaatctcacccgcgatgaggggctgtttctcgataacaccgtcacccgaacccgctggcgggcgacgtggcggcgcacgcggatggtggtctaccgctggcttcccacgccgttgccggatgaaccgtccccggaagagacgctgaataatatctgcgaacggctcaccgccgggctgaaggcggcgggtatcagcgcggtccgccagaatgagcaggccatccaccgctggctggtgcgctggtttaaccctgcgccgcccgttgaagataaaaaagccttctggcgacaactggatttacctgaagctaaatccctgcccgtcatcaccgatttcgccgaacgactgctggcaagcgaaccgcgctcagatgcggaaaacggcgtctggtggctggataatcgtccgcataaagtggtggtggtcgatcgcctgcgcaaagcgccgtcaccggggctgctgaccggggaaaccccgcgcggcgacggcattaacgccctgttcgacctgctgcccgcgggaaccattatgaacctgacggtggtggtgtatccgcaggacaaactggagcagcatatcagccatctctccgggcgggcgattggcgacaacaccgattcggaatacacccgccgtgactgccacgaagtgcgcagctacctgaaggacggccataagctctaccgcagcacgctggcgttctacctgcatgcgcccgacaccgataccctgtttcgccagcagcgccagttgcacagcctgttgctgaatgccggactggtgccggttcaggaacagcacgaagtcgccccactcagccactggctgcgctggctaccgatgtgtttcgatcccctgcgcgatccgcgcgggctgtatacccggctcaactttgtgcagcatatcgccgggctgatgccggtgtacgggcgggaaaccggcaccgggcatccgggaatttgctacttcaatcgcggcggcgcgccgctgtgcttcgatccactgaataagctggaccgagcccagaacggccaccttttacttcttgggccaaccggagcgggcaaatccgccaccctcaacgcgaaaatcgcgcaactgatggcgctgcatcgcccgcgcctgtttatcatcgaagccggaaactcatttggactgatggcggactacgttgccgcccatgacctgacggtgaataaaatcagcctgcgccccggttccggcattacccttcccctgttcgccgatgcgtggcgactggtggaacaagccgttgccgacgccgaaccgccggaggacgaagagagcgagggcgacgaccaacgcgacgtacttggcgaaatggagatcaccgcccggctgatgatcaccggtggcgaagcgaaagaagatgcgcgcctcacccggccagacagggcgatgatccgccaggcgattatcgccgccgcgcatacctgttatgaggaaaaacgccagacgctgacgcaggatatccgcgacgcattgtttggcctttctcgcgacagcagcctgccggaagcccgccgccagcgggcgtatgaaatggcggaatccatcaatctgttctgcgtcgggtttgaaggcgagctgtttaaccgcgaaggcacgatgtggccggaggcggatatcaccctggtggatctcgccacctttgcccgcgaaggctatgaagcccaacttgccatcagctatatctcgctgattaaccatatcaataatctcggcgaacgcgaccagcatctggcgcggccaatcgttaatattaccgacgaggcgcatatcattaccgttaacccactgctggcgcggtttctgactaagggctcgaagatgtggcgcaaactcggcatctggctgtggctcgccacccagaacctggcagattttcccgatgaggcgaagaagctgctcaacatgatcgagtggtgggaactgctggttatgccgccggaagagatcgagcaggtgtgccgctttaaggcgctgaccgaggaacagcggcaactgctgcgcttggcggtgaagtcgccggggcagtataccgagggcgtagtgttctcgccgcgcgttgaagcactgttccgggtggtgccgccagcactctatctggcgctggcgatgaccgagaagcatgagaaagcggaaaggatgcggattatgcgggagcagcattgcaatgaactagaagcagcaatgatgatagtaaatattttaacttcaaaacattaa

SEQ ID NO: 179203 - DNA, 294 bp, Klebsiella oxytoca
atgccggtcgaccccgatgccagcatgctctcgctgtggcagcagcaaagcggcggcagcgcagctctgctggatgcccgcgcccaattgcgtcgcccgccggatggtccggtggcgcaacctgaagcagacaccattcgcagccagtttccgcgcctgcccaacccggatatggtgttgtacgttttcccgcacctcaatggcaacacgccggtgcccggctacagcaccgtgttccccttctatacccgcccgcagtatgcattgccgggcgaacgcctgactccgccatga

SEQ ID NO: 179204 - DNA, 1296 bp, Klebsiella oxytoca
atgatgccgcgccagagcattctgctgaaaatcctgctgcccgtgattgtgctggtaacggtatggctgctgctgcgcccggccagcaaaaacaccactgagaaatccccgtcccgcagcgtggcagccttaacgccgcaggaactgcgcgatctgggtatcgatggcgacacccccgccgataccgtcgccacgctggtcggtcagatgaagcagtaccgccgggagcttcaggctatccagagcgataacgaaagccagcaggcacgcgagaagcggctgaaagcgcagcaggcgacgctagtatcggagttgcgcggcgatatgcgcaggcagcaggaccagatgcgcgacgagctactgaaaagccagcggggattgctggataaactcgaccgcctgatggcgaaacgccccgacgatatcccgcccggtctggggctcacgcccggcgaactacctgccgatgtgcagcccgatatccgctggctggagccgctggatgcgcccccgcctgtggatgaaaagctgctgcgcgtccctctgaaagcggccgacaaaccaccgccgaaacctgacgtgaaggtctacaccctgccgcagaacgccacgctgaccggatcggtggcgatgacggcgctgattggccgcgtgccgcttaacggcaccgtcagcgatccctacccgtttaaacttctgattggcgaggacaacctcaccgccaatggcatcgaactgccggacgtggcgggtgcagtggtctccggtatcgcctccggcgactggacgctctcctgtgtgcgcgggcaaatcacctcaatgacctttgtgttccacgacggcaccatccgcacagtcccgcagggcggcaaatccggcaacaagcagcaggagatcggctggctctcggataaccaggggctgccgtgtattcccggcgagcgcaaaagcaatgcgaaggagtacctgacctcgcagttcctgctggcgggttccggtgcggcggcgcaggccttcgccaatggcgaaagcaccaccgtggtggaggacggcagcatcaccagcgcagtgacgggcaacaacggccagtacgtgctcggccaggccatcggcggcggattaaaagagaccgccgactggatgaaacagcactacggccagatgttcgatgcagtgtacgtgccgccgggccacaaggtggcggtgcatctcaccgaaccgctggctatcgactacgagccggagggccgcaaagtgaaataccagcaggccagcacaccggggggactggaatga

SEQ ID NO: 179205 - DNA, 768 bp, Klebsiella oxytoca
atgaagaccgccctctttgctttattgttcagtttccccgccttcgccactgaggtggtgcagtgggaaaacatcccgctgcccgtcacgctgcatatcgggcaggagcggattgtcgacgtgggtaaaccggtgcgcatcggctatcccgccacgctggaaggcaaagtgcgtctgcaaagcgcgggtggcaaggtcttcctgctggcgaacacggtattccctgccacccgcattcagttacgtgatgccgacagcggtgagctgatcctgctggatattcaggccacccaaagcacttcgacacttgaacccgtgcaaatcagctatgcgccgcagacacctgccacagcaaaaacgtccctcccggtgacaaaatcaaccgagcccctgcccgtcctgctggtgcgctatgccgcgcagaatctgtatgccccgctgcgcactgttgaagccctgcccggtgtaatgcccgctcccgtccggctggcgaaacgcatcaccaccttactgccgcagcagtctgttacctccgtcccgctggcgtcatggcaggttaacgccaccaccgtcaccgccatccgcctgcaaaaccagagcggacagcgcatccccctcgatccgcgcgagcttcaggggcagttcaccgctgccgcgttccagcatgactggctcggcccgcgtggtctggcagaagataccaccgtggtgtacctggtgacggaaggcccggtttcccgcgccctgctgccggagccgaaaccatga

SEQ ID NO: 179206 - DNA, 660 bp, Klebsiella oxytoca
atgagccgctttcgccacgcgctggccgagcgcgataaccatattctgactctacgggccgtgattgttctgctgtgcctgtgtctggcaggcgtcggctacggctggtacagcgcgccgcaaaaacttactctctggttcccgccggacctgcgcaccggcagcacccgcccgtggtgggaagtgcctcccgccagcgtttacgccttcaccttttatatcttccagcagcttaaccgctggccggacaacggggaggaggactattcccgcaacctgcgctcactgcgcgcctacctgacgcccgcctgttacacccggctggagcacgattttcaggtgcgtcgcaacggtggtgaactacgcgagcgcacgcgcggcgtgtatgaactgccgggccacggttacagcagcctggtgcatgatggcgataagcgccccgtcccgcgcgtcgaaaccttaagccgggatgcctggcgggtgacgctggacgtggcggttgaagagtattaccagaacgagccggtgaaaaaagcgctggtgcgctacccgttgcaggtgatgcgttatgccattgatgcggagaaaaatccgtggggactggcgatcgactgtaccgatgctgcgccgcagcgcctggtagcagaggagaaaccatga

SEQ ID NO: 179207 - DNA, 354 bp, Klebsiella oxytoca
atggcgacgatccctttcctccccgaccgcctcaaccgggagcccatggtctggcgcggcctgaccaccagcgaactgtttctggcgctggctctcggcttaggcggcggctgtgcgttcggcattctgctggccctgataacccactactggccgttgatccccggctcagcgctggcaggtgcggcgttactgattcagggcggcgggcacattctggcgcgcgccaaacgcagtaagcccgacacctggctaccacaggcgatcctcgcctggctggaacgccatcacctccggggcgcgcagcttgtccagcacagtgccgtatgggtggtgcgcaggagtccgcgatga

SEQ ID NO: 179208 - DNA, 318 bp, Klebsiella oxytoca
atgcgctggcttctgttactgctgttcgccgcatttaacgccctcgccgacctgccgacgatggaagatccgtcgcgcggccagggcaagggcattatggagacgctgcagaactacggttttgacatcgtggtcgtgctggcgctgggcatctgtgccgtcggatttctggtggtggtgaacaactgcattgccacctactcggagatccagagcggacgcaagcagtggaaagatctgggctcgatggcgggcgtcggcagcattctgctggtgatcatcatctggctgctcaaccaggcctcggacatcctctga

SEQ ID NO: 179209 - DNA, 234 bp, Klebsiella oxytoca
atgactgactcgcaactcgccgccttccaggccgccagcctgagcaaaccggaaaccgtcagcctgctggtgctcggtctgtttaccagcgtccttttgctgtggtgcgcctggacgctaatggtcgcctggcagggtgtctgccgtcagcgcctgagctggcagagtttttgcgcggtggcggcccgttcactgttactggtgctggtcagtttctggctggtactgagctga

SEQ ID NO: 179210 - DNA, 309 bp, Klebsiella oxytoca
atgcgattccagacaacgtttctactcttgattttacccttaccaacactggtgaacgcctccccggaatccacccagctcgccctcgcgctgaagcaactcgacggcgcaaaaacctcgctggaacgcgcccaaacccgcgccggcaccgatccacaatcgcgctacttcttcgactacttacaggcgcagcaggacatctctgccgttgaacagggcatccgccgttaccttgccccggcaagagcgcagccgcgcgccgttcaaccactcagcaccagctaccagcgggagaaccccgatgactga

SEQ ID NO: 179211 - DNA, 789 bp, Klebsiella oxytoca
atgaaaaggtatataaagcgaataatcattctatcaatacaaacaattgcaccactattctttacatattttatttttgcgatagctgtagagtcatataaaaatgattctgcttttagaagtgatatcatgaaagattattatcagcccatgatatcacaagaacaaaaatgcgagaatctgaatgctgacttatacaaaaattacagtgatacctatgcaagttataatttaatgctaaatcaatacaatggttttagagaaggtaatgccgttaaacttactgaggagtataaagtattcctctccgggctattaaaagaaaatcgtgctcttcacaaaaagtcagacgaattgaaaaacgaattattcgcctgtcaacaggatttatatcaaaaatataaatccatagctataatcacagggaattatgataaattgaaagtcatattcaaaaaccatgatgatacaaaaaacaagcttaatcaagaacgtgcaacttatattaaaagtaagatgaatggagttaccgtagataaatattatggaactattaatgctttctttggcatgaatgatcctgacaaagaagaggaatcggtaaagtttacagatgacatgctcgctcaatatgcttctccgataacgaatatgttcttatttttgtcttcaagtgaaaaagcctttctcaacaacgaacaaaaaactgcaattgagattaatagtttgatagaaaaagaaattagtgacagatatcgccgttcttggttctctcgtttactattctaa

SEQ ID NO: 179212 - DNA, 285 bp, Klebsiella oxytoca
atggaaattaagtggctacgtaaagccattgccaatctcgaagctgagttccggtatattgctgaagacgatccgcaagctgcggaacggtttgtaaacgaagcctggcggcttacgcaactgctcaaagagcaacccgctatgggccgggaaggaagagtacctgaaacacgtgagctcattcttcataattacccttatattattccctatcgagtacgaaataacacagttcagcttttacgcgtgtttcatacccatcgtaaattaccaagaaaatggtaa

SEQ ID NO: 179213 - DNA, 246 bp, Klebsiella oxytoca
atgggcgtaatgtcagtccgtttaaacaacaatctttccacgcaactggaagcattatcaaaagcgaccggacgctcaaaatcctggctggcaaatcaggcaattgaagattatgttgcccgggaggcctggcaagttgcagagattgagcaggccattcaggaagctgatgccgatgattttgccacttcagatgaggtggataacctgtttcaacgtctgggagtaaagccagatggaaattaa

SEQ ID NO: 179214 - DNA, 633 bp, Klebsiella oxytoca
atgagtgagcagcgaacgcctccgtcacgcccaccacagggaccgattggctggctgctgtcgctgaccgggcggcttatcgggctggttattggcgcgctggtgctacgggtagtgctggaactggcggggctgtatttctggtggccgcaagaggggagcaggcatgtttttcaggtgatgaggcgggagcaggtggaactggttagtgctttgcaatcgcatccattggggaatgacattgtgatactgctggaaaaaggggcaactcgcgtacttatggtcaacaggctcctgcaaaaaccgctcaccgccctggcttacacgctgctgagttttatgttgcgcctgacatggcttgccaccatgctccccctgctttgcctgtgtgcaataaccgggctaacagaaggtctggtgcggcgagatctaaggcggtttggctccgggctggaatcggtttttctccaccgctacgtcatcaggtccggcagttcagtcgccaccacgctgtggatgtgttatctggcgcagccgctatttctgcctgcgatgctggttttactgccaaccgctttatggttcggaataacggtatggatggcagcaggtagttttaaacgttggttataa

SEQ ID NO: 179215 - DNA, 2019 bp, Klebsiella oxytoca
atgagccgctacgcgctggaagcgctgctgcgcccgcccgtggagttttacagcaccgtcactgctggctgtggcgcactaatctgcctgacgcaagcatcgctgctgatgctcacgccgtggcaggcccgcctgatggcctgcgccctgttgctgctggccctgcgacgtggctggcagggctggcacatcgtgcgctaccagcgcaacctcctgcgcctgccgcgctatgcgctcaccagcagaaaaatcccggtcagccgccagaggctgtttctcggtaaaggctttcgctggctgcccatccacacccagcgtctgtacgactgcctgcaaccggaagccgcacgctggctgcgccctggatggtgttaccgcctggcaagacacatcgaaaaacgcagcgaacatactctgcccggccttgcccgcctgctcagcgccgatcgctggctgaacccggtgcgcccgctgccgcccgtcggcggcaatccgtggctgcatggagtagaactgaaagagtacgacgtcaccctgccgctcagcgaacgccccggccacacgctggtgcttggcaccacccgcgtcggcaaaacccggctggcggaactgcttgccactcaggacatccgccgcggtgaggtggtaatcgttttcgatccgaagggcgatgccgacctgctgaagcgtctgtggacagaggcgcagcgcgccggacgcggcgaccgctttattctgttccatctggcctacccggagatctccgcccgctacaacgcgatcgggcgctttggccgcatttcggaggtggcgtcacgcctcaccggacagctttccggcgaaggcaactcggcggccttccgcgagttcgcctggcgctttgtcaacatcatcgcccgcgccctggtggcactcggacagcgtcccgactatcagttaatttcccgccacgtcgtcaatatcgacgccctgtttatcgactatgcccgcatcgtgctgccgcgccacaacgcacgggcgtgggaagtggtggcgcaactggcggagcgcgttaacgacaagaatacgccacgccatatgctggggcgcgatcctcacgtagtggcgctggaacagtacctaaatgcggaaaaattatacgatccgatcctcgacggcctgctttcagcggtgcgctatgacaaaacctacttcgacaagattgtcgcctcgctgctgccgctgctggaaaagctgaccaccggcacgctcgccgccctgctcgcccccgactatcacgatctggacgacgtacgcccgatcctcgactggcagcaggcgatccgccaaaaggcggttgtctatgtcgggctggacgcactctccgatgcggtggttgctgccgccgtcggcaattcgatgtttgccgatctggtgagcgtcgccggacatatctacaagtttggtctgaatgatgggctgcccggcaatagcgaaaaaccgccgcccatcaacctgcattgcgatgagtttaatgaactgatgggcgacgaatttatcccgctggtcaacaagggcggcggcgcgggcattcaggtcaccgcctatacccagacgctgagtgatattcaggcccgcatcggcagcgcgcccaaggcaggccaggtggtgggcaacttcaataatctgattatgctgcgggtacgtgaaaccgctaccgccgagctgctgacaaaacaactgccacaggttgaagtccgtagccgccaggtcagttccggcgtcaccgacacgcctggcggcatcaacagctttaccagcaacacccgtgaacaggtgacctccagtaatgtaccgctgctggataccgccgcgctgatccagcttcccaaaggccaagcctttgccctgctcgaaggcgggcagttgtggaaaattcgtctgccgctgcccgtcgcggataaacactgcccactgccggagtccgtcgcgctactggcggcctggatgcaggcgcgccagcaggggcaggtggaatga

SEQ ID NO: 179216 - DNA, 519 bp, Klebsiella oxytoca
atggcgcgaggttctgccctgatcctgctgctgccctgtctggcactggcacagcctctgccgcaagcctacctgcgcgccgcaaaaaattaccgcgtgccgccggaactgctgtgggccgtcacacaaaccgaaagcggggcgaacctgagcggcaggcatctcccgtggccgtggacgctcaatatcaaaggtaccggctaccgctacgccagccgggagcaggcctgtcaggcgctgctggccgccatccgccgtaccagcccgaagcgcattgacgtggggctcgggcagatcaatatcggctggcaccgtgcgtattttgactctccctgcgatgccctgcatcccctacagaacctgtcgctcaccgcgcaactgctgcgtcagcgctacgatgaacgtcccggaagctggcttaatgctgccgcccgataccaccgccctgcgggcggcgcgcccgctgcacgctaccgcaagctggtcagccgccatctgcaacaggccacatcaccatga

SEQ ID NO: 179217 - DNA, 675 bp, Klebsiella oxytoca
atgaaacacctgattctcctgttactgttcaccgccagcgtgtgggcgcaaccgcttcaggtgcagaccagccagaacgcggactcagctctcaggtcgctgaccacgcaacagcaggctaccgtctggggcgtcacgccggaggagtggcagcgctatctcacgctgaaacagcaggcgcgcggcgtctggtcgccggggctcgatccgctgaccacgctgggtgtggaagccgaaagcgaccatgagcgccagcgcttcgccgaactgctggtcaggcaggagtaccggcggctggagaaggaacttgccttccagcgcgcctatgatgccgcctggcagcgcctttatccgggtctgacaccgctgaaaaccacgtccgccagcactacccgcgtttcgctatttgttaaagatgactgcccgccctgcgacagcctgctgcgtaccctgctggcacaacagcgcccgctggatatctggctaatcaacagcgaaggcgatgataaccgggtgcgccgctgggcgatggcgcatggcattgacgcaaagctggtgagtgaacacagcatcacgcttaaccacgacgcgggccgttggctcctgctggggcagagcaaaatcccggtggcgctggaacgtaagggggagcaatggcgcgaggttctgccctga

SEQ ID NO: 179218 - DNA, 660 bp, Klebsiella oxytoca
atgaaacgactgctgacagctctgctcctgtttattttcaacggcgtggccgccgcctcccctgcaacgccagaagtcgtccgctacgaccgctatctgctggtcagcacgtcaccgcaacagccgccactcgaacagcttaccgccctggccgttccgcccggttttcatccgacggtaggggaaacgttgcagtacctcctgcgcgacagcggctggtctttgtgtctcgccgatgcgcgccgggcgcagctttatagcctcccgttaccgctgagccagtacaacaccggcccgctgcgcctgaaggccgccctgcaactactggtgggcccggcgtggcgaataaccaccgacgaaaaccgccgcgaagtctgtttcgccagcgaccattccctcccccagacggtggtttaccgtcatcccgtgtccctccgccctttggggccgcttgcggccccgttttttctcgccggaaccgtacagcgcggcgatatccgcctggccgtaatcgtgccgcccgaagccgtttacctccatcaggtggcgtggctgcgcaagggagaacagtggcacggctggcggctggagcggtttgatgagcgccgggcggtattccgccacggcaaacgccagttgatgctgaaagtaccggagtaa

SEQ ID NO: 179219 - DNA, 381 bp, Klebsiella oxytoca
atgaataccgtattgaactcacgtgaagaagcccttaaccggggcaaactgattaaccttgatgacgaggcgctggacgctggcttaccgctggatctggccataactcttccggcccacaagcactgtcttgaagaccggaatgacaacgccatcagggagttgctgaaaggtgttgaaatggcagcagtagtggcctttatctcccaccaaccgccgcagcgcaccattcgtatcgattaccgctcggtgctgtcgcaaaaaactaacggcagcacgcagcaacaaaacgtcaggctaacgttacgcgttcatttttctgagcaaggcatccccatcgccgccacgctggggctgatgggggaaagattcccttattga

SEQ ID NO: 179220 - DNA, 444 bp, Klebsiella oxytoca
atgaacgatacccactacttcaacctgtacaccagcggtctgggctacctcaaccggatccgggaagtgaccccgaaaaaaggcgaaccgttcctgtgttgcgacattgccgcactacggggcgaagccagcaacgcggagcacacctggttcgactgccgcgtcagcggcaaggaagcgcagaaactggtgcgccgctgtatcgacgcctgcgagcagaaacgcaaggtgctgatccagttccgcctcggcgatctgtatgccgacacctttgtctacagcaaaggcgaccgtaaaggcgaaaccggcgtcagcctgaaggcccatctgctgcacatcgggctcatcaaaattgacggtgaagaggtttaccgggcagagcgcgaagcggaatcccagccagcgccagccgcaccgccagcagaacctgtaccgcagttctga

SEQ ID NO: 179221 - DNA, 468 bp, Klebsiella oxytoca
atgactctcagaacttttcctgtattacacgatctctccgactctctgtttgcggaccgttttaaccgtatcgatcgcctttttagccagctaaccggcagtactccgttgccctccacgccttcttacaatatccggcggctgggggataatcgctatgaactgacgctcagcgtgccgggctggaaagagagcgaactggaaattgaaaccgtcggcggtcagctgaacatcagcggtaaacgtgaagaggagaaaaccgaaaacggcgaagaaggatggatccatcggggtatcagccgcagcgacttccgggccagctatagtctgccggagcatgtgaaagtgaccggcgcttcgctggaaaacggcttactggcaattgaattacaccaggatatcccggaagaagagaaaccgcagcgcatcgccatcaacaacaacccggcgattgaacataagccgtaa

SEQ ID NO: 179222 - DNA, 1827 bp, Klebsiella oxytoca
atgcaactttacctgtgcgaaaaaccctctcaggcgcgcgatatcgcccgtgttcttgacgctcgtaaccgcagcgacggctacctgcataacgccaccgtgaccatcacctggtgcttcggccatctgctgagcatggccgcgccggaggattacgatccggcgctgaaacactggcgggcagagcatctgccgtttattcccccggcatggcggctggtgatccgcccggaggtgcgcaagcagttccgtatcatcgaaaagctgctgaaacaggcggatgcagtggtgattgccaccgacgccgaccgcgaaggcgaaaccatcgcccgcgaaattctggaacaatgccgctggcgcggtccggtccagcggctgtggctgtcggcgctggatgaggccagtatccacaaggcgctcgctgcgctgcgatccggcgacagcacgtttccgctgtacctggccggactggcgcgcgcccgcgctgactggctggtcggcatcaacatgacccgcgcctgcacgctgatgaaccggcggcacaagggtgtgctctccgtgggccgggtacagacgccaaccctgcgtctggtggtggaacgcgaccgggagatcgcccgcttcacgccccgcccctggtggcgggtggatgcccgcttgcatgctgaaggagcatctttccttgcacagtggcaacccgatgacgcgtactgtgacgacgaaggccgttgcatccgcgaatccgccgcccgtgaggccacagcacgcctacaacaggccgaaaccgcgctggtgatggatgtcaccacccgacgggagaaaacgccgccaccgcaggccttcaccctcagcgccctgcagcaggtctgctcaaaacagtggggcatgggtgcacaggaggtactggatatcgcccagcgcctgtatgaaacccataaggccaccacctatccgcgcaccgactgcggctatctgccgctttccatgcacgctgaagcgccgcaggtgctggccgcgctggttgccagcgacgcctctctccaccccctcgccacgcagctaaatttacagcaacgctcccggctgtgggacgacagcaaaatcaccgcccaccacggcatcatcccgacccgtaaaacggtagatctgacgcagctaaacgacagtgagcgcaaggtctacggtctggtgcgcagccattttctggcgcagtttctgccagaccatgaggtggataaaacggagctgcgcctgaattgcgccggggaaacgctggcggcccgtggctcagtagtcattgtcagcggctggcggcagctgtttttgcgcgagatggcaacacactcaccggaagaaacgcaggcacttcccgccctgcaacagggacaaacctgccaggtggaacaggtggacgttcgcgcccgccagacccaaccgccggagcactataccgaagggacgctgattgccgcgatgaaaaacaccgcccgttttgtcagcgatgagcgcctgaaacagcggctgaaagagaacgccggtattggcaccgaagccacccgcgcggggattatccagacgctgcttaagcgcggctatctgattaagcagcgtcgtttcctgctggcaacggatatcgccagcgtgctgattgacgccctgccggaaacgctgaaagatccaggcaccactgcgctatgggagcagatgctggatgacatcgcgacggggaaaatggggctggaggcgttcctggtgcagcagcaagaggccgtcacagcgctcacggctcaaatagtcagaagccagaaaagcgccccatcaggttag

SEQ ID NO: 179223 - DNA, 426 bp, Klebsiella oxytoca
atgaacaatgacgacgacgaagaaagcgccgcccgcaaaagctcgctaaagggccttttaaaggcctttaagggtaagggagagctgcgagcgctggtgcgggaattacagacgctgcgcatacagttgcaactacgccagccgatgctgaaacaggcggtgtatgaattgccggggcgtaacgtaccgctgatcctgtgcagcaacccggcgcgctccggcgtcagctatctgcgctggcgtaatctggacaacaaccgttcgggaggcgtggcgttgcaggaggccattcaacagcctgacgtaagcgatgaactgcgcgacgcgctgatggcgctcgaatggcggcggcaggtgctgaatacgcagctttcggtggtgatgtttatgctgcggcggatacagccgttaaccacgcaggtttaa

SEQ ID NO: 179224 - DNA, 612 bp, Klebsiella oxytoca
atgcctggcacaaccctgatcagtgatatccgcatcaccctgcacacccgcgtcgccgcccggctgtggcaggcgcatcccactggcatgctgctctgtctggcgttactcaggcgtctgctgcgcgccgaagaggctgacgatccgtgggccgcccactggctgaagcaactgcgcatccgcctgaatctgatcgcgcacctgctgaagcaaaaaaatcgtcggctggaccaagccttcgccagcctgccgggcgctatccacaccacgcaggtcagtaacccgtccccgaccgaattcatcctgccgctggcgctgttctcaccgcccggttcgcgcctgctacagcagttgattgattacgatctgctggtccgccgaactctgcttgcctggcacctcggccttatcacccaggcggagaagcgcgatttcattgccaccatcccacggctaatgctccaggtgttcagcttcgtgaaccgctttcgcaccactggcgtgacccgcgccgacgtgagggcgaacagtccgctggcgcagtcgatggcgcataagctcggaaatttgcccaaaaagatgcttgcggagatcctgcgtgatgaacaatga

SEQ ID NO: 179225 - DNA, 873 bp, Klebsiella oxytoca
atgaagagtgacgacaggctgctgtttctcggcaacccgcagcagagcgtgccgaagcgcctgctgctggcgcgcaacctctccccgcgcgacaagttcacgtggcaactgctgcgcctgcacgcccgcgacgacggccgcggcgtctttccctcctacaacgacctacagggctggctttccgaccagcccgagggcgagaaggcctcgcgcagtaccgtcagcaatgcgctgatgatgttgcggatcacccgctggctgagcctgtgccagcgactgcgcgacgagcaaagcggcaggatcaccggcaacctctacgccctgcatgatgcgccactgactcatgccgatgcctgccggatggacagcgaatatctggcgctgcttacggcctgttcccgccaccgcaaccggcgtatccgcaacatcgccatcggactgctgctcaccctgcaacaacctgtggatagtggacgaacctgcactgagtctccattgaagaccgcccctggtcttaatcgaggactcaataaaaaatgccctagtcttcaattaagactcagtgatgtggcgggggctggcgggcagccggaaccgcattgcgtacatactggtacagatttaaacaataaacatcaaaagcgtacgcaactgctgcactggcctgtggataatcccttcagcgccagcgagcgccgcgccgccgaacgcgcgatgcgcaatctggctcccgacctctgccagcaggtgctggacgactgcctgtggcggatcgccgcccacgatatccaccgccccctcgcctatctgctggcaacgctggagaaggccaggcggggcgagttcaatcagcttcggcgcaggcgcagatag

SEQ ID NO: 179226 - DNA, 558 bp, Klebsiella oxytoca
atgacgccctcagttaaccaggcggtgctcactcatatcgtccaggcgctgaaggagggacagatccgctactgcgaatcgctcggcttcagcccgcaggagctgtgcgagctgacgcggctcaccgccgatgacatcctgtttctcagcaacagcgcggtgcaattcatcaccacccacattgaccacgagatgctgggccggatgctggcgaggatggagcaggagcggctgttccagcagcgtctggaggaagccctgtcgctgggcgcgtccatcgagttcatcaaccactactttggcctttccacgccggaggtctgcgcccggcgacggctgattggcctgtttgtccgacaagggcgcaacaatgctccggatgagcaggtggagacgctggtgtggaacgagtggcagaaaaccggcgtgaaaaagctcgactcacccgaagcgctgaccgccatgatggcgatggcccgcgaacacgacctgtcgctgacggttatctggaacctgctgcgccagtggactcaggagaagctgctgtatgaagagtga

SEQ ID NO: 179227 - DNA, 1284 bp, Klebsiella oxytoca
atgtgcgcttcacacctgctcaaccgctggcttcacggtgccagcaatagcggagaacaggaaatggtccaggtcagcctggagcaaatccagccgttctccctcaatccccgcgtcacccgcaaccccggctatgacatactgaaagcgtcaattcttgcccgcgggctggataacccgccggtgttgacccgtcgccccggtgatgaaaaatatatgctcgccagcggcgggaatacgcgcctcgccatcctcaatgaactgtggcgggaaacgcaggatgagcgttaccaccgcgtctgctggccgttcagaccgtggccggaaacactgtcaccgcagcaaggcgaagtgcagtgcctgatcggccatctggcggaaagcgacctgcataacggattgatgtttatcgaacgcgcggaaggggtcctgcacctgcgcgatctttacctcgaggcaggtattgaatgcccgacgcagctggcgctggcggagcaactcacccgcgacggctaccccgtcagccagtcgcaaatcagccggatgctacagaccgtcgactggttgctgccctgcatccccaacgcgctgtacggtggtcttacccgaaaggttatcgatcgcctgctggcactgcgcagcgcggcggaacaggtgtgggcaaagctgatgccgctggaacgccagccggaatttgccgacctgttcagcaccgcccttgccaccttcaatggcgagccggaaggcgtggtaccgcaactggtgcaggacgaactgctcggcgagatgagctgtcgcagcggcatgagctggaatacgttgctggcggaactgaccgatggccagagcaagcggcaggtgctgctgggacctccggtcaaaaaggtcctctggccgccaccgccggaagctgaaaaagcaccactaccagagcctgagccaccgactgaacccgccgcgcccgatgagccaaagccctcaccgctggtgcatacggcacggtcgctgtgtgcctgctggggactggacgcctgtatccagccggacgacagcgctccggccggtttcaccctcgcgccctgcgacgaatttccccatccggcggcacagcgctgctatcaggtgctggcagccctgaatggcgacaccagcacgccgatgcccgccctcgaattgctgttgtcgccggactacgacaacgctcagatccagcaactgatgcagcttatcaacctgtgccgccagcggcggctgcgggaggttcgccatgacgccctcagttaa

SEQ ID NO: 179228 - DNA, 195 bp, Klebsiella oxytoca
atgaatagcgacagatttttacgcttacgccaggtggaagacaaaatcggcttcggtaaatcgtggatttatcgacaaatacagctgcaacagtttccgccgtccatccgactcaatagccgccacgtcgcctggctggaaagcgaggtggacgcgtggatccaccaacgcatccgacttacccgcgatgtctga

SEQ ID NO: 179229 - DNA, 891 bp, Klebsiella oxytoca
atgcccccacacaaaatccgccaggagtggctgacgctggatgaggccgcagaagtcatccggcagcacaacatcacattgctgcctgccgatctgatccgccatgccctgcacggcgatctgcctctctcggtctacttcccctcgcccgtacttctgagaccactcaatcctccttgccactttgcctgccgattcagcaagccaccctttccaccttcgcaatgcaacaaacccggcaaccgcaaagtgatggccaactcgccgccatgcagacgcgacccgactctacaactgaccaccagccatctgtggaatttgccgttaatcggccttgagcgcctgctgctccatcagcaactggcgaaaacgttgaatcgcccttgccccaatgatacccattgctgcaaccagattggcatcgtggtctgcgatgaaaacgacagctactaccaactctgttgccgcaaatcgttgcgggagcttctactggaactgctcgccacgcaaaacaaccttcaggaagagctacatctgctgattggccagctgtatggcaacggtcgcaatgaccttaaatcccggctcaatctgccagtctgctacttgcaggacacattgcctcctgacgcattatttgttattcgccgcccccatctcgaggacttcctgacccgtcatcagccggaatcaaaggagcgtatcacttccgcgctttcgcgtttgctgtggctggcctgcaagcacaacccgcaactggacgatgaaatgctggagcatccctacaaactgctgaacattttcgaatgctgggcgcgtgaggaaggtatgcacctgccgctgagccccgaaacgctgaaaaccgcactccagcgcggcgcaccgccgtaa

SEQ ID NO: 179230 - DNA, 780 bp, Klebsiella oxytoca
ttgaatagttcggaagacgatttgcttgaagtagcatggtatttgtcgaagtacggtaaatctcaaccacctgtgggactgggtgttctgaaatggaaagaggcttatgatttgttttatccccgtttcggggcgggcaaaaccgccagcgagtttcgcaatagtctgaaaaatagtcgtgaccgttttgattcctggcttagtgatgtgcgtgtcggctggcttgacgagcagggcgctcctgctgcgctttctcattcagcgcagcgtgtgcatcagcgattgagtcggctttcagacagtgcgattgagcagcgcgttctttcgttaatatcttctaatggagaggaacaggcacaacgtgattgccttgctatccagcaggataaaagtattgaagatactatacgcgagcagttgattgcggcacgactggggcagggtacctttcggaaaaattgtctcatgctctatccggcatgccctgttacgggaacgacgtttgcgccgttactccgtgccagccatataaaaccgtgggctgcctgcgagaatgggaatgaacgtcttgatccttataatggaattatactggccgcacatattgatattttattcgatcaggggtggatttcgtttgaaaacgatggacgtttattaattagtgctgaactggatattagcgttaaagagcagtatttgttgccagagaaaataaaggcgttttctgttgaatcgtattgttatctggagtggcatcgggataatttattacgatga

SEQ ID NO: 179231 - DNA, 1209 bp, Klebsiella oxytoca
atggacgaaaagaaactcaaagcccttgcggctgaactggctaaaggtcttaaaactgaagccgacctcaatcagttttcccgtatgctgacaaagctaaccgtcgaaacggcgctcaatgcggagctgactgaccatctcgggcatgagaaaaatgcccccaaaacaggttcaaacacccgtaatggctactcgtcaaaaacggtgttgtgcgatgacggcgagatagaactcaacacgccgcgtgaccgtgaaaataccttcgaaccgcagctgattaagaagcaccagacgcgtattacgcagatggacagccagattttatccctttatgccaaaggcatgactactcgcgaaatcgtcgccaccttcaaggagatgtacgatgccgatgtgtcacccacgctgatctctaaagtcaccgatgccgtcaaagagcaggtgactgagtggcaaaaccggcagctggatgcgctgtatcccattgtttacatggactttatcgtcgtaaaagttcgtcagaatggtagcgtaatcaacaaagctgttttcctggcgctggggatcaataccgaaggccagaaagagttgctgggcatgtggctggccgaaaatgaaggcgcaaagttctggctgagcgtgcttacagagatgaaaaaccgtggccttcaggacatcctgattgcctgtgtggacggtctgaagggcttcccggatgcgataaacagcgtcttcccgcagacccatatccagctgtgcatcatccatatggtgcgtaacagcctgaaatacgtgtcctggaaggactacaaagccgtcaccagcgggctaaaagcagtttatcaggccccgaccgaagaggcggcgctgatggcgctggatgcgttcgcgggcgaatgggacgataaatatccgcaaatcagcaaaagctggcgtgcgcactgggaaaacctcaatacactcttcagttatccgccggatatccgcaaggccatctacaccacaaatgctatcgaatcgctgaacagcgtgatccgtgctgcgattaaaaaacgcaaagtgttcccgacagatgactcggtacggaaagttatttatctggcgatcaaggatgcgtcaaaaaaatggagtatgccgctccagaactggcggctggcgatgagccgctttattatcgagttcggtgaccgcctgagcgatcacctttaa

SEQ ID NO: 179232 - DNA, 708 bp, Klebsiella oxytoca
atgcaacctcgccaagtgcgcgatattaaataccaacttttacccgggaccgatcgccagactaccgatattgttatcgaacgagatggcgtaatcactgttcgtccccctcggagaatgacgccagagcaagtagatgagaccgtactgagcaagcggatgtggatctatcgcaacctggctgagtggcgcgaccttaatgcaacacgggtgacaagagagtgggttaatggtgaaacatttctctatttgggaagtggatatcgtcttcagctagtagcaaatcaagacgaagcgctaaagctcaaagatggccgcttttgccttcggcgtgagcttgttgaacatggtggtcgcaatgcagcctatctggcattcgaaagtttttataaatcaaaaggcttacctcgtatacaaaagagagtagcctatttcgcagccagagttggtgtaactccaggagcgatacaaataaaagacttgggctaccgctgggcctcgtgtacgcctaatggctctctccatttccactggaaatgtctgatggcaccgctgactgtcattgactatattatagtccatgaactttgccacctacattatcgggaccactctgacgccttctggaacgaggtggacaaaatactaccagattatcgagagagaaaagaatggctcaaaattcgtggagccgagctagacctgtga

SEQ ID NO: 179233 - DNA, 3264 bp, Klebsiella oxytoca
atgagcgaatacagtgaagttgaaaagccgtttctgagccaactggctgaacaaggctggacggtgatcgatcaaggcagcggtataccgcagcatgctggtgcaagtttacgtagcaactttcgccagtggcttttgccggaggttttcgacaacgctgtacgctctatcaaccgtactgacgataatcaagagtggttaacggacagacaactggaggatctacgcagccaactgctgcggcagcccaatcgtacattgctggagactaacgaatcagtgcaagcattgttattcaaggcacagaccgacagtaacgaactgaccggcgaggctgatccggtggtacgcttgattgacttccataaccctgcaaacaaccagttccatgccattaaccagttccgcatcgacacaccgggttgtgtgaaagcctttatcattccagatattgttttgtttgtgaatggtatcccactggtggtagtggaatgcaagaaaggttccgaaacctgcgcaaacccgatgcaggaagcgtttgttcagttgcaacggtatatgcgtcggcgcaaagaaacgacaaatgcagggttgaaggaaggcgagcctcggttattccacagtaacctgttgctgatccgtagctgcggtcagatggcggactatgggagcatcacctcaggcgaggagcattattacgcctggaaaacgctctatcctaaaggagaatctgcgagagaagacctaaatgctcaacagcaattgatagctggaatgctggacaaagttaatctgttgcagattttacgcaccagtgctgtgtttatggacactgatagtggaacacgtatcaaagtggtatgtcgctatcaacagtttcgcgctgcgagcaagattattgaacgcttgcgtcaggctgatacagcccaggatcgcagtggtgtggtatggcatacccaaggctcaggcaaatcgttgactatggtatttttggctcgaatgatacgtgccagccgtgatctgaatgattataaaattgtactggtaaatgaccgacaggatctggagaaacagctgtctgacactgctaccctgattggtgggcgagtgaatgtgattgaaaaccgtcaggctttacgtaccaatctatccactgacagctcggatgtgagcatggtgatggtacacaagtttcaggaacataagcagacgctgactaatacggtagctgaggcgctgggcacttatcttgccatacctgcaggtaaaacctttggtgtagtgaacagctcggagcgcatcattctgatgattgatgaggcacatcgaacacaaagctcagatttgggtgacaatctgtttgaggcctttcccaacgcggtgcgtattgcttttaccggcactcctttgatcactgaacgtcacggtgaaaagaaaacccttaaacgttttggcgattatatcgatacctaccgtctaatggacgcagtaaatgatggagccacactacagatcctctacgaaggaaaaacagctgacagcgccctgaatgaaaaacatgcctttgatacggcctttgaagatttattcaaagatcgcagcgatgaggaactgctggcgatcaagaagaaatatggcgcgactggcgacattcttgaggctgaaaaccgtatcaacgccatttcccgggatttagtagcgcactatgtagacaatatcctgcccaatggtttcaaggcacaggtggtatgccactccaaactggcttgtatacgctaccggaatggcatcgaagcggcgctggcagaaagaattaccaaggaagaagaacaggccatacccgatatagcgttaattcaacgtttacgttttctgaaaactgccgtggtgatctccagtgacggaaccaacgaggctgcctttatcactcatgcccgtaagcacgcacagcagatgaatgcggtagaaaacttttgccgaagcttcgattttaatgatccggataaggtctacactggaattgcatttctgattgtgtgcgacatgttgctgacagggttcgatgcccctattgagcaagtcatgtatatcgataaaaagttgcgcgagcatagtttacttcaggctattgcacgaactaatcgcgtgaaaaaaggtaagcaacgtggctatatcgtcgattatataggtctggccaatcatttgaccaacgccctgacgttgtatgctgccagcgatgagttgcaggaactgcacgacggcatgcagaacatttcatcggagttgccagtactggacgagcgctatcagcgtttgctgcaacattttaccgctcttggtatcaagcaaattagggcgttcgttaatggtgagctacctcatcaagatgctgatgccgcagtagtgcacgaggccgttaaggtactcaaagatgaaaagaaacgtgccgattttgaggtgtatcttaaaaagttccttatgagtctggatattatcctgccgaataactctgcacagccctatcgggtgccagcaaagcggtttggctatatcctgcaggtagctagggagcgttacaaagataccagcattgatcttggcagcgcaggtgagaaggttaaagaattgattaatgaacatcttatcagcctgggtatcaatccgaaggtaccgccggtagagctattgtctgaagactttctcgagaaactggcaagccatgctggcaataacagcgaagccaaagcaagcgaaatggaacatgctatccgtaagcactgcaccgttcaccacgatgaagacccagcgttttataagagactgtcggaaaaagtagatgcactaatcgagaaacaccacgacgaatgggatatgttggcggataaactggcagagcttcgtaaagaagctattgcagggcgacaacaaggtgaagaaggtatgagtaaagaagcaacaaccttttaccaatatatcgtccaacttggctttgccggggggatcgttgaagattctgataagcccgctttcaaggcattgatggagacctcagtgaaactactgcaggaaaccatagctagtatcgacttctggcaaaatcccgataaacagaagcgtgtgcgcggtatgattaaaaatgagatcatcaagtcgggaattgaagaacttaagctcaatcgtgaacgtgtagctgtagagatcatgagactagctaaacatcgccacgatgaactggccaacgtagcgcatacaggaggcatgtga

SEQ ID NO: 179234 - DNA, 1056 bp, Klebsiella oxytoca
gtgaccccaaaattcccggcttcattgaccccaacacccatcggttatgccgactggttggtcgaacttaagggtcgcattcaccgtgctcagcagcgcgctacattggcggtcaaccgggaattggtaggattgtattggcagataggtagggacattctggctcgtcagactgaacaaggctggggagccaaagtcatcgatcggcttgcacatgatcttcgtacaacctttcccgaaatgaagggcttctcacctcgtaatctcaagtatatgcgtgcttttgccgaagcctggcctgatgaggaatttgtgcaagcggtgcttgcacaattgccctggtatcatcaattggccctgctcgacaaactaacccgaccagatgatcgacgctggtatgcagccaaagcaattgagcacaactggtcacgtaatgtgctggttatgcaaattgaaagtcgtttattgcagcgcagcggcaacgcagtgaataatttcgatgtcagcttacctcagccgcaatccgatctggctagggaatcgctgaaagatccctaccgcttcgatttccttgggctcacagaagcagctcaggaacgggaggtagaaagcgctttattaaaacatgtcactgaatttctgttggagcttggtgctggttttgcctttgtcgggcgtcaggtgctgatggatgtgggaggcgatgagttctttatcgacctgctattttatcatctcaaactgcgctgttatgtcgtcattgaactcaagggcggcaaattcaagcctgagcatctcggacaattaggattttacctcaccgccgttgatcggcagatgaaacacgaacaagacaacccaaccatcggtctcctgctgtgtaagagtaaaaacaaagtagttgccgaatatgctttaggtgacaaaacccaaccaatgggtattgctgaatacagattggttgaatccctgcctgaggagttgcaaaccagcttgccaagtattgagcaactggagcaggagttgaccaaggatgcagaagaggactctgaatga

SEQ ID NO: 179235 - DNA, 1281 bp, Klebsiella oxytoca
atgagtgagttcaaagaaattgatgtgggcgctcatttaaaactgacaagtggttttccatttgcctcatcacaattctccaatgaaggctttccacttattcggatccgagatattttaacttcgcagaccgaaacgtgtttcaatggagcataccctccaggctatctcatcaagaaaggtgatattctaatcggtatggatggtgactttcatgttgtcaaatggcgtggtgatgatgctcttttgaatcagcgagtactcaaagttgacatccagaatgaatctgccctaacgctggattacttgttccactggcttggaccatttttacagaaagttaacgatataactgcagcgaccactgttaaacacctatctgtcaaagacttgacaaaagcaaaagcaaaatttcctagtgtttcagctcagaaaaaaatagctctagttcttaatactatcgacactactatcgaaaaaactgaagctctgataactaaatacaaacaaattaaatcgggtttggtgcacgatctgtttactcgtggtgtacttcctaatggtcaacttcgccctccgcgtaaccaatcacctgagctgtataaaaatactgaggttgggtggataccgaaagaatgggaagtagtttgcatggtaactttggcagaggaaagaggcaattcaactacgatcggtccattcggtagcgacttagtcgcaacggactaccggcttgaaggcgtacctgttgtgtttgtccgtgatattaaagagtctggttttcaatggaacagtaaaacatatgtttctaacaggaaagcccagcaactcaatgctcatatggtaagatccggagaaattcttgcaacgaaaatggggcttcctccatgcgttagttgtttatatccggattggatgcccaatggaataataaccgcggatgttattaggttgtctccagacaggagaaaagtcgacccacaatggttagcaattgctatcaaccaggacagagtgatgcgccaagtagctgcgatcactgcaggggttacacggccgaaagttacacttgcagacttccgttcgattaaacttgccaaacctccactcaatgagcaacaacgtgcaagtatccgaattaaattattacaagaaaaactagataaagaacaagcatatgttgtgaagcttcaaaaccaaaaaaatggcctgatgcaagacctgtttactggaaaagttccggtacaagtcgacgaaccaagttcggaggtttcagcgtga

SEQ ID NO: 179236 - DNA, 2784 bp, Klebsiella oxytoca
atgccgtctcctaaacttacactagcccgtttggaaagcctgctgctcaccgcctgtgatgatctgcgtggcaatatggacgccagcgaatacaaagaatacatttttggtatgctttttctgaagcgcgccagtgaccttttcgaccaacgcaggaatgagatcgtaaaagagggcaaggctgcaggcctgtctgatgctgatatagctctcactctagaagatccagaccaatattccggcaaatactttttcgttccgccccgagcacgttggaacgatccatggatagatgactcaggcaaaccacaaccggcgttgaaacacgttaaagaaaacgtcggttctacactcaacaaggcgcttgaggccttagaagaatgtaacgttgatgccctgcaggacgtactcaaggttaccatcaacttcaaccgtaagatcgggcagaacacacttgacgacgacactctggtcgatttcatccagaacttcgaaaaaatccctctccgtgatgaggatttcgaattcccagatctacttggtgccgcctatgaatggttgatcaaacactttgctgattcagcgggcaagaaagccggtgaattctataccccggcagaggtagtacgtgtttgcgtcgaaatttgtgacccacaagaaggtatgagcgtctatgacccaacggtaggctcaggcggtatgttgatccaggcgcgtgattatctgcgcgaatgtggtgctgatgccagcgagctggcgctctacggtcaggaaaaaatgggcaccacatggtctatttgtaagatgaacatgctactgcatggtatctcgcacgcagacattcgcaatgctgataccctgacaaatccaaggcataaaaccgaaggtgatgagctgagacgctttgatcgtgtattagctaacccaccatttagccaaaactatgcccgcagccaatccaaagatgatggcagtggtactaaaaagaaagtctcaatcgcctaccctggccgtttccacgtgtggatgcccgaaaaaggtaaaaaagcagacctgatgttcgtgcaacacatgctgtcggtgctcaaaagcgatggccgtatggccactgtcatgccacatggtgtgctgttccgtggcggggaagaacgcgaggcgcggcaatattttattgaacaaggttatcttgaagccgtcatcgggctccctggtaacctgttctatggtaccggtattccagcctgtattctggtattgaacaaggcgggtgcatcaactcgcaagcatgttctgtttattaacgccgaccgtgagtaccgtgaaggcaaagctcagaatcatctgcggccagaagatatcgataagatcgtacaggcctaccgaggtggaaaagatatcccggcctatgccaaacgcgtagcagtagctgatatccaggcagaggattacaattgtaacatccgccgatatgtcgacaatactccaccaccggagccgcaggacgtacgcgctcatcttcatggtggggttcctgtcagtgaaattgatgccctagctcacttctggcagaactatgctggtctgcgtgaaagctgctttgtgcctcgtgctatcgcagagcctctcgttaatggagcagcgccttatgccgatttcgcgcccgaattgcatgacaaacgtgctattgctgaacacatcaatcgccatccgagtattgcccagcggcaagctcgatttatgactgaattgcaagactggtggcaacaatacctgcctgtagttgaagcactagcacctgatgctgacaaccaacaggccaatgccaataatgtctatcagatgcgcgccactttgctggacagcattgagagaaccttcagcaatcagaatctgctcaataaatatcaggtacgtggagctttcgccaactacttcaagttactggcctccgactttaaatcaatcgccgccagcggctggggcccggaactaattccggatcaggatatccttcaaagccagttccctcaggtgctagccgagctagagcaacaacacgcccgactggccgagttgcaggccttatttgccgccgctggcgaagaagattttgaagacactgacgattcaggcgttctgccttccgatgaagttaaggctttgaaggatgaattgaaagatgccacaacagagtggaaaactcatcttaaggctctcaagggcgcagtaagcgatctattcacagagctcaaagtagcgggtttgttgcccaaaggtactgataaagggcactattgtagcgatggcctcactgccaaagaggcccagtttggtaacggacaacgtatactggacttagctatttccgttggccactattcaactatcgccacagtaattcaacagtctatggatgcagggctgcaggccaaaactcgagccagccgggcagaagaaaaacttgccactcataaggcactggaagatgaagctaaggcactaaagatctctatcaaatccaccgaatccaagaagtatgaattggttgagaaagcgcgtcttaaaataagtagcgatgaagcgcgaatagttattgttgaacgcttaggaaaggtattgttcgaaaactaccgccaatacctgcatgcagaccaacgagcctgtattgttgcgattgaaaacttgtggaacaaatacgctattacagccaagcagattgagtccgaacaaaatgaagcagccaaggccttgcaagcatttttgatggagttgggatatgagtga

SEQ ID NO: 179237 - DNA, 255 bp, Klebsiella oxytoca
atgccccaaaagactcctaccagcactgcaagctatatatatcggctcgcaaaagagcataacgttgaagcttcccgcgacaatacaagctacatggcagcaaccattacagcgctttctggcgatgccgtagaattagacagcattgagcaattacttgttaacctcaaaagaagaggtatcctgactaaggctgaaatcctgcagcttcaggggtgttacttacgtgagcaaagagattctcgcaagaagtaa

SEQ ID NO: 179238 - DNA, 195 bp, Klebsiella oxytoca
atgggcgtgcagatccttgacgcgcagcagacggcgctgccgcttaatgccgcgtcgtctgcaatcccgtggactattctgacccccagccggaccaacacgctgaacttttacgcccggctgatgaccacccgggtgccggtcaccgccgggcacgttagtgctaccgcgacattcacgctcgaattccagtaa

SEQ ID NO: 179239 - DNA, 504 bp, Klebsiella oxytoca
atgaaatggattcatgccgggtggcttctggcaatcacgctgaccgcattttccccggtgctgcaggccaccgacattactattaccgttaacggcaaagtggtggccaaaccctgtaccgtttccaccactaacgccagcgtcgatctgggggaactctataccttcagcctggtatcagcaggttccgcgtcggcctggcacagtaccgagctcgatttaagcaactgcccggtcggcacctcgcgggtcaccgccagcttcagcggctcggcggacgccacgggttactacagaaaccagggtaccgcccgcaatatccagcttgagctacaggatgaaggcggaaacacgctgaacaccggtgcgagaaaagaggtgcaggtggatgattcaacgcaatcaacccggtttcctctcaaggtcagggcgctgacggtcaacggaggcgcgactcaaggaacgatccaggcggtgatttacgtcacctatacctacgcctga

SEQ ID NO: 179240 - DNA, 963 bp, Klebsiella oxytoca
atgaattatcaaaatcagaccacgtcaaagattgggaagctgatatacaagattttttgtattttatcattagtagcaggttactctacggctgctcacgcctttacctgctatgacgctacgggcgtgaccctggacagcttatacggcgatcagtccacaaacgtctatgttaatttacagccgtccctgggggttggccaaaacctcgtcgtggacttatctcaatccatattttgtaagaatgacactccagaagaccgtaacgattttacaagcatactgctgggctcatcctacagcggcctgcttgctaactttaccggatcgctgaagtactatggctcaagctataacttcccgctgacttcgagtacggcaagctacaatttgcgctcaggtaattttgttccctggaatgcgatgctttatcttactccagtctctgccgcttccggagttgtcatcaagtcgggctcattaatcgccaggttggttatgcttcatgtcggtaccaacgttcataatgatacccgcgagtatcaggcacgttttacatggaatatctatgcgaataatgacgtcattgtgcctaccggcggctgtgatgtctcatcccgcagcgtcacggttaatcttcccaactaccccgcctcaacggcgattccattgacggtacactgcgcgaaaaatcaggcgctgggttattacctctctggcaccaccgcggacgcagccaattccgtttttaccaataccgcgtcatcttcggcggctcaaggtatcggcattcagctaacccgaaatagcagcgttatttcagccaataaagaggtttctttaggaacggtaggcacctcaccggtcaatctcgggctgatcgctaattatgcccgaaccagcggccaggttaccgccggcaacgttcaatcgattattggggtgacatttgtttatcagtaa

SEQ ID NO: 179241 - DNA, 1938 bp, Klebsiella oxytoca
atgcagagcttgtggccctttctgacccgggaactccgcgatgcgccggggcgggcgaactacaccctgcgcctgacgctcagctgcgcggtgctgattgtgctgtttatgacgctgcatattcccttcctcgccgtcgcgctgatcgtggtgttttacgtcagccagccgaacgtcctgatgatcaaactggtgagcgtggttttcgtggtgaccgtcagcgtcgcgctgggcggcgtgctgctgattatcaagtggacctatgactatccgctgatccgcctggtcgcctcggtgatcctgttcttctgcgccatttacctgatgcgggtgctcggcaagctcgggctggcgtttttcgtggtggcgctggcggtcatctacgcccagaccttcccgtcgatgaccagccagagcgaaattctggtgcgcctgctgctgtggctatgggtggcgatcaacacagccattctggtgaccctgctggtcaacgcctgtttccagcaggcctttcccggctatcagttcaaagcccggctggtggtgatgctccgccagacggcgcggcgcctgagccagccggacgatggcacgccgccgcccaccgttaccgagattgccgggcagtttaaccaactgcggtccctgtatcagcaggccgcgcgcgccacgccggagattgccgccagcccgcaggcctggcagtcgctgatggccgccgcgctgagctgctctcatttgacggcgctgctccagccgggcgacgaccatcccgatgcgcgtcggcggatagccagccagcttaacgcgctggcggataatctgcccgcggcggcggaggtccagccgctgattgtcccgcgcgacggcgccaacagcgccattttgcaggagatcgccgaggttctggcgcggctggcgcgcggcgaaaccatcccgctgccgcagggcgaagtggaaaaagcgccgctgcttttgccggacgcgtggtccaatccggcctatctgcactttgccctgaaaacgctgctggcgacgctgctgtgctacgttttttacaccgccgccgactggcagggcatccacaccatcatgctgagctgcgtgatcgtcgcccagccgggcctgggcgccaccatgcagaaaacgtggctacgcatcggcggcgcgctgctggccacgctgattgcgctgcttctgatcgtctttgtgcagccctggaccgattcgctgagcggcctgctggcgatgaccctaccggtcttcgcgctggcagcgtggattgcggcggggtcggagcgcatcgcctacgccggcattcagataggctttaccttcgcgctggcgttcctgagctggtttggcccgctcagcaatcttaccgagctgcgcgaccgggttatcggcatcctgctcggcgtgctggtttcctccattgttcatctctatttatggcccgatagcgaagcgccgcagctgaaagcgcgtctggcccagctgtatcgccagctggcgcaaaccctcgccgcccgcgacgatgaggttcagcaggtaccgctgtttgccgcgctgaccgagagcgaaaccttaatcaaccgggtggccgccgagccgctgggaacctatgcgcacccgtggccggaagccaaaagctggccggcgcgggcaacctttcgtcaggcagaggagatcctgcgcctcagcgaaggctatcgcctctacgccgcgccggaagatacctttttagcccgctgcgcccggcggcttgaagcctacgccagcgatatcgatgcgcagcaaaataccgttgagcgcgttcaggcgcagcagccggatccgacgaatccgttcggcgcgccgctggtcaatgcgctggccgcgctgcccacgtggccgcttgcgtcttccgttattccgcgacaggcaacccgatcatga

SEQ ID NO: 179242 - DNA, 2712 bp, Klebsiella oxytoca
atggcttttttaccctcggcggatgattcactgacagcgtttgttcatcaggaacctttacgtttcaccgggacgctgccgcttatttccacgcgctttacgccgccccgtacgccggaaagcctgctgtcgcgggagcgcctgctgcagcgcctcgacggcgccgtctcccgccgtttaaccctgctgcgcgcgcccgccgggtttggcaaaaccaccctgctggcgcagtggtaccggcaccgccttcgacaaggggatgcgctggcctggctgagccttgaagaggacgacaacgcgccgctgctgtttatgcgctatctacaggaggcgctgcggccgctgtggcaggggtggagcccgtcgtttctgcatctgttacaaggtgagcttccggccgagctccccctgttctttgctgagctcgttaatcagcttaatcagtgcccgcacccgctgtacctgatcctcgacgactatcagtgcatcagcgacccggcgattcatcagggaatgagctggctgctgcaccatgcgccgccggcgctgcatctgcttatcggtagccgtagtcagccgcctttagccctgagccgtctgcatatgcaggaccagctgctggaggtcgatgacccggagctgcgctttaaccccagcgaagcccgcgcttatttcgctggcgcgtcggggctggatccgcaggcgatcccccggcttatcgcgcttacacaagggtgggtcgcgggaatgaaaatggccgcgctctccccggacgcgtctacggcgatgggcttcggcgccggctcgcggtcaatctcccgctatctggatgaagtgattttcgcgccgctgccgcccgaagtattcgacttcctgctgcatacctccgtgcttaatcgcctgcatccggatctgtgcgatgccgtctgcggccgccataacggcggcgagatgctgaggtggatagcgcagcacaatctgtttctttccgcgctggacgacagcggccgctggtttcgctatcacccgctgatgcgcgacgcgctgctgcatcgcctgcgccacggcggggatattgatattcgccagctgcacgatcgcgccagcgcctggttcgccgcgcagcagctgtgggccgaggcgatacgccatgcgctggccgccggaaaatcggcggccagggatgcggaagcgggcgcgcagtctctggcggaggagggggatatcgataccctggtgcagtggatacgctacctgccagccaatctcgacccgtcgcgcatcgagcttcagcttaatctggcctgggcgttagcccaccgcttccggtttagcgacgctcgccagctgctcgacgccattgagacgcaatcggcggcgcatggtggggcgctggcccacagctcgtgggtgaagctgcgggtcgttcgcgcgatctgcgaagcctttgccgacaatattgcccgcagtatcgctattgtcgaaccgctgctgcgcgaggtgccctgcggcgatatctgggttgatggcctggtgtgcaacatcctcagctactgccatctggcggactcccggccgcagcaggcgctggaggtgcagcagcgggtatccggcgtcagcgttgctaaccgcaacctgttcgtgacggtctaccgggcctttgtcatggcgcagagctatttgcgccaggggaatctcgccgaagcggaacgtcaggccgcgggggcgctgcgctatgcggagcagcataccggcgagaacgccagcagcggcgctaccctggcgcccattctcgccgagatagcctgggagcaagggaagggcgagcaggcgcaaagcctgctggttccgcgtctggagaccatcgacaacttctgtccgcccgacggccttagccgcggctatatcatcctggcccgtcaggcccgtgaaatggggagactggcggaagccgaatcactattactgcatgccgaagggctggcggcccagcgcggctggctgcgggcgcaggctccgctgctggcggagcggattgccgttgcccttcacgcgggcgacaaactggccgccgacgcgctgctgcttcgcctgcagacccttagccagacggaggctgccggcggatatatcgcgctcagccagagccgtctccttatcgccgccggcgaaccgcaggccgccgcccggctgttggatacgctggccggcgtgcgggaaaccagcggcgagtggctattcgccgtgcgtttgcggctcaaacaggcgcttgccctctggcgtgccggcgagcgggagcaggcgatggctgtctgccgaccggcgcttgcgcgcgcgctgcgtcaggggctgtggcgcagcctgctggaggggagggaagagatggctgcgctgctggcggagatgcacaagcacggcgcggcggatgatgcgctgaccgccgatatcgtcgctttgctgtcccgcttcgccgccgccggtatcgtgattgatacggcgcgtccgcagccgcccgcgctgcggctgactgaacgggagcagcagaccctgcgtttgattgccaacggccattccaacaagggcgtggcgcgcgagctgggcatttcggcggaaaccgtcaaatggcaccttaagcagctgtatgaaaagctgcaggtgaaggggcgcatccaggcggtaaaccaggcgcgcgaatggcgcctgttaagctag

SEQ ID NO: 179243 - DNA, 780 bp, Klebsiella oxytoca
atggctatcgaaaataaagttgcgctggtgaccggcgccggtcagggcattggtcgcggtatcgcgttgcgtctggctaaagacggcgcgtcggtgatgctggtcgacgtgaacccggaagggattgccgccgtcgccgccgaagtggaagcgctggggcgtaaagcggccaccttcgtcgctaacatcgccgaccgcgcgcaggtatacgccgccattgatgaagcggaaaaacagctgggcggctttgatattatcgtgaacaacgccgggatcgcccaggttcaggcgctggccgatgtgacgcctgaagaagtggaccgcatcatgcgcatcaacgttcagggtaccctgtggggcattcaggcggcggcgaaaaaattcatcgatcgtcagcagaaagggaaaatcatcaacgcctgctctatcgccggtcatgatggtttcgcgctgctgggcgtctattccgccaccaaatttgccgtacgcgccctgacgcaggcagcggcgaaagagtacgccagccgcggcatcacggtaaacgcctactgtccggggattgtgggaaccggaatgtggaccgagatcgataagcgcttcgccgacattaccggtgcgccggtgggcgaaacctataaaaaatacgtggaaggcatcgcccttggccgcgccgaaacgccggacgatgtggcaagcctggtatcttatctggcaggcccggactccgattatgttaccggtcagtcgattctgatcgatggcggtattgtttaccgttaa

SEQ ID NO: 179244 - DNA, 423 bp, Klebsiella oxytoca
atgagttcgatgacaaatagcctggaaagattaaggaaggaaaaggaggagataaagcgacagcggcgtgagtttaaaataaaattcgtgtgcttatatgtctcaatattgtcacatctaaaagcaaatcctgataataaagttaccaagggttcttttggcgatgccaaaaaaatcaccgtggcaaacgatggtttcttttttgatattagtttcaaatatgactacgcaagaaataaagtgcggattattgtatctgaagaaagcctgtcgctgaaagtcaggctcaccctgcggctgacggcatcaaaagcgaaatggcgcattgtaaaaatatcccataaaaagtttaagtatatttttagagtcatgaagccacagctgattgaggagcttatcgtctttttgatccgctatctgtag

SEQ ID NO: 179245 - DNA, 195 bp, Klebsiella oxytoca
atgaagaggcgcacctctagcgttctgttccggcagcggtgtaccgatccggagtactacggtaaagggctcagtattgcgccgcgtatcaacccggcgcaggagaaagtgacggcttctcccgaatatagcgcaattaaagcgcgctggattaaagcgtcgttgatagtggcgtacaggaaagataccccctaa

SEQ ID NO: 179246 - DNA, 264 bp, Klebsiella oxytoca
atgctcttaatcggcttaaatccatttaaaaacgcatcaaatgaaaataacgtgatcaaattagcatttttttattttcatttgcttttaattagcagacgagaaatgaacgatgcccttgatgaacgggcgcaaacgggcataaacgggcgcaaaggcaatattgcatttatttttgtttgtttttgtttatgcctgaataacgggcgagagagcgaaaccgctgccggatatgacgccaaaatgcgtacgctgtcacattga

SEQ ID NO: 179247 - DNA, 1335 bp, Klebsiella oxytoca
atgagtacgctaatcacggataaggtcgataaagcggcggtccacaatgaaaaactggacaccagcgcgtatttaccgcacaccccctggctgcaatttttactggtctgttgcctgtttgcgctgtgggggatggcgggcaacctgaatgatatcttgatcgcccagtttaaaaagggcttcgatttaacggatacccagacggcgctggtgcagtcgatttttttcctcggctacttctttgtcgccctgcctgcggcggcgctgattaagcgttattcctataaagcggcgattattattgggctgtgcctgtacgccctcggctgtttcctgttcgtcccggccgcgcagatcatgacctacggcgcgttcctcgcctgcctgggggtgatcgcctgcggactctcttttctggaaacctcggcaaacacctactccagcctgctgggcccgatccactcctccacccagcgcattaacttttcgcagatcttcaactcgctgggcgtgatttccggcgtgctgattggccaggtgatggtcttcggcgaaaacgatccgagccatgaacagctgctggcgatgcccgccgccgccgcggacgccgcgcgccatcagatggtcggccaggtggtcgggccttatctgattatcggctccgtgctggtggtgctggcgctggtgttcgtgtttattaaattcccgtcctgcaagggcacgccctctcagcagcagcagctcccgacggaaagcatggggcctacgctgaaacgcctgtttgccatcccgcgctttcgcctcgggatcctgtcgcagtttttgtacgtcggcgcccaggttggcgtatggagcttcacgattcgctttgtgcagctcgtgcagcagggcaccagcgagcactccgcaacctactggctgctggcttctctggtgatttacgccgtgggtaaaaccgtggccacctggttgatgaaccgcctgaatccggcgctgctgctcggtacctttgccctggccgccaccgcccttttactggttgccgtattcagcagttcaatgctggcggtctatgcgctcattctggtcagcttctgtatggcgccatgctggccgacaaactttggtctggtcatcaaagggatggggaaagatacccagaccgcaggctcgatcgtggtgatgtcgattatcggcggggccgttattccgctggtgatgggcattatctcagatatgaacggcggcaatatgcaaatcgcttttatcgccccacttgtgtgctttgtgtatgtcgctttctacggtttctggtgcgtgcgtaagggggtataa

SEQ ID NO: 179248 - DNA, 1158 bp, Klebsiella oxytoca
atgattattacgacggcgctggctaatgaaattgtcgcccgggcaatggcgataattcatcataacgtgaacgtgattgaccatcatggacagatcattgcctcaggtgaacggcatcgtatcggcgagcagcatgagatcgcccgtgaggtgatacgcaccggtaaacgtatttgtattaacaacaccgcggaagccgcgcgtttccagaatgtgcatcccggtattaatcatcccattatctatgacgatcgcgtggtgatggtggtgggcatcagcggcgatcccgcagcgatcagccgctatgctgaactggcggtactcaccgccgagctgctggtccgccaggccgtggagatgcgggaaaccaactggcgacagcgtctgcgcgataccctgtttggtcaatatcttgatcaaggcgcttcgcccgccggacaggaagcgctgcatcgcctggtggagcttggcttcgcttttgatgcgccgctggtgccggtcgtggtaaccgtccaggtcgaacagcaccagctaagcgaaatactgagtacgctgctgcgggaattctcgcagctgtccggggtaagagacgtgattttgctgggcagcaatgaaatattgctcctcaatacgctgagcgaatcccaggaaacgctgctgcggggcatcgagtttgtcctcagcaatcagatcagccattaccatatcggtattggcgtgcaggcggacagcgctccggatattcgcgaggccatccgattcgcccgttcggtgattgaggtggggagcaaagtgcagccgcagcggcagatctactactttcgtgaaatggcgatgctctgcctgttccgggtgctggaagacagctatatggtcaattttttcatcaataacgtacgccagctgcttgagcatgattccggcgaagtgctgctggataccctgagcagctttattgccaataacgccgagccgggcaaaacgtcgctgctgttggggattcatcgcaatacgctcacctaccggctacagcagattaaaaagcatattcagctcgatccgatggtcttcaccgacctgacgcagctggcggtgtcggtacactgctatcgtcggcagaacccgcgccagagcgaatggattgataccttaagctaa

SEQ ID NO: 179249 - DNA, 1050 bp, Klebsiella oxytoca; identical to SEQ ID NO: 175706

SEQ ID NO: 179250 - DNA, 585 bp, Klebsiella oxytoca
ttggacagtatattactttacactgatgacaatatcatcgggcaatcaatccatgattatatgattgatcgcgccagggatatcaccaccctgaaatttcaggatattgtgaaaggggtcggcgcctcaccggcagccaccgttattatcaatatcatccacaaagatatctctgcggccacaacggtcgcattactgaacactttgcgcaagcgcctgacgcattgcgcgctgctggtgctgatcgtcaaaagcgagctgtccagcctgttccgggagctgcttgatctagaaaacctgttgattctgaccgaaaaatcctcgctggcagattactcagccatcatcagcaggccctcaaccgccgaaggctgccaggggctatgcacccgccgcaagctgaccgccagggaacttcaggtgctggagttaattattgcctgcaataacagtaaaaggattgcggtgcttctcgacattgatcataaaacggtccacagccataaggtacatattatgaagaaactcgggatgaataactcgcgaataatgaacaaaagcatagtcaatatgtatcagtgctaa

SEQ ID NO: 179251 - DNA, 996 bp, Klebsiella oxytoca
atgtcgctaatgaaaaaactgacgctttttattggcttaatggcgatggggaccacgtcggcatgggcgtactgtacgcgcctgtcgcagccgacggttagcctcgacatggttgtgggccgggtggtggttccgccggatctgccggtaggctcggtgatcgtgtcccgggactggaccatgtcggcgccgggcggggccagctatagctgcagcagcggcactaaccgctttgtggccaaaatcgtcgcccccggggcgaccgatctgggaaataaaatttattccaccaacgtgcccgggatcggcctgcggttcagccgcggcggggcgacggtcaatattatctaccctgacacgttctccagctacgtcagccggaccacgaattactcgctggaaggctcccgctttacgctggaggtgattaaaaccgcgagcgtgaccggcagcggaaccctggcggcaggtaagtacacctcttacgactgggagaacggcaataacccgatcctcgaaacccgcctgagcgccaacgccatcaccgtggtatcgccctcatgtaccatcctgagcggcaaaaatatgaacgtcgatgtcggtaccatcaagcgcagcgatctcaacggcgtcggcaccaccgcgggcgggaaggattttaatattgagctgcagtgcagcggcgggttaagcgagtcgggatacgccaatatccagacctctttctccggcacgctggccaccggcaccacggtgagccgaggcgcgctgctgaacgaaaaatccggctcctcgttggcgaaaggaattggtatccaggttctgaaagagggcgtaccgctggaattcaacaagaaatacagcgtcggtacgctgcgcacgcaagaaacccgatacatcaccctgcctctgcatgcgcgtttctatcaatatgcgccgaccaccagtaccggtgaggtagagtcgcacatgatctttaacctgacgtacgattaa

SEQ ID NO: 179252 - DNA, 417 bp, Klebsiella oxytoca
ttgcggtcttctccccggctcgcgctgcgcttagccgggctacgggtttacagccgtctgcgggccggtagcccgggtaaggcgcgcagcgccgcaacccggggaatgcgtcgggatgaatgtatcggtgcggcttctccccggctcgcgctgcgcttagccggactacgggctcatagccgtctgcgggtcggtagcccgggtaaggcgcgcagcgccgcaacccggggcatggctgcgcaagcgttagcgcagctcgacgccgccctgcaccatgcgcagcaggtgctgccggggccagagctcgctaagccgcgtctctcccagccgtcgctgcaaatactcaatatcgtgacgctggcggtcgagcatcaggccgaccacgctgccgctgtgcgccacgttaataccgtataa

SEQ ID NO: 179253 - DNA, 324 bp, Klebsiella oxytoca
atgccagatgccctgaggcggcagagagggtttagcctgcccgaaacgctgctggctttagtcttgcttatcgcaaccgtgaccgcgctggcgggctatcagcgtgggctggccaacggctttatgcagctcaaccagtaccgtcaactgtggcgcgatgcgtggcgattcagtcagcttagcccaccggtgattcccgcgaatcgccaggtatcccgcatgcagacatcggtgcaaagatgtgtcagcatcacggtaacgatcacgatgcccgcagccaggcgggcgcagatgacccggctgcactgcccggtcagtcagtag

SEQ ID NO: 179254 - DNA, 564 bp, Klebsiella oxytoca
gtgtctgtaaaacagcgcggcttttccctgccggaaacgctgatcgcgatggccatcagctccgtgctgctgctcggcagcgcgcgttttcttccggcgctgcagtgggccgcgcttcgccagacccggcagcagtcgctggaaaatgagctctggcagcgaatctacaccgtcgcgaagcatctgcagcgcgccggatactgccgcggccgctgttacgggcaggcgctgtatatcgcagagggcggtgattgcctgctggtgagctgggatagcaacagcgatggcgtctggaatagcgcgccgtcatcggaatcggataccaccgggtttcgcctgcgcgatggcgcgctggaaaccctgcgcggcgcaagcgcctgcagcggcaaaggctgggagaaaatgaccaacccggcggcgattcaggtcaccgcgtttcaggttacgcgcctggagagggcgggcttcgcgcctgaattatcgattacccttgcggcgcactcggtcgccgacccgcaaatccgcgcgcgggcggaatacggcgtaacgggatataacctgtga

SEQ ID NO: 179255 - DNA, 1335 bp, Klebsiella oxytoca
atgaaagcccgatacaaaaccattgtcgacagctacgcgcaggcgattcatcgcggacagctggcggccggcacccgcctgccgacgcatcgtacgcttgccgccgcggagcggatctcgctggccacggccacgcgcgtttatcgtgaactggaggcgatggggctggtcagcggcgaaaccgggcgcggcaccttcgtgcgggacatcacgctcccgccgggccacggcgtcgatcagcaggcgctggcgggggatgttgtcgatctcaacttcaactatccttcgctgccggcgcagggggatgcgctgcgcgaggcgctcaggcgactggcgatggcgggggatattgacgctcatctgcgctaccagcctcatgccgggcggctctccgagcgcgaaattatcgcccgctatttaaccggcaatcgttttgcgcctgacgcggaaaatgttctgatcgtcaacggcgcccagcacgggctggcggtgaccgtgatggggctcctgcgcccgggcgatgtggtggcggtggatgcgctaacctactcgggctttaaagccctggccgcgctctatcatctggaactggcggcgatcccatgccgcgcggacgggccggatctgcaggcgcttcacgtgctgtgccagcagcggcgcgtacgggcggtgtataccatgccgacgctgcataatccgctgggctgggtgctcagcgcccgccagcggcaggcgctggcggatctcgcgcgccagcacgacctgctgattattgaagatgccgcctacgccagcctgattcgccatccgccgccgccggtggccagctatgcgccggaaagcacggtttatatcaccggtttttcgaaaaacgtcgccaccggactgcgcgtggggacggttgtctgcccgtcccgctatcggccggagattgagcgcgctatacgggccaccacgtggaacaccccttcgctggtgagttcgctgatctgcgcctggattgaagacggcacggtggcgcgttttgaagcgcagaaacgccaggatgcgcggcggcggcagggggttgcccgtgaggttctcggcgcgcttcccttcgtcagccatccggattcgtattttgtctggctgcctctgggcgaggagagtcgggccgatcggctggcgaaaacgctgatggagcgccatatttccgtgtcgaccgccgagcctttttgcgttacagcgaacgttccgcaggcgatccgcatcgccctcggctccgttcccttcgatagcctgcgcgcggcgctagtccaggttcgcgaagccgtggagtatgagcaatatcgctag

SEQ ID NO: 179256 - DNA, 648 bp, Klebsiella oxytoca
atgcagcagctctacctttatatactgattgccagcctgaccattgccagccccgggccaggagtgcttctgacgctgaccaacaccctgaattataatctgcgtaatgcaatggcggggattatcggcgtggcggtggggatgggcgtcatatcgattattgctgccagcagcgttggcgtgatgattaccacctctcagctgacgctgttgatagtcaagggggttggggcggcctatctgatctatctgggcgtaaagctctttcgctcggtgccccgcgcgctgaatcaacctctctcttctgccgattcaacgatgccttccgccagccagcggtttcgtcagggagtactggtgtcgttgtttaatcccaaacccattgtgttttttatggcgctgtttccccagtttattcatccgcagcagccctttattccgcagttcagcgtgctgtcgataaccttctgtattctggtggttgtcattcattcactctacggccttttcgcacacagcgtaaaaacgaaaatgtcgtccgggaatgccttcgttaagctgaataaaaccggtggcatcgtgtttgtgtgttttgccgtcggtcttattgtttccgccgttcatccttatttgtcgctatcatcgtga

SEQ ID NO: 179257 - DNA, 153 bp, Klebsiella oxytoca
atgctgacaaaatacgccctggtggcaatcatcgtgctgtgtctgacagcgctgggattgacgttaatggcgcgcgattcgctgtgcgagctgagcatcaaagaacgtagtatggagttcaaggccgttctcgcttacgaaacgaagaagtag

SEQ ID NO: 179258 - DNA, 624 bp, Klebsiella oxytoca
atgcaaacccaacgttctatcattcagcttgccgatcgctcgctgcagcgtgtcgatttcgacccattgacctttcggcctgaagatctcctctggctgcctcatcatgcccggctaagcggctgcgcccgcaagcggcagagcgaacatcttgccgggcgtatcgccgcggtttatgcgctgcgggaggtcggtgagacagagatccctgccattggcgaccaacgccagcccctgtggcctgcgccgtggtacggcagcatcagccactgcgaacgcagcgcgctggcggttgtctccgccgggccggtcggcgttgatattgagcgcatcctgtctcccgccctcgcggccgagctggaaagcagcatcgtcaatagcgcggaaaaaagcctgctggacgccagcggcctgccgtcggcgctggcgctgacgctggcgttttcggcaaaagagagcgcatttaaggccagcccgcccgaaatacagaacggcgtgggtttcagcgattttgaggtgacgtatataaaggaaggaaatctgcttcttcggatctccgccggggagtatcggctgcaatggattaaggccggtgactacgtcatcacgctctgcgcgacgtaa

SEQ ID NO: 179259 - DNA, 1266 bp, Klebsiella oxytoca
gtggtcaagacgctcggctactccaacgtcaatgcgctgctgaaagcgggcctgtacggtatcaacgtcatgacctatgacttcttcggtaccccgtgggcggaaagcgtgacccaccacaccaacctgaaggcgctggaagaaggcggctggggggtggataccgttgtcggccatctgctgtccgaaggcttcccggcagagcgaatcaatattggttacgctgcctacacccgtaacgggcgcaacgcggagctggaatccctttctccgctgaagggtacctataacccgggcaccggcaccaccgtaggctccttcgaatcgggcaccaccgaatggtacgacatcatttataactacctggatctggaaaaccagaaaggccgtaacggcttcaacgtctacaccgacaaggttgccgacgcggactacctctacaaccctgacagcaaactgttcatgtccctggatacgccgcgcacggtgaaagccaagggcgaatacgccgccagcctcggcctgggcgcgctgttcacctggacaatcgaccaggacaacggcgtgctggttaacgccgcccgtgagggtctgggctatgaaatggcgtctgaaattatcgatatggagccgttctatttcgaaggcatcaacgtcgatccggcggatgaaccggaggaagaggaggaggataccgtccagcctgaaccgtcggtaaaccatgcgccgaaagccgctatcgaactgatggtggtaggcggctcccgcgtgcgtctttccggcgaaaaatcttctgatgaagataacgacgagttgacctttagctggggcgtgcccgcggcgatcaacgtcgccgataaaaccgcggcggtcattgagttcgatgtgccgaaagtggctgcggataccgagtacaccttcaccctgttcgtgcgcgatacctggggtgaaccgtcaacgcagcagcgctttgtgctctccgtcgtcgccgcgactcagaccgatgataccgaggacgagccggctgacgaccaggatcgcaccgatgatacgcctcaaccggcagatgatgatgctgttccttctgacgaaaccacgccttacccgctgtggaatgccagcaccgtctatggtagcaactggggcagctttgaaatcgtgagctggaaaggccataactaccaggtgaaatggtggtctcagggcaaccagccggatctgaactgcggtcagttccaggtctggagcgatctcggcgcgtactaa

SEQ ID NO: 179260 - DNA, 1041 bp, Klebsiella oxytoca
atgggaaaacgtaagaaccgccgcacatcggctgctcacactgttcagcacagcggcggcgcagcagctgaagcattcagcttcggcgatcctattccggttctggaccgccgcgaactcctggattatgtggaatgcgtacagatggatcgctggtacgaaccgccggtaagctttgacggactttcccgcacctaccgcgccgccgtgcatcacagctcaccgattgccgttaagcgtgacattctcagcagcacatacatcccgcaccgcctgctaagccagcaggcttttacccgttttgtgcaggattacctggtttttggtaatgcttacctggaaaagcgcactaaccggctcggtggcgtgctgtcactggagccgacccttgcgaaatacacgcggcgcggcgttgatctcgacacctactggttcgtgcaatacggcatgacctcccagccctatgaatttacgccgggaagcatttttcatctgctggagccggacattaaccaggaaatttacgggctgccaggctatctttcggccatcccgtcaaccctgctgaatgagtccgcaacgctgttccgccgaaagtattatctgaacggcagccacgcaggatttattatgtacatgaccgacgcggcacagaaccaggaggacgtgaacaacatccgccatgcgatgaaaagcgccaagggaccgggcaacttccgcaacctgtttatgtactcacccaacggaaaaaaggacggcatccagatcatcccactgtcagaagtagcggcaaaggatgagtttctgaatatcaaaaacgtgagccgtgatgacatgatggcagcgcaccgcgtccccccgcagatgatgggcatcattcccaacaataccggcgggttcggtgacgtggaaaaggccagccgcgtctttgtccgcaacgaactgatgccactgcagaagcgattgcaggagctgaataagtggctgggcgaggaggtgatccgattcgacccctatacgctggacctgcaggaagactga

SEQ ID NO: 179261 - DNA, 1674 bp, Klebsiella oxytoca
atgctgggcgagaaagccgcaaccgttcacagctggaaaaagcgcgacaaatggggctgctacggtccgcttgaccagatgcagctcaccacggccgcaaggtactgccagctgatcatgaaggagcaaaaagaagggaaggactttaaggaaattgacctgctggcgcgccagtccgagcgccacgcccgcatcgggaaatttaacaacggcggcaacgaggccgatttaaacccgaacgttgaaaaccgcaaccgcggcccccgcaaacaacctgaaaaaaacctgttcagcgacgaacagatcgaaaagctggaagagattttccgcgctggcatgttcgaatatcagcgccactggtgggaagcagggataaagcatcgtatccgcaacgtgctgaagtcccgccaaatcggggcaacgtattactttgcgcgagaggcactgatcgatgcgctggtgactggccgcaaccaaattttcctgtcagcaagtaaagctcaggcgcatgtcttcaaaggctacatcattgagttcgccaaagaggtagacgttgagctgaaaggcgatccgatggtcctgccaaacggtgccacgctgtattttctggggaccaatgcccgcaccgcgcagagctaccacggtaatctgtaccttgatgaatatttctggataccgaaattccaggagctgcgcaaagtcgcctcgggtatggcgttgcacaaaaagtggcggcaaacctatttttccactccgtccagcctgacgcacagcgcctatcccttctggtctggtgcgctgtataaccgtggtcgctcaaaatcggaccgtgtggatatcgacctgacccactcggcgctggcggcgggcctgctttgtgctgacggtcagttccggcagatcgtgacggtggaagatgccgtgcgcggcggctgtaacctgttcgacctcgaccagctgcgactggaatacagcccggacgaataccagaacctgctaatgtgcgagtttattgacgatctcgcgtccgtgttcccgctttccgacctgcaggcctgcatggtggacagctgggaggtctgggaagattttcatgccctggctctgcgaccgtttggctggggcgaggtatggatcggatatgacccggcgaaaggcacccagaacggtgacagcgccgggtgcgtcgttatcgccccgccatccgttcccggcggcaagttccgcatactggagcgccaccagtggcggggaatggacttccgcgcccaggcagaagccatccgccagctcactctgcagtacaacgtaacctatatcggcattgactccaccggcgtcggtcacggcgtctatgagaacgttaaaggctttttccctgctgtccgggagtttgtctataaccccaacgtcaaaaacgccctggtgctcaaggcatacgacatcatcagccaccgccgcattgagtttgacgccggtcataccgatatcgcgcagtcattcatggctatccgccggaccactaccgccagcggaaaccgccccacctacgaagccagccgcagcgaagaagccagccacgcagatttggcctgggcaacgatgcacgcactatttaacgaaccgctgcagggcgaagccgccaataccagcaacatcgtggagattttttga

SEQ ID NO: 179262 - DNA, 834 bp, Klebsiella oxytoca
atggcagttaaagcaaaacgcttccgcattggtgtggaaggggcaacaaccgacgggcgcaccattgagcgcgcctggctggagcagatggcggccagttataacccgcaggtctatacggcgctgattaatctggaacatatcaagggctacaccccggacagtccattccgccgcttcgggaccgtggataagctggaggccgaagaaattgcggatggcccgctgaaggggaaaatggccctgtatgcgtggatcaccccgtcagatgatctggtggcgtataccagcaagctgcaaaagctgttcacctcgatggaggtcaataccagttttgctgataccggcaaagcgtacctggttggcctggcagcgactgacgacccggcaagcctgggtacagaaatgttgcagtttagcgccagcgccaaaagcaacccgctggccgggcgcaaacaaagcccggaaaacctctttaccgccgcagaagaaacgctgatcgagtgggaagaggtccagaacgataaaccctccctttttgcccgcgttaccgcgatgtttgccaaaaaatcgcagaccgatgatgcgcgtttttctgatgtgcatcgtgctgttgagctggtcgctaccgagcagcagagcctgagcgaacgcaccgatcaatccctgtccgcgcagggtaagcgccttgctgcgctggaaacctcccttcaggagcagcagaccgcctttgcggaactggagcagcaactgcaacaggaagacagccgcaaagattatcgccagcgcgcgccgggcggtaacgcgccggcaggcaccctgaccaattgctga

SEQ ID NO: 179263 - DNA, 1053 bp, Klebsiella oxytoca
atgaaaaagaaaacacgttttgcctttaacgcctacctgcagcagctggcgcgcctgaatggcgtagaagttgaggagctgtccagcaagttcaccgtggaaccatcggtgcagcagacactggaagaccagatccagcagtccgccgcattcctgaccatgattaacatcattggggtgactgagcaatcaggccagttgctggggctgggcgtcggcagcaccattgccgggacgactgacacgaccacgaaggagcgcgaaccaaccgatccgacggtcatggttgatgttgagtacaagtgcgagcagaccaactttgatacggtgctgacctacgcaaaacttgatctgtgggcgaaattccaggatttccaggtgcgcatccgtaacgccatcgttaagcgccaggcgctggaccgcatcatgatcgggttcaacggtgtgaagcgtgccaaaacctcaaaccgagtcgataacccgctgctgcaggatgttaataaaggctggctgcagaaagtccgcgaagatgcggcagattgcgtgatgggcagcaccacggcagaagatggcaccaccaccgcagacccggtgaaggtaggcaagggcggtaaatatgccaacctggatgcactggtgatggatgccgttaatgagctgattgacccgattttccaggatgatgctgatttggtcgtgatctgtggtcgtgagctgctgtccgacaagtatttcccgctggtcaataaggagcaggaaaacagcgaaaaactggccgctgatctgattatcagccagaaacgcatgggtggcctgcaggctgtccgcgccccgtcattcccggctaatgccgtgctgatcacccgtctggataacctgtccatctactggcaggaagatacccgccgccgttcggtcattgataacccgaaacgcgatcgcatcgaaaacttcgaatccgtcaacgaggcgtatgtggtggaggattaccgctgcgtggcactggtggaaaacatcagtattggcgatttcagcgccggagaaggggagtaa

SEQ ID NO: 179264 - DNA, 654 bp, Klebsiella oxytoca
atgagcctgagtcccgcacggcagcaccgcctgcgcgttcaggctgaacaggccgcccgtcagggcggcagtgttcgccatgcgtcggggtatgacctgatgctgctgcagctggcggaggaccgccgccgcctcaagggggtgcagtccacagtgaaaaaggcacaaatcaaggtggagctgttacccaaatataccgcctgggcggatggtgttctggcagccggtggagcgcagcaggatgacgtgctgatgtttctgatggtctggcgtatcgatgccggtgattttgccggtggcctacagattgccgcgcacgcgcttaagcatggttgggtgatgccgcaggcgctgggccgccgcaacgtgcagaccgttgttgctgaggagcttgcagatcaggcggaggccgcgcagcgcatgaaagctgaattccctgctgacgtgctgctgcaggcgctttcgctgacggatgcgctggacatgccggaccagtcccgcgcccggctgcataaagctatcgccgccgtgatcagcgagtcccgccccgccgcagccctgaaccactacacgtttgcgctgcagctcgatccccgctgcggtgtgaaaaaagacaaagagcggctggagcgtcatttgcgtaacagccactaa

SEQ ID NO: 179265 - DNA, 465 bp, Klebsiella oxytoca
atgagatttgttgcgccagagcaggcgccggaacaggcggaggtcatcaaaaacaccccattctggcccgatgtggatttgtcggattttcgcagcgtgatgcgaacggatggcacggtgacgtcgccgcgtctcgggcagcttatccggtctgctatgtcggaggtcaacgcggagctgtacgaattccgcaagcgccagcagtcgctggggtttcagaccctggcagacgtaccggcggaagcgctggacggcaaaagcgagcgcatccaccactaccataacgccgtgtattgctgggcgcgtgcgcaggtgaatgagcggtaccaggactacgacgccacggcatccggcgtcaagcgaggcgatgagctgacggaggccagcggcgatctgtggcgtgatgcccgctgggcaatcagccgggtgcaggatgcgccccactgtacggtggagctgatctga

SEQ ID NO: 179266 - DNA, 204 bp, Klebsiella oxytoca
atgaaagtgcgtgcgtaccagggtgacacggtggatgcgctttgctggcgtcattacgggcgcacgcagggcgtcacagagcaggtactgcaggcaaatccggggctggctgagcatggcccttttttacctcacgggctgcaggtggagctgccggatattgcgaccactaccacggtgcagaccgtccagttatgggactga

SEQ ID NO: 179267 - DNA, 216 bp, Klebsiella oxytoca
atgacgcttgaacggatcagcgcctttattacgtactgcattgctgtactgctggcgtggatgggagatttatcgcttaaagacgcctctacggtgggcggtgtgctgattggtctgctgatgctggcgatcaactggtactacaaacacaaaacctatcagctgctacgcggcgggaagataactcagggggaatatgaatccttcaatcgttaa

SEQ ID NO: 179268 - DNA, 510 bp, Klebsiella oxytoca
atgaatccttcaatcgttaagcgctgccttgtcggggcggtgctggctatcgccgccacgctgcccggtttccagcagctccacacctccgttgaggggctaaaactgatagccgattacgagggatgccgcctgcagccgtaccagtgcgacgctggcgtgtggaccgatggcatcggtaacacgtcgggcgtggtgccggggaaaaccatcacagagcgacaggcggcggggaacttcatcaccaatgtattacgagttgaaaccgccctggcgcggtgtgtcctggtgaacgtgccgcagtacgtttatgacgccctggtgtcgctggcgttcaacgtcggcacgggcaatgcctgcagctcaaccatggtgaagtttatcaatcagaagcgctggcgcgatgcctgctatcagctgccgcgctgggtatatgtcaaaggcatatttaatcaggggctggataaccgccgggggcgggagctggcctggtgcttaaaaggagcgtaa

SEQ ID NO: 179269 - DNA, 384 bp, Klebsiella oxytoca
atgaaaaagaaatttatcagtgggttgctttcggtgctgtacgcggcgctgatgattttaagtctctttgtccccaacggcatggcctcggcgctggtcactgcattgacctgggtcgcctgtttgctggtctgggtggcggtgctgctttgcctggccgggtggtatgcgggcggcactcatcgggaagaagcaaagcaggcgctgacgcgctttttcagtacgccaggaaacaatgtgatcagatgggccaggcgttcactgcttgtgatttttctcgcctttacgggccacgttgtcaccctggcattttatctgctgacgctggtcgcgcttaaggttctgcgtgcgcaggttgttgatgcgcagccggtgacggtatga

SEQ ID NO: 179270 - DNA, 429 bp, Klebsiella oxytoca
atgacgcgcgcgctggcggtaattcttgcgctcgtactggcggcgctgggctggcagtcatggcgactgaatgaggccagccgcaccatcgatcagcaaggcggggacctgaaaacggcgggcgacaaactggcaaaaacgaacagccagctgatcgccctgtccatcctgaccgaaaccaacaaccgggaacaggcgcggctttacgcggcggcagaaagtacaaacgcgctgctgcgaagccgtcagcgccggattgaggagctaaaacgtgaaaacgaggatttgcgccgctgggctggtactcctttgcctcctgacattatcaggatgcgcgaacgtccggccctcgccggaggtgcagcttaccgtgaatggttgtcccagggtgacgcagtgccgcctggaaaagtcagcggcacgcactaa

SEQ ID NO: 179271 - DNA, 432 bp, Klebsiella oxytoca
gtgaacaaacctcagtccctacgcctcgccctgaataaagccgtggcgtatgtccgggacaacccggacaaactgcatttattcgtggataacggatcggtggtggcaaccggcgcggcgtcgttgtcctgggagtatcgctataccctgaatgtggtggtcgttgatttcagcggcgatcagggattactgatggctcccgtgctggcctggctgatggagaatcagcccgatgccattcataacccggaactgcgtgaaaagctgtttacgtttgaggtcgatatcttgcgcaatgatatctgcgatatcagcctgaatctgcaactgacagagcgcgtgatcgtcagtgctgacggtgacgtgtccagcgttgaagcggtgccagaaccggacgaaccggacgaaatgtgggcggtgcgccgtggctga

SEQ ID NO: 179272 - DNA, 447 bp, Klebsiella oxytoca
gtggctgagttgcaggaagttgacgcctggttagatgcgctgctggcggggctggagcctgccgcacgtaagcgcatgatgcgggatctggcgcagcagctgcgccgcagccagcagaaaaatatcaggatgcagcgtaacccggacggcacggcatacgaaccacggcgggtaacggcacgcacgaaaactggccgcgtacgtcggcaaatgtttgccaaactccgcaccgcaaaatacctgaaagccgttgccagcccggactctgccagtgtcgagtttgagggcagggtgcagcgcattgcccgcgttcatcattacggtctgcgtgaccgtgttagccgcagagggccggaggtgcagtattcgcagcgccggttactcggcatcaatgatgaagtggaggacattacgcgcgacacgctattgcgctggctgtctgactga

SEQ ID NO: 179273 - DNA, 573 bp, Klebsiella oxytoca
atgaatacccaattaaccgaaatcatgcgcctcatcaccaatctgatccgcaccggcattgtgaccgaggtggaccgggacggctggctttgccgggtgaaaactggcgacctcgaaaccaactggattaactggctgacctaccgcgccggtaaatcccgcacctggtggtgtccgtcgccgggggagcaggtggtgctgttcagcctgggcggcaatctggagacggcttttgcgcttccggccatctactccgacgcgtgcccgccgccgtccgactctgaaagcgcggacgtgaccgcatacgaggatggcggttggttcgaatacgacccggccaccggccgctggataatccggggtgttaaagccgtgcttatcgaatcctcgcagctggtttcctgcaaaacaggggagtttgtgatcgaggctgacacgacccgtattaacagcagcgtgatcctgaatggcgatgtgacccatggcggcggggaaatgacctcaaacggtatcgttgccgataagcataaacaccctggcgacagtggcgggacgacgggaggcccaatttga

SEQ ID NO: 179274 - DNA, 363 bp, Klebsiella oxytoca
ttgacgctctatatcgggatgaaccgcgagaccggcaaggccattacggaaaccgatcacctgcgccagtccgtgcgggatattttgctgacgccgcagggcagccgccttgctcgccgggaatacggttccctgctgtctgcgctgattgaccagccgcaaaacccggcgctgcgcctgcagatcatggcggcggtgtacgtcgcgttgcagcgctgggagccgcggctgcagctcgacaccatcacgattaacagcagcagcatggatggcgcaatggtgattgagctggcaggtcagcgcaatgacggcgtgccggtatccctttccgtatcgacaggagcagccaatggcagttattga

SEQ ID NO: 179275 - DNA, 909 bp, Klebsiella oxytoca
atggcagttattgacctttcccaactgccgccaccgcagatcgtggatgagccggattttgaaaccctgctgacagagcgtaaggcggagtttgtcgcgctctatccggcagaagagcaggaagccgtagcccgtaccttaacgcttgagtcagagccaatcgtaaaaacgctgcaggaaaacgtgtaccgggagctgctgctgcgccagcggattaacgaggcggcaaaggccgtcatggtggcctattccggcagtgatgacctggataatttaggcgctaacaataacgtgcagcggcgggtaatcacccccgcagacgataccaccacgccgcctactgaggcggaaatggaatcggacgcggattatcgccagcgcatcccggcggcctttgaggggatgagcgttgccggtcctgtcggcgcgtatgaatatcacgcccttagctcggatggtcgggtggccgatgcttcggcgttcagtccgtccccggcggaagtggtggtgacggttctggcccgcgacggtgatggcaccgcgccggatgatttgctgcaggtggtcgggactgccctgaatgatgaggccgtgcgccctgtagcggaccgggtgagcgtgcgatctgctgagattatccgctatgaaattgatgcggttttgtatgtttaccccggtccggcgaaggagccgattctggcggcggcgaaagcgcagggcgtggcatatatcaacgagcagcgccgcctggggcgtgacgtcaggctgtccgcgatttatgccgcattgcatgtgcagggcgtgcagcgcgtcgagctgatgaagcccctggctgacatggtgttagataaaacgcaggcttccttctgcaccgactttaaagcagaaattggtggctctgatgaatag

SEQ ID NO: 179276 - DNA, 606 bp, Klebsiella oxytoca
atgaatagcctgttaccgccgggatcgtccgcactggagcgcaggctggcgcaggcatgttctggaatcagcgatttaaacgtgccgctgcgtgacctgtggaacccgtggaaatgcccggcaaagttcctaccctatctggcgtgggcgttttctgtggaccgctgggaggaaacgtggacggaaaccgcaaagcggcaggctgtcagcgatgcgttctggatacatcaacgcaagggaactgtggcggcggttaagcgggtgatcgaggggctgggctactcaatggccattgatgagtggtgggaggtcgcagaccctgcaggcacattccggcttgaaatcgatctcaatgaaataggcataaccgagccaatgattagcgagcttgagcgaattatcggggatgcaaagccagtgagtcgccatatatcacaactgacactttccgtcagtgcaagaggtacagccagcgtcggcgcggtggtgatggatggcgaagtcatcacggtatatccggcggggtacgggccggatgacgcgatctattttgacggggaaacccattacgacggaaattatcattattcgggtatgaaagaatga

SEQ ID NO: 179277 - DNA, 3450 bp, Klebsiella oxytoca
atgaacatcaacgaatcagcgcaatgggcaaatactatcaggatgctgacccggcaggacagggtcgaaggggggctggggggcgtggcaaacgagcaggctacgcaactggccgcccgcacgcagtaccttaagcaggctattgaggctttcgacagcctggtgaaatcgggtgagtctccctattccagcgaagcggaagccagcgccgctatcgctgccggtaaaatcgccgaaggggcgttatttgccgttcgttcggccagttcgtttttatgggttgatgaatataaaaatgtgggcggaatcgcaacgccgacggggaaacacttaccctccagcctgctgaccacacccacattcagcccggacgataccgaccctgacggcacggtgacgggggtttctgtcactgcagcggggcagtatttctgcgtgcgttccggcaacccggatttaccactggcgctgtggagaaataacaacggtacggcggagcgggtatttgatattcctgatggccggattatgccggagttttccgccctgtctgcgggaacgctttaccgtcgcgttgacctggaatcgccgctcctgaaaggggtgtattacgaggggggcgtaaagaaaaccgatggcgataccacctgggacacctcgcttatcagcgttgctgccggagacctgataaagctgacaggcgttgtcggctcctatacccgccaggagtcacgcgcggtcatgacgcagcttgacgcgacaggtgcctgggtgtccacgctggccgctgtgcgcagccaggccgcgccgttccacaccaccgtttatgctgttgcgcaggtgtccggctatgtcgcggtgacgtatcgtgcagactccccgaatctcggcgcaaacgtggtgtatcgcaatacccgtaaaatcatcaccgatgcaacccttggcgcagaactccagtcccggctcactgacgcccgcaggtacggcgcagggattgattacaccagtacggttcgtaccttttccggtgcgcgctacctgtctgatggcacactggaaacaggtaagggtaacgcctatgccgtaatgtacgttccagtcagtgccggagatgtggtgagactgtccggggcggcgggtgtggcatcacgcgcggaagtgattcctgtcctggtacagactgacccttcgcgccggttcgtctctgtgttgcagtccgtgacctctgacggcaactactcgaaaggcgacttttacgccgtggcggcacagaccggttatattgccgtctgctggcgcgtcatcgccggtatcaccaccgccgtgaccagattcccccgcctgctggactaccgtagcggcattgcggataccgtgttgcgcccggtgacgcatgaggcgaccatcacgcgcggccagcgtatgacgatggccggtgtggcggaggcggccagcggctggtttattgccacgctcccggtcagaagcggggatgatgttgccattgatgcgctgcatgattcgttctcaaaggatataacaccggttatctgccagttcgacagcaaaaaagcctttgtgtcggtgctgtgccagttcaccaataccggcgcggggccgaaccgtgacacgtttatcgccaccgccagccaggatggttatgttgcggtcactgcccgcctgaccggtaatgcgccgtttactctgttcgcctcccggcaggcattctgtgacccgctggatatctggctggaacagcagactgacgccagcggagaggctgattacaccctggttaacaaatacgaggttaacaacacggtcattgacagcgaatttgccctgctgacggacgccagctggcgcacggtctgggtgcccgtccgtcgtggtgagtctgtttcggcctacacggccaccggagccgctgcgaccggcgaaacccccgccgccgacgggtctgtgccggtcatgattcagtacgacacccgccgggcaaaccccgttattcgcgcaaccgcaagcggaaccgggtcactcaccggttatcagaccgtgtcggcgaaagcgacggcggatggctttatggcggtacgcctttatgcagcagaccggggctggccgacagtcaagcgcctggcggcaaaaaatggttcagattccggcgtcgcatcgcttcccgtcgtaccggggcagttcgaacgcctgccggttaatgcggacactaactgggattacaacaacagcccgtactcacaggataacgttgtgattgcaggggattatcagtacgcggtggtgattggcgcgggacgggtgccgtacatcgtccagcgcagcaaatggggcggtgcctggctggccgtttttgacctcggcacgattgccggtaatccgctggcctcgccgaccactgccgacggtcataacgtctataacatcggtgtcagtaaaaacggccatattatcgtcgccgggaatatgcacggtgatggtccgcgcgcggttgtgtcggataatccgcacaatatcaccgcatggacggcggtggatttctcggcgggaatgttcacgaaagacgtgacctatccgcatttcatcagctaccccgatggtacgctgcaatgctattaccgctggggcgtgcgtcactatctgacaacctatgatgagtccacaaaaacgtttatcaccccgcgtcacattgtcggggcgaaagcggacggcaggggcgggccgtatgagcaaaaatacgttgtcgataacgacggtattctgcacgcgtgctggggctaccggatggatgccacctctgcgctggcgaatgagggtctgtactattctcagtctgctgataagggggcgacctggcgcgcggcggatggctctgtcatttcggcggcaggcacgcgcaacgatgcaaactcaacccggattttcagcgcggaaaccggcagcggctacgtcaaccagaacggcggttgtgtcgatattcacgggcattaccacacctgcctgacgcagtacgacgataacggcaatacccagattgtgcatgtgtggtgggacggttcggcgtggaaatcagaggttgtcacggattttgatttcaggatgaatctgtcgagcaacctggtcatgaatgatatcacccgcccggttatcggcgcgacgccatcgggccgggtttatatcatctatcacaccacgtacaacggcctgagcggagccattatggcggttgatgttaccgatgagggcaatcctcagtcgatggtggttgcggcgtttgatatcggtactcagtcgatggggttcaacgtggcgcatatgctgaaaaccggtgattttatggcgctgatggcgaaaggtgttgcgaacagcagttcaccgggttacggctcattcagcgcccagcctgtcatgctcgccaccgtcccgatgccgtaa

SEQ ID NO: 179278 - DNA, 1038 bp, Klebsiella oxytoca
atgaaagcctatcagacagtactgacagccgccggtgaggccaggtttgcgaatgcggcgctgaccggagagaccgtgggctttgcgtggatggccgtcggagatggcggcggcgatgttcccgctcccgacccggcacagacgggattgattaacgaatgctatcgcgccccgctgaaccgactggtgattgcagaccagggggcaaatgttattcgcgcagaaatgattatgctcccgcaggtggggggcttctggttgcgggaggcgtcactcctggatgatgacggggtctgtctggctgtcgccagtcttcccccgtcctacaagccgctactggccgagggttcaggacggcttcaggccgtcaatctgtggattgccgtcagtaataccgcagacgtggaactgaagaccgaccccggcgttatactggccaccgttgaggaagtgacccgcgcaaaaaatgaggcaaaggattataccgatgcggtgatagcgcaggccatcaccgcggcaaagcgggagttctgggaagaggacaacccggtcggcacggtgaagttttacgcgcagaacgtcaaccctaacgagcgatatccgtggtcggagtgggtttataccggcgaaaacaaaacaattcgcatcggcaaggctgatggatcggacgtcgccaccaccggcggcagtgatagcgtggccattgaacgcgctaatttgcccgccgtgcagattgatgtcaccggggaaaccagcgaacagcctgagcagacgctgaccacgaaacccgccggtaagcacaaacatggcggcgtgccgagccgggagaacccgtgggaaatcggcggtgatatcagccagcgctttaacccggcaaacctgggcgataccgacgaagccccggatcatgagcatgatattgatattccaccgcatcgccatgaagtcgccggcaaaaccgccaacctcggcgaaggaaaatcgttcagcgtggtggaagcccacaccctgctgatgtgctggagccgcgttgcctga

SEQ ID NO: 179279 - DNA, 1173 bp, Klebsiella oxytoca
atggcgcaagactaccaccacggcgtgcgcgttgtagaagttaacgacggcacccgctctatcacgacggtgagcacggcgatcgtgggcatggtgtgcaccggcgatgatgccgatgcctccatgttcccgctcaataagccggtactgctgaccgatgtactgaccgccagcggcaaagcgggcgagtccggcacgctggcccgctcactggacgcgatcgccgaccaggcaaaacccgtcaccgtagtggtgcgcgttgcccagggcgaaaccgaagcggaaacatccgcaaacatcatcggcggcgtgaccgctgacggtaagaaaaccggcatgaaggccttactttcggcgcagtcgcagctgggtgtgaagccgcgcattctcggcgtgccggggcatgatacgcaggccgtatccactgagctgttaagcgtggcgcagagcctgcgggcctttgcctatatgtcggcgtacggctgtaagacggtggaggatgcgatcgcctaccgcgacaacttcagccagcgtgaagggatgctgatctggcctgacttcatcaactttgacacggtactgcaggcggatgcgaccgcctacgccaccgcccgcgcccttggcctgcgcgccaaaatcgacgagcaaaccggctggcacaaaaccctgtctaacgtgggcgtcaacggcgtaaccggattatctgcggatgtgttctgggacctgcaggacccggcaaccgatgccggactgctgaaccagaatgacgtcaccacgttgatccgcaaggacggttttcgcttctggggttcccgctgcctcagtgatgatccgctgttccagtttgaaaactacacccgcaccgcgcaggtgctggctgacactatggcagaaggtcatatgtgggcggtggacatgccgcttaacccgtcgctggcccgcgacattatcgaaggcatccgcgccaaaatgcgcagcctggtgaatcagggctacctcatcggcggtgattgctggattgatgacagcgttaacgacaaagacaccctgaaggccgggaagctctggatcgactacgactacacgccagtgccgccactggaaaacctgatgctgcgccagcgcatcactgaccgttacctggtggatttcaccacccgcgtaagcgcataa

SEQ ID NO: 179280 - DNA, 516 bp, Klebsiella oxytoca
atggccttaccacgcaaattaaaacacctgaacatcttcaacgccggtaacagctggatgggcattgctgaatccgtcaccctgccgaaattttcccgcaagcttgagaactatcgcggcggcggtatgcccggttcagtcggtatcgatctggggctggatgatggggcactggatacggaaatgacaatcggcggcactgaggcgctgctgtttaaacagatgggtaaagccacggttgacggggtgcagatgcgattcaccggctctatccagcgcgatgacacaggcgaggtgcaggccgttgagctggttgtacgcggacgccacaaagaggtggattccggcgagtggaaaaccggcgagagcaataccaccaaagtcagcagcgttaacagttacgcgaagctgaccattaacggcgaagtgctctatgaggtcgatgtgatcaacatgattgaaattgttgatggcgttgacctgatggaagagcaccgaaacgccatcggcctttaa

SEQ ID NO: 179281 - DNA, 300 bp, Klebsiella oxytoca
atgagtgagaaaacagaagcaacggtgaagctggatagcccgatcaagcgcggtgataccacgattacggaaattgtgctgcgtaaaccgcaatccggcgcgctgcgcggtacgcgactgcaggcggtgatggagatggacgtggcctctatgatgaccgtgatcccccgcatctccacaccaacgctgaccccgcaggaaatggcggacctcgacccggctgaccttgccgcaatgtcgatcgaggttgtcctttttttgttgccgaagtcggcgtttgccgatttgccgacagcctga

SEQ ID NO: 179282 - DNA, 2628 bp, Klebsiella oxytoca
atgagtgataaaaacctgcgtctgcaggtagttctgaatgcggttgataaacttacccgccctttaaaagttgcgcaggctggctctaaggagctggcctccgccgtccggcagacccgcgaacagcttaaacggctgaacgatgcggggggccagttaaaatccttcgatcagctgtcacagagcctgagccggaccagtaacgaactggaccaggcgcggctgcgtgcgcagatgatgacccgcgaaatgtcagccctggaatctccgacgaaaaagcagacggcggcgcttgaaacgcaatggcgggctgtgtcacgcctggagcaaaagcaggggcaggaaacgcggcagatggcggcagccagggcggagctgtaccgcctcggcatctctgcgggcggcggtgcccgtgaaacggcacgcattacccgcgaaacggatcgctataacaaacagctggcagagcaggagcgacgcctgcgggacgtgggcgagcgccagcgcaagctgaatgcagtcagggccaaagcggacaagatgcgcgacgtgcgtaacagcctggcagggaacggggcaggcatgatggcggctggggtgacaacgggcgcaacgctgctggcccccattcgcgcctactcggaatcagagaacgcggctaaccagctggcaggctctatgatggggccgggcggaaaggttgcgccggagtttgagaagctaaacaagctggcgatcgccctgggggaccggctgcccggcaccacggcagattttcagaacatgatgaccatgttacgccgtcagggcatgtcggcgcaggtcatcctgggcgggctgggtgagtcggcggcgtatctcggcgtgcagctgcaaatggccccgacggatgcggcagagtttgccgcgaaactgcaggacgccacgcagaccaccgaaaaagacatgatgagcctgatggacgtgatccagcggggttattacgcgggcgttgaccctggcaatatgctgcaaggtttttcgaacattggtagtgcaatggatattatccgtcagaagggattgggggcaacgaaggtatttgcaccattgcttgtgatggcggatcagatggggatggctggcgagtcagcggggaatgcctaccgtaaaatattccaggctgtcatggataccaaaaaagttaataaagccaatgcttcaattaaaggggctggggttaaattagattttactgacggaaaaggagagtttggtggactggataagctattttcccagcttgaaaagttaaaaaaattaaacacggagcaaaggcttgcggcacttaaaacggtatttggtgatgatgccgaaacgctaaaagtattgaataacatgatcagtaaagggatgtctggttatcgtgaaacagtagcgaagctggagaaccaggcaactttgcgcgagcgcgtcgatgcgtcgcttaataccctgggcaacaaatgggaggccgctggcggctcctttactaacgccatggcaagcatcggtgaaaccgtcgctccggtactgaaaaatattgcggactggctgggtaatctggcgtccgctctggatgggtttgttaaacggcatccgcaattgacggcggcgctgtttaagattgcggccgtgtttgccgtcgttgcgacagctgcaggtgtggcgtcactggctctggcatctattctggggccgatggcggtagtgcgggtaagtgctggcatcctccagcttaaatttgcttctgtgtttggtctggtcacaaaagtcatcggcggtgcgggccaggcgatcctgtggctgggcaggttgatgatggctaaccccattctggcgataattggcctgattgcgatgggagccatttatatctggcagaactgggaaacgctggggccaaaattcaaagcaatgtgggacaccatctcctccggggtatccagggtatgggctgtgattaagcagaccatcagcagcaaatgggatgaaattctgagtgatgtcgccgcgctgcccgcgaagtttaaagcagtgggcggcgcgatcattgacggcatcctgagcggtatcaatgagaagtgggaaacgctcaagagcaagctggcatcggtgaaaagctacctgccggactggatgaccggcggggacaaatcgccaggtacaccccagcaaaaaggcgcaggcggatttttcgcggggatgtatgacagcggcggctatattccacgcgggcaggtgggcatcgctggagagaatggcccggaactgattaacggcccagcctatgtgaccagccgtcggaagactgcagcgctggcgtccgttgtcgccggaatgatggggggagctatgcctgcagaggctgcgccgcttcatccaatgagcctgccggcagcctcctatcgcccagcagcagaaaaaccggcaggtacgcagccggtattccagtttgaaacccaggcacaaattattatccaggtgcaaccagggcagagtccgcaggatattgcgcgggaggttgcgcgacagctcgatgagcgtgagcgccgcatgagggctaaggcccgcagcaatttcagcgatcaaggggggtacgattcatga

SEQ ID NO: 179283 - DNA, 486 bp, Klebsiella oxytoca
atgatgatggttctgggcctgtttgtgtttcagctgcgaacggttccctatcagcaactccagtatcagcggaactggcggcatgtgaccaacaaccgcgttaatcgccgtccgacaacgcagtttttggggccagataacgatcagctgacgctctccggcgtcctcatgccggaagtgaccggcggcaggttgtctctgctggcgctggagctgatggcggagcagggaaaggcctggccgctgatcgagggtggcgggaccatctacggtatgtacgtgattgaaaacctgagccagacaaaaacggaatttttcgccagcggtgaagcgagaaaaatagagttttcgctggggctaaagcgtgttgatgagtcgctgtccgaaatgttcggcagcctgagtgaccagcttagcagcctgcaggattccgcagcggcagcggtagggaatatcaaaaccacggtaggagggttgctgcagtga

SEQ ID NO: 179284 - DNA, 1095 bp, Klebsiella oxytoca
gtgagcgagatgactgatttactcaacctcagcaagaccccggcctttcgcatcgtgatagaaggcaaggatgcaacgcagacactggataagcgcctgctgggtatgacgttgaccgacaaccgcggatttgaagccgaccagctcgatctggagctggacgacgccgacggccttgtgattatgccgcgtcgtggcgcggtgatttctctggcgctgggatggaaaggcgagccgctgttttcaaaagggaagtttaccgttgatgagatcgagcatagcggcagcccggaccgactgacaatccgtgcccgtagcgcagacttcagggaaacgctgaatgtacggcgtgaaaagtcgtggcataaaacgacggtgggcgaggtggtgaaggaaattgctaggcggcacagccttagggttgctatcggcaaagatatagcggagcagacgctggatcacctggaccagaccaacgaaagcgacgccagctttttgatgaagctggcgcggcagtatggcgcgattgcttcggttaaggacagtaaccttctgtttatccggcaggggcaggggaaaacggccagcggtaaagcgctgccggtcatcactattacccgtcgggacggtgacagtcatcgcttcagcctggcggacaggggagcgtataccggggtgatagctcactggctgcatacgcgggaaccggaaaagaaagaaacggctaaggtgaagcgccgccggaaaacgacaaaaccaaaagagccagaagcaaagcagggggattacctgatcgggacggatgagaacgtgctggttctgaaccggacctatgcgaaccgcagtaatgcggagcgtgcagcaaaaatgaactgggagcggctgcagcgcggtgtggcgtcattttccctgcagctggcagaaggccgcgcagatctctatacggaaatgcccgtgaaggtcaccggctttaaacaacccattgatgatgccagctggaccatcaccacgttaacgcacacggtcaacccggatagcggatttacgaccagcatcgaactggaagtgaaaatagatgatctcaatattgaatag

SEQ ID NO: 179285 - DNA, 357 bp, Klebsiella oxytoca
atgcccctgcccgcttgttgccggatgtggcggggcattatcaattacacctggcgtcatgatgaacctcacgacggtttcgtgagtaataaatgtagtaccgcaattaatattctggcactggcaataccgctcttttgtctggtctgttactcgaaagctacttcgtgtatgcgccgcatgtccgcattttgggcaattcatcatttccgtttctccgccgccgcctctgaagtcgcgttaataatacacaacatcaatattgagaaccaactattcaatattgagatcatctattttcacttccagttcgatgctggtcgtaaatccgctatccgggttgaccgtgtgcgttaa

SEQ ID NO: 179286 - DNA, 378 bp, Klebsiella oxytoca
atgaaaaaatctctttttatgctgatacttttgacctcatgcaacgctttcgccgacaaaatcccgaactctattgagactctaattgctgtgttcgacaccaggacgcatagcctagaaagcggcgtactctcgatcaaatacagcaaacagaaattgcacattgatgcggctgatgcaatgtttgaaggcatttgcactgacctatcaatgcataagtggaaacccgaaacaattaagaagattaggctactcaacgtctcacttgatcaaggttttgagatagatgccggcggtgctgaatgtaaaaagacgggtaagatgacttttgatgaagcgcgggcttacaggcaaggctttatcaaacctattccgtaa

SEQ ID NO: 179287 - DNA, 438 bp, Klebsiella oxytoca
gtggtcagcaatatttttcatcactcagcattacaacggcgggccgtatggctggcgctgtttgcgatcctgctgatcgtggtggcgccgttgatctccatctccctgcaaaaagatccgatgaatggcatgcaccacgcaatgatggggatgccggaaggtatgccatcacatcagatgtccatgactcataccgatgcctcgatgccggaacacgcgcacagcgtgccgctcgatcatgctgaagcctgtggctactgcgtactgttagctcatgttccgggcctgattttcgcgctggtgctgctgctcagcctgatgcttcgacgccagcgagccccggtttcacgcccggagaggaaacgctggcatgactttacctggctttatccccacacccgcgcgccaccgcgcccgtctgctttctcccttacataa

SEQ ID NO: 179288 - DNA, 1371 bp, Klebsiella oxytoca
atgactacctgcacctcgcgcgcggcatggctgaacctgctgcgtcgtcttcatttctatatcggattgtttatcgggccgtttatttttgtggcggccctgaccggtacgctatatgtcgccacccctcagctggaaaactggctctatcgtgatgctctgtacggtacgttgactggggaaaaacagccgctaagcgcgcaaattaccgtagcgacggaggccattcagggaaacctccgcctgcatgcggttcggccggggataatggctggcgatacgacccgagtgatgtttattgacccgacccttggcgagtcggaaacgcgggcaatttttgtcgatccggtgacgctacgggtgacaggcgatatgccggtttacggcaccagcggtattttgcccctgcgtcagtggattgattatgcccatcgctctttgctgctgggtaacttcggccgactgtacagcgagctggcagcctcctggatgtgggttgccgctctgggcgggatcgcgctgtggtcgatgacccggccgcgtcgtcgcataaataacagcgtgcagaataaccgccgcctgcacgtttctctcggctgggtgctgctggtcggtatgttgttattctctgcgaccggtttaacctggtcgcaatgggccggtagtcacgtcgataggatgcgtgccgcctttggctggctgacgccgcaggtgaatacccagctggaaagcgccgctccggccgctcacgatccgcatgccgaacatcatgtgggacatggagcgatgggggagatgacggcgcagttgcgcgtagaggattttgacccggttctgctggctgcccgcgcggcggggctggatgccggcaagctggagattcgaccgccgtcgggtgccgggcgcgcgtggacggtaaatgaaatcgacagaagctggccaacccgggttgatgctgtcgcgatcgatggtgcaacgatgcaaatcgtggaccgcactcatttttccgactttccgctcatggctaagctgacccgctggggcgttgatttccatatgggaattttgttcggtcttgctaaccagctactgcttatcgcattcggaaccgcactctgcgtgatgatagcggtggggtaccggctgtggtggattcgtcgcccggcgcgcgcggcgtttaacccggccaatacgttgatacaggcgtggtttggcttagcgtggcccgctcgtttgctgactgctgttattgcggtgttgttgggcctggcgctgccgctcatggggagcagcctcgtgctatgtctcgccgttgattatctgcgctggcgctcagcaacggcggtgatagcggctaaaccagtcgaatag

SEQ ID NO: 179289 - DNA, 972 bp, Klebsiella oxytoca
gtgtctattaaagaaataagctttctttcatcaaataatcgagattctgtccaagcttggaaatatacccctcttggaaaacccagaggaattattcagttgatccatggttttggtgaacactccagaagatatttacacatgatctcaacatttaatgatgctggatttattgtttacgctgatgaccatatcggacatggcaaaacagccttaggaaataatacatttggtgacccgggaaatacggggggatttatgacctatctgcaagatgaacgtagactccatgatattgcagtcggtgaacatcctgaattaccttattttatttttggacatagttggggctctatgctggcgaggggctatgcggctaattttggcgaggacattactggtttgatgctctgtggcatttgtgcccaaatggaaggttgtattatcgagtttcgaaagaaagatttagctgaagaaattaagaatggtaaaggtttaaataaagatgatggtacatggtttaatcgtgtatttctgaatatgacacaacgtatagaaaattcatattcagaagctgattggattgccaatgacccagacgtgttagaagatcatgcaaatgatccatttaactgtatgcaacctactctccagcttttatctgatcttgttgatttacatggctatatatctaaaccagaatgggcattaaaaatcccatcgcaactgccatgttatcttatttctggtagcgaggatccttgtgggaattttggggaaggaacctatcatgtagctaatgaactagtaaaaagtggaaatcgcgatgtaatggtgaaagtttatccaggatatcgacatgagattcataatgaaagaagtatcaggggagaagttgagcaaggcttagttgattttataaattcctgtattgctaaaacaagtaaaaatccttccaagaaggttagctaa

SEQ ID NO: 179290 - DNA, 246 bp, Klebsiella oxytoca
atgaacaaaatgaatgttaccaacaaagttggaaatataatcacggattttattacaaacgctttcttaccttttataaatattcttgctgctgcagggattttaaagggaattctgctaatatcatctctggttaatatcattcatgccaattctgatatctataaagtattagattcaatatctaatgcaatgttttattttttacctgttttcctggcaatgaatggtgatgcctctaattag

SEQ ID NO: 179291 - DNA, 273 bp, Klebsiella oxytoca; identical to SEQ ID NO: 98265

SEQ ID NO: 179292 - DNA, 396 bp, Klebsiella oxytoca
gtggcgcttatctgcgaacttgatgagcaatggagtttcgttggcagtaaagcccggcaacactggctctggtacgcgtataacaccaaaacagggggtgtactggcctatacttttggtccccgtaccgatgaaacctgccgggaactactggcactgcttacgccattcaacatcggcatgatcaccagcgacgactggggcagctatggccgggaggtgccgaaggataagcatctgaccggaaaaatattcacccaacggattgagcgcaataacctgacgctgcgcacccgcattaagcgcttggctcgtaaaacaatctgcttctcgcgttcagtagagatccacgaaaaagtcatcgggacgtttattgaaaaacacatgttctactaa

SEQ ID NO: 179293 - DNA, 429 bp, Klebsiella oxytoca
atgattaaaagccttccccgcgccaccgtcagccttgccatggcaaaagcgatgacggcagccgctgagagtaaagccagtgaaatcaatgtaccagtggtcatatccatcgtcgatggcggagcaaacccgctgataatgcagcgaatggacgaagcctttgtcaccagttgtgatatttcgctgaacaaggcgtggtctgcctgctgcctgcaacaaccgacgcatgaaattaccgcaggcgttcaaccgggccagtcactctatggtttgcagcttaccaatcagcagcgaattgttatttttggcggtggtttccccattattgaaaacaatcaggttattggcgcaatcggcgtcagtggtggcacggttgaacaggatatggaaatagccaggtcagcgctcgactatttcgacaagcattaa

SEQ ID NO: 179294 - DNA, 1164 bp, Klebsiella oxytoca
atgagcgatcgtatgtatgactttcttgttccaaatgtgaacttcttcggcccgggcgcggtgtctgttgtgggcgaacgctgcaaactgttgggcgggaaaaaagccctgttggtgaccgataaaggcctgcgcgccattaaagacggcgcagtcgatcagaccgtaaaacatctgcgcgaagccggtattgacgtggtaatttttgatggtgtcgaaccgaacccgaaagacaccaacgtgcgtgatggtctggcggtcttccagaaagagcattgcgacatgataatcaccgtgggcggcggcagtcctcatgactgcgggaaaggtatcggtatcgccgcgacccacccaggcgacctttatagctatgcgggtatcgaaaccctgacccatgcgctgccaccgattattgccgtcaacaccaccgccggcaccgccagcgaagtcacccgtcactgcgtactgacgaataccaaaaccaaagtgaaattcgttattgtgagctggcgtaacctgccttctgtttccatcaatgatccgctgttgatggttggcaaacctgccggtttgaccgccgcaaccgggatggatgcgctgactcatgccgtggaagcctatatctccaaagatgccaacccggtgacggatgcgtctgctatccaggctattaaactgattgcgactaaccttcgtcaggccgtggcgctgggcaccaacatcaaagcgcgtgaaaatatggcctgcgcgtcactgcttgccgggatggcgtttaacaatgctaacctcggttatgtccatgcgatggctcaccaacttggcggcctgtacgacatggctcacggtgtggcaaacgccgtgctgttaccgcacgtctgccgctacaacctgatagccaacccggaaaaatttgccgatatcgccacctttatgggcgaaaataccaccgggctctccacgatggatgccgctgagtgcgcaattaacgccattgcccgtttgtccaaagacgttggcatccctcagcacctgaatgaacttggcgtaaaagaggctgacttcccatatatggcggagatggcgcttaaagacggcaacgcgttctctaacccgcgtaaagggaatgagaaagagattgttgagattttccgtcaggcgttctga

SEQ ID NO: 179295 - DNA, 366 bp, Klebsiella oxytoca
atgcaaaaccctggtattcccggctcacccgcagtgcatctgttttaccatccaggcctgcacgacagcgaaacgctgcgtcagataagcctcggtcttgaggaacagggtgtaccttgccgaaccatctcctgtgctgacatcgataacgcactggcgcttgcccatcaggccgcgcagcactccgcgctccgcaccgggatcggcgtttccgccagcggcgataccgtactgacacatgcccagtaccctgccgatcgccccctgcgtcactgccctcctgacagtggctacgcccgtttacgtaatctcggcgcgaatgcgggccagttggtgaaagtcatcccctttagcgaggcgctataa

SEQ ID NO: 179296 - DNA, 549 bp, Klebsiella oxytoca
atgtatcgcatctatacccgaaccggtgataaaggcacgacggcgctgtttggcggtagccgaatcaataaagacgatatcagagtagaagcctacggcagtgtggatacgctaatttcactgctgggcgtctgtcatgctgccaacgacgatcctgacctgcgtgccgggctgcaccgcattcaggaggagttgtttgtggtgggcgctgaactggcctgcgatgaaagggggattactcgtcttagccgcgttatcgatcaggcggatattaaccgactggaacaagagatcgaccgcaatatgaccgcaacgggcccactaaaagcgttcgtcatccccggcaagaacctggcttcggcttacctgcatgtggcgcgcacgcaggcccgacaacttgaaaggattctggtggcaatggacagaactgtgcccctgcgcgaatcgttaaaaagttacatcaaccgtctgtctgatgcgttgtttgcgatggcgcgcgtggcggagtgccagccagaggagaaccttaatcctgatgtcgatgcttga

SEQ ID NO: 179297 - DNA, 1926 bp, Klebsiella oxytoca
atgaccacgcagaatgagcacgtcgaacaggccctgacgtcatttattgaccagtcctggcaccgctgcggcaagatgatgaagcgcgaattctggagtacgccgcatcaggctaaggggctgacgttccagtctatctgccgtcgtaagactgcgctgctgaccatcggccaggcggcgctggaggatgcctgggagtatatggacggtcgcccgtgcgccctgtttattctggatgagtctgcttgtgttctgacccgctgcggccacccggataccctggaggcgctggattctctggggttcatggccggtagttactgcgcggaaagtattattggtacctgttctctctctctggcgtcaatgatcgggcagccggtaaaaactctgggcgatcaacatcttaaacaggccttattcccctgggcattctgctctacgcccatttttgataacaatgggcgtttatttggctcgattgccctgtgttgtctggctgaggactcgggcgtggcagatctctctttgaccctggcgatggccagagaagtggggaattcgttgctgacggatagcttactggcggagtctaaccgccatctcaatcagatgtacggcctgctcgagagcatggatgacggtgtgatggcctggaatgagcagggcatattacagtttcttaatccccaggcggcgcggttattacacctcgatgcgcaggcgtgtcaggggaaaaatattaacgatctggtgacgctgcccgccctgcttcggcgggccaccaaacaggcgcgctccctcagccacgccgaagtcacgttcgaaagccagcaccagtttgtcgatgcggtcatcacgctaaaaccgattgtcgaagcgcagggaaccagtttcattctgctgctccatccggttgaacaaatgcgccagttaatgaccagccagttgggtaaggtgagccatacgttttctcagatgtcggcggacgatccggagacccggcggttgattcattttggtcgtcaggctgcgcggggcaatttcccggtactcatgtgcggggaagagggggttggtaaagagttaatcgcgcaggcaattcataacgaaagcgaacgggcggcgggcccgtttattgccgttaactgccagttatatgctgataatgcccttggcgtagatttcatgggcagttcggcaacggaagaagagaacgggcgtctgagtcgccttgagctggcgtccggtggcacactttttctggagaagatcgaatatctggccccggagctacagtccattttacttcaggtgatcaagcagggtgtggtgacgcgtctggatgcacggcggttgattccggtggatgttaaagtgattgccaccacgacgatggatctcggcaatctggtggaacaaaaccgttttagccgccagctttattacgcattacactcgtttgagatcagtattccaccgttgcgtgaacggcggaacagtatcccgtcgctggtgcatagccgcttgcgcacgctggagcggcgtttctcatctcggctaaaagttgacgacgatgcgctggcgcatctggtggcctattcgtggccgggaaatgattttgagctgaacagcatcgtggagaatattgctatcagcagcgagcacgggcacatccgcttaagcaatctgccagggtggctattcagcgaacaccccggtgtggcgggaaacagtacattaatgcccgccagtatgagcatttcggcaatagagaaagaagcgattattcacgccgccagagtgaccagtgggcgcgtacaggagatgtcacggttgctgaatattggccgcaccaccctgtggcgtaaactgaagcagtttgatattgatgtcactcagttcaagcatcgacatcaggattaa

SEQ ID NO: 179298 - DNA, 1101 bp, Klebsiella oxytoca
atgctacaagttattcagtctccggcaaaatatcttcagggtcctgatgcagctgcgttgttcggcgagtatgccaaaaacctggcagacagtttttttgtgactgccgatgatttcgtcatgaaactggcgggtgacaaggtactgaatggtctgcatgaaaacggcataagctgccatgcagaacgctttaacggcgaatgcagccatgcggaaatcaatcgccttggcgcgattttgcagcagaaagggtgcaaaggcgtggtgggtattggcggcgggaaaacgctcgataccgcaaaagccattggctattaccataaactgccggttgtggttatcccgaccatcgcctctacggatgcgccgaccagcgcgctgtcggttatttataccgaagccggggaatttgaagagtatctgatctacccgaaaaaccccgatatggtggtgatggatacggcgattattgccaaagcccccgtacgattactggtttcgggtatgggtgatgcactctctacctggtttgaagcgaaagcctgctacgacgcacgtgcggtcagtatggcgggaggtcagtcaacggccgccgcattgagtcttgcacgcttgtgttacgacaccttgctggcggaaggcgaaaaagcacgtctggcagccgaagcgggtgtcgttaccgttgcgctggaacgcatcgttgaagccaatacctatctgagcggcattggtttcgaaagcagtggcctggcagcggctcacgccattcacaatggcttcaccattctggaagagtgtcaccatctgtatcacggtgagaaagtggctttcggtactctggcccaactggtgctgcaaaacagcccaatggaagaaatcgagacggtactccgtttctgccagaaagtgggcttaccgatgacgctggcgcagatgggcgtgaaagaaggcattgaggagaaaatcctcgcggtggcaaaagcgacctgcgcggaaggggaaaccatccacaatatgccgttcccggtgagcccggaaagcgtttacggcgcgatcctgacggccgatcgcctgggcgcacaatggttggctactgagtaa

SEQ ID NO: 179299 - DNA, 1071 bp, Klebsiella oxytoca
atgaaaaaactgattaaccgtgtggaagatgtactgactgaacaacttgccgggatggcgaaagcgcaccctgaactgaaactacaccaggacccggtctatgttacccgggcagatgcgcccgtcgcgggtaaagtggccctgctttccggcggcggaagcggccatgagccaatgcactgcgggtttattggtatggggatgctgagtggtgcctgcccgggagaaattttcacctctccgaccccggataaaatgtttgaatgcgcgatgcatatcgacggtggcgaaggcgtgctgctgatcatcaaaaactacaccggcgatgtgctgaactttgaaaccgccaccgagctactccacgagagcggcgtaaaagtcaccacggtggtggtcgatgatgatgtcgccgtcaaagacagcctctatactgccggtcggcgcggcgtggcgaacacggtgcttatcgaaaaactggtgggcgcagccgcagaacgtggtgacagccttgaagcctgtgccagcctgggccgcaggctgaacaatcagggtcactctatcggcattgcgcttggcgcatgtaccgtccccgccgccggaaaaccatcgtttgaactcaatgataacgaaatggagtttggcgtggggatccacggcgaaccaggcatcgaccgccgccccttcacctcgctgaacgacaccgttgacgccatgtttaccaccctgctggagaacggcaattacagccgtacgttacgccagtgggacccggtaaaaggcaactggcaggaagttacccagaccaaacaggcgctgcaacagggagatcaggtgattgcgctggtcaacaaccttggtgcaaccccgctttccgaactctacggcgtttataaccgcctggaaacactgtgcgatgacgccggaatcactcttgcccgcagtctggtcggttcctggtgtacctcgctggatatgtccggtttttctattacgttgctgaaagccgatgctgaaacgctcgctctttgggatgcccccgttcacacccctgccttcaactggggtcattaa

SEQ ID NO: 179300 - DNA, 633 bp, Klebsiella oxytoca
atgtcactgaacagaaataacattgtcgactggttgtatcgctgtggagaaattttcaccacccagagcgattttcttaccggcctcgaccgcgatatcggcgacgccgatcacggcctgaatatgcaccgcgggttcagcaaggtggtagaaaaattaccctccattgccgacaaagacattggctttattctgaagaatacaggcatggtgctgctttccaacgtggggggagccagtggcccgctgttcggaaccttttttatccgcgcagcccaggttacccaggctcgtcagaacctcagcgttgaggagctctatttgatgatccgcgaaggtgctgacggtgtggtgagccgggggaaagccgaacgaggtgataaaaccatgtgtgacgtctggctcccggtggcggattcactgcgtcacgccagcgaaaaccatttatcaatgaccgccgcgctggaagcggcctgcgaggtggcagaacaggccgcgcaatccaccattaccatgcaggcgcgtaaaggacgtgccagctacctgggggaacgcagtattggtcatcaggatccgggcgccacatcagcgctgtttatggtgcaaatgctggctgctgcggctaacgcgtaa

SEQ ID NO: 179301 - DNA, 1428 bp, Klebsiella oxytoca
atggtaaacctggtaattgtctcgcacagtgcccaactgggccagggcgtcggggaactggctcgccagatgttaaggggtgatagctgtaagctggctatcgccgcaggcattgacgacccaaccaatcctatcggcaccgatccgattaaggtgatggacgcaatcctctccgtggcggatacggacgcgattctggtgttaatggatatgggcagcgcactgttgagtgccgaaaccgcgctcgacctgctggaaccggaggtggccgcacgcgtgcatttatgcccggccccgctggtcgagggcgcactggccgccacggtcagtgccgccagtggcgcgagcatcgataaggttatcgaagatgcgcaaagtgcgctgcaggcaaagcgtgttcagctcggtttccccgcgctggaagagtcccgtaatagcctttcgtccgcagaaatcgatgcttgcgatgcgcaggccgagtccgttacggtggagattaacaaccctaacggcctgcacgttcgccctgccgcccggctggttgaggggctttccgggtttgatgcggtgctactgctggaaaaagagggcaaatgcgtcaaacctgacagcatcaatcaaattgcactgttgaaagttcgctgccacgatcgggttcggctggtagccaaagggcctcaggccgcagacgccttgatcgcatttcaggcgctggccgccgacaattttggcgaacattgccaggcagacgctgaggttgataacgcacaacccgcgctgacaacggtgagtggacaggtgctgcattaccaccccattaatcatcacttcgatgatcttgcaggcggtacgcaggaagaggagtttcgtcgtctgaaaatagcggtaagtcataccctggacgatctcatcgacttaactcgcctggcagctgaaaaatattcggacgacattgccgccatcttctcgggccagcataccctgcttgacgatcccgacctgctgaacagcgccagcgagacgctgcgtcagcggaaatgcagcgccgagcgtgcctggcaagagaccatgatggccctcagccagcagtatcgtgagcttgatgatgcctatcttcaggcgcgctatatcgacgtcgaagacattatgcatcgcacgctggggcatctgacggatgtgaccgacaacgcccctgttctgctacatcgcaccatcctgattgccgatgacatctacccgtccgttgtgttgcaactcgacgccagcaacaccgccgctatctgcctgcagcacggcagcccattagcccacggcgcgattattgcccgtcagggcggtattccctggctgtgccagcagggtaccgcctttgataacctgcacaacggcgacccactcacgttaaaccgtctgaataccagacagtaa

SEQ ID NO: 179302 - DNA, 978 bp, Klebsiella oxytoca
atgaagaagaaaaacagcacacccactcctcacgatgcgacattccggcagttcctgacgcaacccgatattgcccgggatttcatggaattgcatctcccggcagaactgcaggccatctgtgacctcagcacgctgaaactcgaatccggctcgttcgttgaggatgacctccgccagtatttcagcgacgtcctctacagcctgaaaaccaccgccggggatggctacgttcacgtgctcattgagcatcagtcctcacccgacaaacatatggcgtttcgcctgatacgttacgcggtggccgccatgcagcgccatctggaagcgggccataagaagctccccctggtgataccggtcctgttctataccggtaaacgcagtccgtatccgtactctacccgctggctggatgagtttgacgacccagcgctggcaggcacactctacagcaacgctttcccgctggttgatgtgaccgttattccggatgatgacatcgctggccatcgcagcatggccgccctgacgctgcttcagaaacatattcatcagcgcgacctcgctgaactggttgaccgtctggcgcccattttgctggccggatacctgtcttcatcccaggtcatatcactggtaaactatatagtccaggcaggcgagacagccgacgccgaaacctttgttcgcgaactggcacagcgtgtgccgcaacacggagacgcactcatgaccatcgcacaacagctcgagcagaaaggtattgagaagggtatccagcagggtattgagcagggtattgagcagggcatccagttgggtgaaaaacggggtattgaaaaaggccgttcagaaggtgagcgcgaagcgactctgaaaattgcccgtaccatgctgcagaacggcattgaccgcagtaccgtgatgaaaatgaccggtctgacggaagacgacctggcgcagatccgccactaa

SEQ ID NO: 179303 - DNA, 279 bp, Klebsiella oxytoca
atgcgcgttgccgaacatatcctcctcgatgccctcactcgcggaggatgcatcaaaaccttttaccgcatatcctcacgacaggctgctgaatcggccacgcggatacctgaggggtatattctggagtctcccggcgaccgggaagatattgtactcagccatgcggactttcatgcgctggagaagctgctggagcagaaggatacctgggagcagatggtcggggtgacctgttttggtggggcaacctggaagctgagagccgggtccatgtga

SEQ ID NO: 179304 - DNA, 732 bp, Klebsiella oxytoca
atgaaccgcaaacaatttattcagagccggggcgccaactgtcgtaactggacctggagctggtcttttattaatcatgacgaccagctggtcatcttcggggcatgggacgttgagcgcgaccaggagcgcgctgtcatcctgcgggaagaatgggagtacaacgccagactcagaaagaatcccggctacacccaggcggttgagcatatcggctacatcctcgggggatacgacctgtacaccttcaacatggtgcaggccaccagtccggatgcgccggacgtcgcggtcattcaggattttgagcgccggctggaaaaacgctttctgagaaaagagggcgccgtctggtacgccgacttcacggccagtccgtaccctgaggaactgtccgttgccggcagttacagtgagggtgctacaaaaaccatcaccgttaatgcatacgaacgcgacccggccgcccggcgggcctgtattgcacatcatggtgctgtctgtcagtgctgcggattcgattttgagaaaacctggggcgagcacgggaaaggattcatccacgttcatcatatccggccgctgagaacgctcggggctgactatcagattgacccggtaaacgagctggtcccgttgtgcccgaactgccacgccatgattcatcggggcaatgaggcaaagccgttgtccgttgaagaacttcgcgccatgatgaggcccgccggctga

SEQ ID NO: 179305 - DNA, 1020 bp, Klebsiella oxytoca
gtgactgaagagcacaatccgcaacactggagtcagctggatacggaagaacagatccgtttctggcagggcattgataatggtcacgtcgggtcttttctggtttctccggagaagaaacgtacccgtcgccgtcgcggtgaacattccactaaacccaaatgcgaaaacccgtcctggttccggccgcctcactataaggcgctgggtggccagctggggcacgcctataaccgtctggtggaaaaagatccggccacgggccagtgcagacttcgcatgcacatgtcactgcatcctttctacgtccaggaacggcagcgcgcggggcgcagatatgcttttcgcccggaaaaacaacgtcttctcgatgcgctctggccggtactggtcagcttctgcgatgccggtaaacacacggtaggaatgagtgtgtccagactggccagagaactcagcccgaaagatgcccggggggaagtgatttccggtacggaagtcacggtacgccggatttcggcattaattgccgagcaggtccgctttggtgtacttggcgtatcagaagaaactctgtgggacagggaatcacggaagcgactgcctaaatacgtctggatcacgcccgttggctggaaaatgctgggtgttgatttaatgaagctgcaggagcagcaactgaaaaaactacgtgaatgcgaggaacgtcaggcgctcattaaagaggggctgttaggcgagcatgaggagatttctgttctgagggcacgtaaacgctggtatgagcagcgcagtcgtgaagccctgcagtatcgccgtgcaaaaggtgccgcacgtaagcgtgcaaaccgcctggccagaatgccccgggaccgtcaggtctacgaaatgacctgctggctgaagaaaacgctgccggcagatgagctctatggttattctaaagataaacttgagcagctggctgtccggcatctgtaccagctggagttgtcactgaacccttctccgcctcattag

SEQ ID NO: 179306 - DNA, 255 bp, Klebsiella oxytoca; identical to SEQ ID NO: 138912

SEQ ID NO: 179307 - DNA, 558 bp, Klebsiella oxytoca
gtgaaaataaaccgtactctccgcagatggtgtctgcccgggctggtcagcctgagcctgtacgcccccttaccgaccgtgtatgccgcaagcatcgagaccgggttttccccggaaggaacaggccagcagctggttctgaaaaccattacgaccgcacaacaggaaatccggctgatgggctattccttcacgtctccggaggtggccggcgcgctggtcagggccagacagcggggcgtggatgtgaaggtggttctggaccacaaagccaataccggtgagcgcaacaaggccagccgggctgccatgaatctgctggtcagcgccggtataccggtccggacggtggatacctacaagatcctgcacgacaaagtgatcatcgctgacgggcgtaatacggaggtcgggtcgttcaatttttcccgcgccgccgatcgcgccaactcagagaacgtgctcgtcgtatgggatgaccctgtcgttgctcaacgctatctgcagcactggtcatcccgctggtcaaagggaacggactggaaacagacgtactga

SEQ ID NO: 179308 - DNA, 309 bp, Klebsiella oxytoca
atgattgtgcccgtagaggttgatcgcgatgcgcggggctactggacacacccggcgttaatccggagttgctgccagaccacgccacagctgatgtggtggttgcgcgtccagaagctggagtgcttcgtgatgagtatgcgtgacgaggctacagaggcattctgtgccggatgggatgatggcccgtctgacgcttcagcatgggagctggttcctccgcccggtaagggctggtttcttggttcagtacatccacgggaggaggggccggaatgctactggttccgtcataccacaaaagcctga

SEQ ID NO: 179309 - DNA, 651 bp, Klebsiella oxytoca
atggcgaaaatactaatgatggccggcagtaccgttgttgtgctgagtctgctggggtttctggttctgcttctgaaaggacgggccgtaacgaagacatctccggtcctgatgtcactgaaagctctgggtattcgcccctcggaggcagagcagcgattgtgtcgccagcgggtctgggtgggaaatgactcgctcatgacaccacgggaacaacacttttaccgggcactgctgaggcataccagccgtaagcgctggctgttatgcccgcaggtccgggtggcggatattgccacactcgctccccacatccggccacgttcccggacctggtggcaactcttccgcatggcgtctcagtggcactgcgacgtggtcattgttgatatccgcacctttgctgtcgttggcgcgattgaacttgatgacgcctcacatcttaaaaaacagcgtatcaggcgcgacatcctgctggaagaggttctgaggcaggcgggtatcccgctgctgcgcgaccgggactcagagaaactggtcaggcgagtcagtgagtttctgaaataccgtgaagctgaaaccgacgaaatatctgcatccgacacagctttaccgacagcgcatactgaacgccgggaggacgaaaaatga

SEQ ID NO: 179310 - DNA, 636 bp, Klebsiella oxytoca
atgtttcggtattttattctgcgcactgagcagcaattattctgttatttatacggtatcgcgctggcgctggttctgatgctcttattttctcctgtgtcccgggcatacgggttttatctggttgcgttgtctgttgcgttgtctgttgcgctgttctgggccggtctggccctgtacacccgtcgcaccgaccggatgagaaagccggaggtctcaccgctggtcagtatccgcgacggtattcaggtggtggccatactgccgcgccatgaaaaggcccgtctggaatgggaaattctgcaggatgctgacgtgtatcgccgtcagatggttgcccttctggacctggctcaacggggtgtcagccgggggctgatatacgcgccggcggtgatgctggctggtctgtgctttcttgcccggggatttccgctggatgctgttcgggtcttcagcgctctgcgggaaatgcccgccacagagcttgtgcatcagactggttttgtcctgcgctacgtcctgctgatttccgtcatgtcggctctgattgccgatgttctggccgggagaggattgccgaacgcctttcgccgcgcattgctggacaggctgccggcagaggcaaaggaataa

SEQ ID NO: 179311 - DNA, 303 bp, Klebsiella oxytoca
atggttaaagatgaaatgacagatgagtctgctgtgcccgagtctgaccaagcgcgaagaatgataagacgttcggtactgcggatggtgggttcgggcctgattcactcccgggatgatgtgattcgctacctgataaatgagggtggctttgacattgagagtgtgaccgacaccagtgtgacgctgtgtgcgccggatgagccggaagagatgctgacgctgacggggtgggtgttttcatcatcattcagactggctgactgcgtttctgataatacctgtccggttatgtacgactga

SEQ ID NO: 179312 - DNA, 348 bp, Klebsiella oxytoca
atggattttaaggaacggaaacaaaaggcgctggcgataatggccagccgtaagatgtggaaaagtaattacgcaccgcctctgatacgtctgctgtggtggctgggtgtaaaaatccccccgctgccgtttgcctcgttctggcaggttttcggtttgatgacaggcggtttctccgtgggatacgggctgctgatgtactttatggtctggcgtccacaggggatgagtcctctgtttgcttgtgcggtcagtcttatcgcgggcgtattatttggcttaacgatggcgctgtttcacctttggcggcgaagcgcgaataaattacctgactggaaagacctgtaa

SEQ ID NO: 179313 - DNA, 594 bp, Klebsiella oxytoca
atgagtgaagaaaaacgccctgtactgagcctcaaacgaaagcctgcggcggaaagcacgggaaaggatgtcacaggcacgccgggcgtcgttcgccgcaaaaaagtcgtggtggtctcgacgccgcccgcctggaaggtcaagaaagagaagctggagcaggcgaaaaaggcggctgaagccgccgcacgccaggcggccgcagaaccggtcaaagcggcaaaggttccgcctccggtacgttatctgcggctgctgccaccggagcaggccagtatgaccctgaaagctttctggccgcagctgtttgacggcaactcgccacgtctgctggccacggggatgcgtgaacagctgtttgccgatattgcgagccgcgacctgccgctgtcgcataagcaggtgattaagtgcctgaaaagcctgacccggtcggcgggttatctgtcccggatgcgggaaggtgcctcccgctatgacctgcagggcaatgccgtggccaccgttacggcagaggaagctcagtacgccagtgagcgcatgatgaaggagctgctgcgtactgagcgaatgaggagccagacggctgactga

SEQ ID NO: 179314 - DNA, 726 bp, Klebsiella oxytoca
atgacaacatacacaatgcgtttcagtgcggcagaccgctggctgcaggctctcctgacctggacgcccgggcagacggatatcatcaaaacggtggcgctgcttctgatggtcactgaccacaccggactcctgttggcgcacaacaacgagcttatgcgtctcctgggccggggctgctttccgctgttcggtctggtctgggggatgaatctggcccggcacggagaaatacgccagtcacagctgaacagtctctggggctgggcgctcgtcgcccaggtgtcgtttatgctcatcgggtacccgtggtacacgggtaatattctgttcgcctttgccgtcaccggccagatgctgcggtggttcagcctgccgtcctggtattacaccctcccggctgtcgggctactgataacctggatgccgctgtcagccggcagttacggcatggcgggggtaggcatgctcaccgccagctggctgctgtgccgcgaacagcatgcgacggaacggctgatttatggtgcgctgtgggccatcatggtgttgctgatgaatatcaatgatgtcagtgagtcggtggccggggtggtaatagcgctgctcacgctgatggtgtgctcttccgttgggaaaaatctgaagcgattctggccacggcattttttcgtgatgttctatgccgtgcacctggcggtgcttgggatagtggcgacgatgtaa

SEQ ID NO: 179315 - DNA, 5259 bp, Klebsiella oxytoca
atgctcagtttcagccaggtgaaatcggcgggcagtgccggtaactactacacagagaaagacaattattacgtcaccggcagtatggaagagcgctggcagggcaaaggcgcggaagcgctgggactggaaggaaaggtggacaaacaggtcttcacggagctgctgcagggaaaactccccgacggcagcgaccttacccggatgcaggacggcgtcaacaagcaccgtcccggttatgatctgaccttttcggcgcccaaaagtgtctcgatgctggccatgctgggtggcgataagcgcctgattgacgcgcataaccgtgcggtgacggtggcgctgaatcaggtggagtctctggccggcacgcgggtgcagaaagacggcgtatctgaaacggttctgaccgggaatctgattatcgcccggtttaaccacgatacatcgcgtgctcaggagcctcagatacacacgcacagcgtggtcattaacgccacccagaacggcgataaatggcagacgctggccagcgataccgtcggtaaaaccgggttttccgaaaatctgctggctaaccgcatcgcgcttggaaagatataccagagcgctctcagggccgatattgagtctatggggtataagacagtcgacgcgggcaagcacggcatgtgggagatgaaggacgtgccggtagaggcgttttccacgcgcagccaggagctcagggaggcggcaggacccgatgcgtccctgaagtcccgggatgtggccgcgctcgatacccgcaagtcgaaggaagccatcgatccggcagagaagatggtggagtggatgaacacgctgaaggagaccggcttcgacatccgtggctaccgtgaagctgcggacgcgcatgcagcagagctggcccgcgcacccgcagcgccggtgaaaaccgacggaccggatatcgcggacgtggtgacccgggccattgccggtctcagcgaccgtaaggtgcagtttacgtatgccgatgtgctggcgcgcacggttggccagctggaggcaaagccgggggtgtttgaactggcgagaacgggcatcgatgcggcgattgaacgcgagcagcttatcccgctcgaccgggagaaaggcctcttcacctcgaacattcacgtcctcgatgagctctccgtgaaagcgctgagccaggaggtacagcggcagaaccacgtctccgtcacgccggatgcgtcagtgatgcgcgaaaaacccttcagcgatgcggtcagcgtcctggcgcaggaccgtccggcgatggggattgtcgccggtcagggcggcgcggcaggccagcgggagcgggtggcggagctgacgctgatggcccgggagcaggggcgcgacgtgcatattctcgctgccgataatcgctcccgtgattttctcgccggggatgcgcgactggccggagaaaccgtcacaggcaaatctgccctgcaggacgggacggcgtttatcccgggcgggaccttaattgtcgaccaggcggagaagctgagcctgaaggagacgatttccttgctcgatggcgccatgcgccataacgtgcaggtcctgctctccgacagcggcaagcgcagcggaaccgggagcgcgctgacagtcctgaaggacagcggcgtgaacacctacaggtggcagggcggcaggcaggccacggcagacatcatcagcgagccggacaaaagtgtgcgttacagccggctggcgcaggagttcgccgtcagcgtgcgtgaagggcaggagagcgtggcgcaaatcagcggcacgcgtgagcagaatgtcctgaataacgttatccgcgacaccctcaaaaatgagggggcgctcggcaaccgggacatgacagtgaccgcgctgacgccggtgtggctggacagcaagagtcggggcgtgcgggactattaccgtgagggcatggtcatggagcggtgggaccctgaggcccggaagcatgaccgctttgtcattgaccgtgtgacggccagcagcaacatgctgaccctgaaagaccgtgagggagagcgtctggacctgaaggtctccgtcgtcgacagccagtggacgctgtttcgcacggataagctgccggtggcagagggcgaacgtctggcggtactcgggaagatacccgacacgcgcctgaagggcggggaaagtgtcacggtgctgaaagcggaagccgggcagctgacggttcagcgtcccggacagaaaaccacccagacgcttcctgtcggcagcagcccgttcgacgggattaaggtcggccacggctgggtggagagtcccggccggtcggtcagcgaaacggcgaccgtctttgcctcggtgacgcaacgtgagctggataacgccacgctgaaccagctggcgcagagcgggagccatatccggctgtactccgcgcaggacgcggcccgcaccacagagaagctggcgcggcacaccgcgttcagcgtggtctcagagcagctgaaggtccgctcgggagaagcagacctggaggcggccatcgcacagcagaaagccggactgcataccccggcagagcaggccattcacctttccgtgccgctgctggagagcaacagcctgacctttacccggacgcagctgctggccacggcgctggaaaccggcggtggtaaggtgccaatgacagacattgatgcaaccattcaggcgcagattaaggccgggagtctgctgaatgtgccggtggcctccggacacggcaacgacctgctgatttcccgccagacctgggatgcggagaaaagcgtcctgacgcgggtgctggaaggtaaggatgcgatgacgccgctgatggaccgggtgccgggcagcctgatgacagacctgaccgccggacagcgggcggcaacccggatgatactggagaccccggaccggttcactgtggttcaggggtatgccggggtggggaaaaccacgcaattcaaatccgtcatgagcgccatcagcctgctgccggaagaggcccgctcgcgcgtcatcggtctggggccgacacaccgcgccgtgggcgagatgcagagcgccggcgtcgacgcgcagacgaccgcctcattcctgcatgacacgcagctgcagcagcgcaacggccagacgccggatttcagcaacacgctgttcctgctcgatgagagctcgatggtcgggctggcagacaccgcgaaagcactctccctgattgcagccggaggaggtcgcgctgtactcagcggcgataccgaccagctgcagtccattgcgccgggccagccgttccgtctgatgcagcagcgcagcgcggctgatgtggccatcatgaaagaaatcgtgcgccaggtgcctgagctgagaccggcggtctacagcctgattgaccgggatatcagccgtgcgctgtccactattgaacaggtcacgccggagcaggtgccgcgtaaggacggtgcctgggtacctgaaaactcggtcacagaattcacgccggcacaggagaaagcgatacaggatgcgctgaaggagggtaaggaaataccgcctgacacgccagcgtccctccacgatgcgattgtgaaggactacaccgggcgcaccccggcggcgcaggcgagtacgctcatcatcacgcatctgaacgcagaccgccgggcgctcaacgggctcatccatgatgcgcgtgtacagaatggcgaggtcagtaaagaggaggtgaccctgccggtactggtcacgagcaatatccgtgacggtgagctgcgtaagctgtccacctggtcagagcatcagggggccgtggctcttctggataacacctaccagcggattgagagcgtcgataaggagaaccagctcatcacccttaaggacaatgagggtaacattcgtcttctctctccccgggaggcctcagcggagggcgtcacgctctatcgcccggagcacatcaccgtctcacagggtgaccggatgcgcttcagcaaaagtgacccggagcgaggttacgtcgcaaacagtgtgtgggaggtgaaagcgttctcgggtgacagtgtcacgctaacggatggcaaaaccacccgcacgctgaacccgaaggcggatgaggcgcagcgacatattgaccttgcctatgccatcaccgcccacggcgcgcagggggccagtgaacctttcgccatcgcactcgaaggcgtggaagggcgccggaaagcgctggtcagctttgagtcggcctacgtggcgctgtcgcgcatgaaacagcacgcgcaggtgtacaccgacaaccgggaggggtggaccacggcggtcagccgttctcaggagaaggccagcgcacatgacgtgctcgaaccgcagaacgcccgggcggtgaggaatgccggtcagctctatggtcgggcacagccgctggatgaaaccgccgcaggccgggctgccctgcaacagtcaggtctggccagaggccgctctccgggtaaattcatctcacccggtaaaaaatatccgcagccacatgtggccctgccggcattcgataaaaacggcaaggaggccggtatctggctcagtccgctgaccgacagggacgggcggctggaggccatcgggggcgaggggcggattatgggggacgaaacggcccggttcgtcgctctgcagaacagccgcaacggcgagagtctgctggccgggaacatgggcgagggcgtcagagcagcccgtaaccatcccgacagcggggtgatagtacgccttgccggcgacgaccgcccctggaacccggaggccatcaccggtggtcgggtctgggctgaccccctgccgaatacaccgctccctgataccggtactgacatcccgctcccgccggacgtgctggcacagcgggctgcagaagaggtgcagcgccgggaaatggaaaaacaggcggaacagactgcccgggaagtcgccggcgaggagaagaaagcgggcgaaccgggcgagcggataaaagaggttatcggggacgtgattcgcggcctggagcgtgaccgcccgggcgaagagaaaacgctgctgccggatgacccgcagacgcgacgtcaggaggccgcgatacagcaggtcgcctcagagagtctgcagcgcgagcggctgcagcaaatggagcgggacatggtgcgcgacctgaaccgggagaaaaccctcggcggcgactga

SEQ ID NO: 179316 - DNA, 2301 bp, Klebsiella oxytoca
atgagcttcaatgccaaagatatgacccagggcggtcagattgccaatatgcgctttcgcatgtttggtcagattgccaatattatattttacgtgctgtttattttattctgggtgctgtgcgggctgatgctgatgtaccggctcagctggcagacgtttgtgaacggctgcgtgtactggtggtgtacgacgcttggacccatgcgcgagattattcgctcccagcccgtatacaccattcagtattacggccagtcgctggaatatacctcagaacaaatcctggccgataaatacactatctggtgcggtgagcagctgtggaccagttttgtgtttgcggccgtcgtttccctcgttatctgtatcgtgacgttctttgttgccagctgggtgctgggccgtcagggtaaacagcagagcgaggatgagaataccggcgggcgccagttgtccgataaacccaaagacgtggcgcgccagatgaagcgcgacggtatggcttcggatattaaaattggcgatctgccgatactgctgaactccgaaatccagaacttctgtctccacgggaccgtgggctccggtaaatctgaagtgatccgccggctactgaattacgtccgtgcccggggcgatatggccatcatctacgaccgctcctgtgagtttgtcaaaagctactacgatccgtcgctcgataaaatccttaacccgctagattcgcgctgtgcggcctgggatttatggaaagagtgcctgacgctgccggacttcgataacgtctccaatacccttatcccgatggggaccaaagaggacccgttctggcagggctcagggcgcaccatttttgccgagggcgcgtatctgatgcgtgaagacaaggaccgctgctacgagaagctggtcgacaccatgctctccatcaaaatcgacaagctgcgcgcctatctgcagaacacaccggcggcgaacctggtggaagaaaaaattgagaaaaccgccatcagtatccgtgcggtgctgaccaactacgtcaaggccatccgctacctgcagggcattgagaagaatggcgagccgttcactatccgggactggatgcgcggtgtgcgtgaagaccagcccaatggctggctgttcatctcctctaatgcggatacacacgcttccctgaagccggttatctccatgtggctgtcgattgccatccgcggcctgctggcgatgggggagaaccgtaaccggcgcgtgtggattttcgctgacgaactgcccacgctgcacaagctgccggacctggtcgaaatcctgccggaggcgcgtaagttcggtggctgttacgtgttcggtattcagtcctatgcccagctggaagatatctacggcgtgaagcccgccgccacgctctttgacgtgatgaacacccgggccttcttccgttctcccagcagggaaatagcggagtttgccgccggtgagattggcgagaaagaaatcctcaaggccagcgagcagtactcctacggtgcagacccggttcgtgatggtgtgtcgaccgggaaagaaaaagagcgtgaaacgctggtcagctattccgatattcagacactcccggatttgtcctgttacgtcacgctgcccggaccgtacccggccgtgaagctggccctgaagtacaaaccgcgcccgaaaattgccgagggatttattcagcgcactctcgatacgcgggtggatgcacggcttagtgctctgctggaagcgcgtgaggctgaaggcaatctggtgagagtgctgttcacgccggatgcgccggagcctgaacagcgtgatgcagacagcaggacatcgcccggacagccagagccggaaaacgccccggtctcacctgcacccgtgaagtccgcgtcgacagctgaaacgctggccgcaccgccatccgttaaggcgtcagaagcgccacaggctacagtcacgaccgtgccgttaacccgcccggcaccggcaacgactcctgctgcttccagcgcgacggcgtcctctgtcgctgcgacggcggccacgaccggcggcacagaacaggagctggcgcaacagcccgcagatacgggacaggaggtgatgccggctggcatgaatgaggacggtgaaatcgaagatatgcaggcgtatgacacctggctggctgatgagcagacgcagcgcgagatgcagcggcgtgaagaggtcaacattaaccatagccaccgccgagatgagcaggatgatattgagattggggggaatttctga

SEQ ID NO: 179317 - DNA, 534 bp, Klebsiella oxytoca
atgttaacccatcaaataatacaaaatgaaatcgaagagctaaaacagatcttggctcatcaggatttagagattccatcattctggcgttgtatctggccaggtctggtatgcatgctttggtttttactatcatcctatctttcatattggttaagtgactatgcctctggtcttgagagaatagctgctatggtttttgcgggtgcgatgggttttttttctattgttttgatagctaatacgcgcgcacattttctttcgttgcctcagtcattccggaaaaaatcaaaattctttggttatttgtcaggaaagtgtaaggcttatggtgtctttatcttggttctatttccatgtctggcgttttatttttcatctatccatcttaatgcaatagcctttagtgttataacgtttttttgtatgatagtaactgtcatggtgatgaatattgaccttggtcgttatcaattagcgactttgacgtctgttattgaggcggttaggggggtaagtaggcgcaataactaa

SEQ ID NO: 179318 - DNA, 2874 bp, Klebsiella oxytoca
atgacgccacttgaaatctacaccatcgccgggggcgactggctgcggggtaacctgaatgccatcgcggcgttcatggggaccgccacctggtcgtccattgagaaaatgtgcatcgcgttttcggtgctgattgtggctgtcagctgggtgaaaaaacacaacatcatggaccttgtcggctgggtgttttccctgaccctggtctctatgctggttgtcgtccgtacacctgtacagataatcgactacagcaacgtggcgcaggtctacaaagtggataacgtcccggttggcctggccattccggcgtcgctgaccacgcgtgtgggtaatgccctggtacagagctacgagatgattttctccctgcccgacagtgtcacctacagtaagaccgggatgctgtttggcggaaacctggtggcgaaaagcaccgattttgtttcgcagaaccccgaaatcaccaccctgttctccgactatgtccagaactgcgtgatgggcgatatctttctcaacggtaaatacacccttgaggagctgatgaactcctctgacccgtatacgctgatattttcaaagcccagtccgctgcgtcaggtacccaatcacgactataagtttctcgataagccggagctgggcacggcctttatcagctgtcaggtggccgcgacacagcttaaacaacggctggcgctcgactcccagactggcgggaagacctggagctactatgcgcgccagctgttcggtggcaaacccaatccggacctgctgttcagccagatgataggcgacagctacggatacttctataacgccagccagagtgccgggcagattatccgccagaacgtcaccatgaatgcgctgcgtaacggtctccagagctacgcgtcccgcagcggcgacacggcaagcctcgtgaacatcgccaacaccacgtcgctggaaaagcagcgtctggcacaggccacgatggggcatcaggccctgcgctctctgccgatgatgcagacggtgatcatgggcatcatgattgggttgttccccatactgattatgagcgcgatgttcaacatgatgacgctgcaggtgataaagggctacgcgtttgccctagtatggctacagtcctggccgctggtctactccatcctgaacagcgcgatggcctactacgcaaaacagaacggtgtcccggtggtcctctcagagctctctcaggtgcagctcaagaactcagatattgcgaccacggcggggtatatctcgatgatgataccgccactcacctggtatatggtcaagaacattggtgccggcttctccagcgcctacagccactttgcctcctcgggactcagttcgacgtctcaggccgcatccggtgtcgtcgatggcaactactccttcgccaatatgcagatggagaacgtcagcggctacaactggggcaccaacagttcaaccagcttcggtcagatgtcgcggcagctggggaacggtggtacggagacgcagaccggggacgggacgactatctgggatgcgcgcagttctaagctaccggttgatatcaatgtcagccggcaactggccagcgcgaaccaacagatggcacgtgagtctgatgtgcaggcacagagtcacctgcatggctataacaacagcgtgacaagtgcctggaacagccttcagcagttcggcacaaataaagggaacagcgcgtcgacaacaaccggggccgattatactgagtcgtcgcaggattcaatggccagaagtaaaatgtggaatgcggttgtttctaatgcgaaagccaataacatcagcaatgaagagtcattcaaccagttgatggataagtcaacgaaagggtctgtatcaggtgagatgtatggtaatgcaaaatggagtactggtgatcagctggccgggaaactgggtaaatgggctacaggattctccgctgaaggtggggtgaaagcaagtttaggtgcgagtgcttctagtggctctactgactcgacgaatgaatccggaagatcatctcatgacagtaggcatgataccagtagtcaggctgccagagattttaaagaagcatctgattactttaccagccgcaagacaactacatcaggtaatattaccgataataatgccagttcgcgtatcgaccagtttgcggcatcgctttcgagtgccaaaaacagttatgaccagtacacgaacagccggactcgtagccatgaatacagtgagatggcatcccgtacagagagcatgagcggccagatgaacgagaacctgactcagcagtttgctcactttgtccagcaacgttctccgcagaatgcagaagccattctgaccaacacaagttcgccagaagtcgctgcgcagcgtgaagcacttgcacgtgaattcgtcaaagcacaagttgaaccaaaggttgatggtgcttatcaacaaggtcgcgaaagcatcggccagaatatgtcaagtgtgtcaggtggtggtaaccgtggttcggtaatggccgactacggacataatgctggtagtatagaagccatgacacgagatgcggggattaaggataatgtggggcagaaagtggatgggatgatagcgcagaataaccaacagcatcaggaatcccgtgaaggcatacaacagcaaggtgtcgaggtgagaaaagagaatgctgaactggaaaatgaccacaaaacaaaaggaaatgatttcaaaaactcttataatgataagaaggaagagcagactaaattgccaggtgcggatacaactagagaactgttggataaggcaaataagttagaaaaagacaaatcaaagagatag

SEQ ID NO: 179319 - DNA, 1371 bp, Klebsiella oxytoca
atgggcaacattaaaagggccgcgctggcgggcagttttttgttggggttgtctctcccggctgccgccgatgtgaacggcgatatgaataacttcttcaacaagctggggttcgcgtccaataccagccagccgcaggtctggcaggggcaggcagcgggctatgcctccggcggttcgctgtatgccagaacgcaggtaaaaaccatccagctggtcagcatgaccctgccggatatcaacgccggctgcggcggcattgatgcgtacctgggctcattcagcttcattaacagcgagcagctgcagcgcttcggcaaacaaatcatgtccaacgcggcaggctacttctttgaccttgccctgcagaccacggtacccgaaatcaaaacggccaaagacttcctgcagaagatggccagcgacatcaacagcatgaacctcagttcgtgccaggccgcacagggcattgtgggcggcctgttcccccgtactcaggtggcgcagcagaaggtctgccaggacattgccggtgagagcaatatctttgccgactgggcggcatcgcgtcagggctgttcggttggcgggcagatgggcaaggtgcaggataaagccagcgataaggacaaggagcgcgtcatgaagaacatcaacatcatgtggaacgccctgtccaaaaaccggctttttgacggcaataaagagctgaaagagtttgtgatgacgctcaccgggacgctggtcttcggtgagaacagtgaaatcaccccgctgccggcgcgcaccaccgaccaggacctgattaaagccatgatggagggcgggacagccaggatttaccactgcaatgattcagagaagtgcctgaaggtggtggcagatgcgacggtcaccattgccgccgacaaggcgcttaagagccagatttcgacacttctgagcagcattcagagcaaggcggtaatggaccaggccctgacggagcaggagaagggctttatctccagcaccaccatcccggtgttcaaatacattgtcgacccgcagatgctgggtatttcaaacacgctgatttatcagctcacggactatatcggctacgacattctcctgcagtacatccaggagttgatacagcaggcccgggccatgattgccacaggcaactatccgcagtcgacaatggatttaattctggaaaacctgaatcaggcaagcgtacagattgccgccttccaggcgcgtgttcaggtccagcaggatgcgatgctggttgttgaccggcagatgagttatatgcgccagcaggtgtccgcccgcatgatgacccgctaccagaacaactaccatttcggagggagcctctga

SEQ ID NO: 179320 - DNA, 576 bp, Klebsiella oxytoca
gtgaaaaacagcctgaagaacacaactaaaacagccgcaacggtgaccctgctcctggctctttccggcatggcgcaggcgggcacgctcgatgaggtgaggtcgctctgggacccgcagggtatctccggcgcttcatctgcctcccggaaggatggcgctccgcgcgcggtgacgccggtttctcagccccgctggttccggctcagcaacggcaggcaggtggaccttcgggactggaaagtcgtgctgttcatgcaggggaagtgcccgtactgccataagtttgacccggtcctgaagcagctggccgggcagtacggtttctctgtcttcccttacaccattgacgggcagggcgatgaggcctttcccgaggcgctgccggtgccgcctgaggtgatgcagacctttttccccaatatccctgtggccacgccgaccacgtttctggtcaacgtgaatacgctggcggcatatccgcttctgcagggcgccacggatgcgcagggctttatggcacgagtcgatacggtatttcagatgacgggggaggcaggggatgggcaacattaa

SEQ ID NO: 179321 - DNA, 240 bp, Klebsiella oxytoca
atgcgaaagattcgttttcccgatttagacattaccgggatgtgggtgctggccgtgggcgtatttttccacctcatcgcccggctcgtcagaaagcagcctgagctggccgtgcaggccggagaaatcttcgggctgggcatggtggtgttcggcggataccgcattctcaatgccctcattgcagaagctgaaaaggaggagaaggcccgtgaaaaacagcctgaagaacacaactaa

SEQ ID NO: 179322 - DNA, 753 bp, Klebsiella oxytoca
atgcgaaaaatacacaccgcccttctggcggggtgcctttgctgcaccctgttgccggctttcgccaaagatgcgggctggcagtggtacaacgagaaactgaagtcccgggaagctgaaaagccgccagtaccggcggccccgccaccgcagatggatattctccagaaacaggctctcctgcagcaggcgacgaagaaagccctggcggaagccattatgtacccctcggtccccgcctttgtgaagtacttccgcctgcagaactactggacgcaacaggcaggcctgttctcgatgagcgcgaagaaggccatgctggcgcacccggaacttgattacaacctgcagtacagccactacaacggcaccgtgaaaaaccagcttgctgctgactatgccgaacagcgccgggctatctcgaccctcgcacagcattttggcgtgatgttcttttaccggggccgcgaagccatcgatggccagctggtccaggtgattcagaacttccgcgaaacctatggcctgagcgtgataccggtgtcagttgacggcgtcattaaccccatgctgcccgacagccggacggaccagggacaggccgcacaactcggcgtgaagtacttccctgcgatgatgctggtcgacccgaaaagcgggcaggtgaagccgctgagttacggcttcatcagccaggacgacctggcgaaacagttcctctatgtctccagcgactttaaacccaatttttaa

SEQ ID NO: 179323 - DNA, 327 bp, Klebsiella oxytoca
atggaagagagaaaatcgtatggaatggtggtgctgtttgtcagcgtgtttgttgtttttctggtgagcatcatgtcttacagcctgtggcgggacaaacagattagtgcatttatggccaccaaccgtgcctggggtatccagtgtgaccggatttctcaggtcgcgtgggtggtccggggtggggagcgggtgaatttaacgataaccgatctccccctttactgcagcggctaccgctttgaactgcgcaatggtcagggtgaagtcattcacctgctcgataaacacgttgcctaccagcaactttcccgccagccacactga

SEQ ID NO: 179324 - DNA, 228 bp, Klebsiella oxytoca
atgaaagttaattttcacaaacatcctgccgtcgatttttctctgagactgacgctgacgggaattatcatttctccggcgctgtacttttcatgggatgccgtcaaaggaacatcaggcagcgattatatcctgagcgttatctttattctctgcatgggcggtgtcgggcttatgaattatctgtttttttcggcgctgaccagacttttacagaagggaaaataa

SEQ ID NO: 179325 - DNA, 282 bp, Klebsiella oxytoca
atggccgcgtcattcatggtcgttgttctgcttgtggtctttctttttattccgactggtattgctttatgcatgtcaggccgcagtctgctcctgatattcctgggtgccctggcgtgccaggccgctgttgccgttgcgtttgcaggactgtctgcccggggctggtctgagtcgatggggatgggggcggcatcactcattttctacgttatcgggctgcataaggctgacggtgtaaaacagaatactcgtaacgggagagaaaagaatgaaagttaa

SEQ ID NO: 179326 - DNA, 1881 bp, Klebsiella oxytoca
gtgaaagaactcccgctcattctgacacttcacgcctctgtcctcagtgccttcatctggctggcatcaccggcctgtgctgacagcggtactgactataaagccgggtcggattttgcgaagcaggtgcagggcagcgggatggactcgctgaaaaacttcagcggtgaacaaaatctgccggggtataccgacagcccggagcagacaaaatactacggcggtgtcaccgccagcggagacagcgccctgaaaggtgactcggccgctgagttcagccagggcgagaccggtaaaaccattacggagtcattcacaaaccggcctccggacctggtttccccggaggcaccgtttattcagtcggcaaaagacatcgaatcccgggcggatacgattgtcggggataccggccaggcctgtacggcccaggtggttaaccgcagcgaattcacgaaccacacctgtgaacgcgacctgcaggtcgagcagtactgcatgcggacggcgaccattaccggtcactataacgatacgacgacgacagaggtgtacagcgtggcgctgaaggatgcctggcaggagggcgaccaggtgaaagtccgcttcaccttcggtgtgacagggacgcttattcatgcagaggcgcagtatttcattaccagcctgccgaattatgcgccaccagggcaggcaaggacgctctatgcccttggcggttcggttcgtgtggaaggggggcaggagtggaaaaccctttccggtggcggttatcaggttgtggagggccgggatgagattatgaccattaagctgcatgacagctattcggtcagctacttcgccggcatactggcccggaatctccgctccggttacatcacgctgaacatccgcgccacaatgcaggtcgcctcaaaagagtgggagcctgacgtcacctgggttgagaactgcgcctttaacaaagatgaaggaaacaaaacatcgtcagaatgtactgagccgggaggtacgaaagatgtctggcaggacgggaaagcgtacccggtttatcaggcctgctgggcttacagggacacgtacattactcagcctgcagattttggtgcctgtcagtctctgatggataacaaagcctgcaccctgtcatcccgccagtgcgccttttacagtgaggacggaagcgggacctgtcttcatgagtacgccacgttctcctgtgagacgcggaccagcgggaagcagatgatttgcggcggggacgtgttctgccttgatggcgaatgcgataaggcggcctccgggaagaacaatgattttggtcaggcggtctccgaactggccgccctggccgcagccggtaaggacgtggctgagatggacggcgtgaatgtcagggccttcaccggcaacgcgaaatactgcaaaaagttcgccgccggattcagtaactgctgcaaggacagcggctggggccaggatgtggggctggcgcgctgcagcggcgaagataaggcgctcgcgaaagccaaagccaacaagctgaccatcagcatcggggagttttgttcgaaaaaagtgctgggtgtctgcctggagaaaaagcgcagctattgtcagttcgattcaaaactggcgcagatagttcagcagcagggacgtaacggccagctgcgtatcggatttggcggcgcgaaaagcccggtctgtcggggtatcagcgtggacgaacttcagcgtatcaactttgaccagctggatttcacaaacttcatggaggatttaatgaagaaccagtccatccctgagaacgcagcgctgacagagaaaacgaaagaacgcattaaagagcttctcacacagtcttctgcaaagtaa

SEQ ID NO: 179327 - DNA, 618 bp, Klebsiella oxytoca
atgaaatttatcaatgcgatgatagtgatggccttactgaccatgaaggtgtgtggggccgttggcccgacaaccgaagacagagcctggctgaaacagcaggagaacttaagcgagcagttgcgccagcatccggacagacagctgcagcaggagctggaagcgcaaattaagcgcaatccactcaaccgctcagacagccagtttatcgataatcttctgagccagcagaaagcagcgaatcaggaaaaaccgacagaaggggcactgtattttgtctccttctcgataccggaagaggggctgaagcgcatgctgcatgaaacccgccagtacggtattccggcgacgctgcggggattaatcaacaacgacatgaagaccaccactgacgcggtgatgcagctggtaaaggatggcgtcaccgacggcgtccagatcgacccgacgctgtacgcacagtacaacatccggagtgtccctgccctggtggtgcggtgtcagacggggttcgacgtggtgcgcggcaatattcgcctgaaacaggcgctggagaaagtggcggaaacaggtgactgcgcacagacggccagaacaatgctgggaggtatccggtga

SEQ ID NO: 179328 - DNA, 993 bp, Klebsiella oxytoca
gtgagaaccctgactctgttcctgagtgccctgacattatgggggtacagcctcagtgcggccgctgacccttcctgtgaggggcgattcgtcaacccgatcaccgatgtgtgctggcgctgtatcttccccctgtcgctcggcagcgtgcaggtcggcaaaggtgacctgccggataccagcaatcccggcagtcccctgcagctgtgcccggctccgccaccgctgtttgttcgtcccggcctggctatcgggtactgggagccgatggccatgacggacgtcagccgctcgccgggctgtatggtcaatctggggggattcagcatcaacctcggcaagaccggcatggggaccgcgaaaaaggacgacaaacaggtgaacggggccttctatcacgtgcactggtacaaatacccgctgacgtactggctgaacatcatcacgtcagcaggctgcctggaagggggcgatatggatattgcgtatctttccgagattgacccgacctgggtggacagcagcctgactaccatcctgaatccggaagccattctgtttgccaacccgattgcgcagggtgcctgcgcggcggatgcgatggccagtgcgtttcatatgccgctggatgttctgttctggtgcgccggctctcaggggtcgatgtacccgttcagcggctgggtcagtaacgagtccagtccgctgcagtcctcgttactggtcagcgagcgcatggcgtacaagcttcaccggcagggacaaatcatggagagcatcggcaaggacaaggcggtctgctatgagtatccgtccccgattatccccaaagagcgctggcgctatcagatggtgaacatgtaccccgacagcggtcagtgccatcccgtgggtcgcagcgtgatgcgctgggaagcgggacgaaatccccccaactcacgaaagaactacggctatctgatgtggcgtaaacgtaactgcgtcttcctctga

SEQ ID NO: 179329 - DNA, 627 bp, Klebsiella oxytoca
atgatacgactgaaaggctgcctgctcgccagctgtcttttgtcgccgctgacacaggcggccgacctcgggacctggggggatttgtggcccgtgcgcgagcaggacatgctgcagctcatcacgcagcgtctgcagaaactgcagacctccggtcagtgggaccagacgatggatgaatttaaacagcgcgtcattgaaaacagccagcgcccggcgccggtggaggggattaaacgggcagagaagtatgagcagcgctggtttgaccccagcatccgtctgaccgaagacctgaaagaccatgagggccgggtgtttgcccgcaagggcgaagtggtgaaccccctgaaaaccgtgccgtttatgcagaccctgtatttcatcaacggggatgacgccgaccaggtggcgtggatgaagcgccaggtgccggaaaccctgatgagcaagattatcctggtgcgtggcagcgtgccggacacgtccgccgcactggacagccggatttatttcgaccagaacggcgtgctgagccagcgcttcgggctgaccgcggtgccggcgcgtatcacgcctgccccctccggtgaacggctgaatattgagaccttccctgttaaataa

SEQ ID NO: 179330 - DNA, 435 bp, Klebsiella oxytoca
atggaagagaatgcagagcaacaaacggagcagatgcaacagcagcagaggccggaacagcagcaaaacaaagcgacatcgcgcactttccggcgggtgctggtcatcaccgccctcgtcgtttttaccctggcctgcaacgtcatgctcacgcgggtgatgctggcgtacaccacgccacgggtggtggccttcgatatgaaaaagacgctcgacaactttatggacagcgtcagccagaagccactgacagaggcgcagtcaaaagtgctctcggaccggtttaacgaggcactggagaagagcctggcggattatcagcagcaacatcatgtgctcattctggtctcacccgccgtggttcagggcgcatccgatgtgacccgcaccattcagcacgacattgcccgccggatgaaaggagcacagcaatga

SEQ ID NO: 179331 - DNA, 546 bp, Klebsiella oxytoca
gtgattgatgaaggctggcgactgctggacttcaaaaacgagaaggtggggaccttcattgagaagggttaccggacggcgcgccggcataccggggcctatatcaccatcacccagaacatcgtcgacttcgactccccgaccgcatcgagcgctgcacgggcggcctggggtaactcctcgtacaaggccattctgaagcagtcagcgaaggagtttgccaaatacaaccagctgtaccccgaccagttcagcaagcttgagaaagacatgattaacggtttcggctcggccaaagagcagtggttctcctcttttatgctgcaggtggaggcgaactgctcctggcaccgcctgtttgtcgacccgctcagcagggcgatgtactcctccaaaggcccggacttcgagtacatgaaagcgcgccgggcagaaggtgtcgatattcacgatgcggtgtacggcctggcctgccacaactttgacagggagatggctgagcttgaatcccggatatctgaaaacgacacagaggaaaaccgctga

SEQ ID NO: 179332 - DNA, 2952 bp, Klebsiella oxytoca
atgtcaaaaggtatagatgtctcatttctacaggcactaatttcaagaagtaaaagcgcacaatacgcacagattaaggatattgagtccaaacaggcaagaaattatctgcgtggtgttgattcaacaaattataataaggtaaataaagcgttaaaaaaaataaaattgaactgtacctattctgactttaaacgtgcagtagacttcgtaagaactagccctgactatgaagaaaatgatacaggccaattatttaacagaaccatacctaaaggtattattgatagcgcagattttacgtttggagaaattttaaggaaaatagatgcttattcaaatgagttatgtactcttttagagtgttgcatacaaatctataaatgtttaagtgtaaatgatcttaatgccgccttggacgcatgtgatgaacttgttgaaaataaaggtgcttcaatttttttagtcagaatgatctcattcattacgaatagatatcaaatatttaatatggatgataaagtcatcttaagcaaaattgacgccctcaaaagtcgtattctaatttcaaataatccatcattagaaggcgcagtaatccagttgagtaatcttagaacttctcacttggctatttgtaaaagaattaacgaattaaaagattcatcttataaaagtattattgctaagtctttcataaatcctgtacctaaaaataatgatgattttgttaaaaaccttaatgcttattactcagtttctttgttagacgcattcctttattatcaactgattattaaattagatttgccatacattagaaaaactcacataaacaaagacttaaagttgatacataaagagttttccgcaattgaattctcgccagatacaatatacgacggattggatgaggatagcgggtattattatcttagggagtgctttttgttcgttgagcaatttaaagcccttaagtttttaattgtacatgggcattattatggtgattttggaataaacagaactttgtctgattattcatttgaattaataaatagatattttgaagggttagaaaacttaacgcagcttagatgtacaaaaatgaataatgcacaaattaattgggagcattatgaccaagaaacctgcggtatgttggaaaattcatcagctttacttcatttacttaccaagaaacaaggtcatcttgaagaagaggaacaacttctttttgttaaattaatgacttactctagagatgttggtgaagcttgcccgcctgactatctggaaaccattgcaaatgatgcaaaacactttttgctaaaattagttgtccaatgcttaatcacaattaataagaaatctcattatacagaatatgagttgcgttcaaccattcaagaatattgcttgtcggactttgatggtgatttaattaagttgcttgattatctttacaatgtatctccagctgtgactgagcatcttattttgacatgtaatgaaacctttttaagtacattatttattttgatggataggcctgttgatgcacttcaagcacgagcagatatgttacattggttcggtgaaattacaggtgaagaacgttacttagaccgtgctaaaacgttgcgtattgatattgctattaataaagaacgaggaaccatcgatgattcaaggatttatgtcgatccactaaagttttctcagtggttcgaagataatatggtcagtaaattgacaatgtctttagataatctattaattagtaatacatctactatgaaattagattggagtaataaaaatttaggagctagtataggggacgatgtaattgaaaatcttctaacttgctataatgagttttgcgaaaacagagtttttggaatagcttcatatcttggtagacgaattcgacatggtacttttaaaggcacggcaatgacagagttatatgaaattcctaagaaagaggaatatcgtgctatttttgaggataaggaattcaagcgtaaatttgatgagtggatgtcacgctatgaggcaatgattgaggatttagttaaaacctcgctacaaataaagagcaaaaagaaacctttcggattaataacaactgaaatagactctcaattaaaaattacaattgccaaacaacttgttgtcaacatattggcaatttattctaagcgtagtggtgtattgcgtttaccaagtttgattatcgattatctttggcgcctcgctgaaaccgacttgcataaaacaaagaaactattaagcgagaaaaagtctacctttggtgtttttagtttcaacgctaaacatcacagtgcaagtatgaaaaaaaccatttcaaagtttacgcaagaaataaactcattaacggggcagaaatttggtttgatgtcttcatggttcaacaaacctaattatgcttcaccaagtactgatatatatttacttttcaatacagtcgtttctgaagtaaaagatagggtaagtcattttaaaccttttgttgatttaggggaaagtagtttttccataaatggcggcacctattacgttatttatgactcattatatgtattgattcataatgctgctatacatggtaaaccaaatggacaaatacattttgatgtctccccgtgcactgatagaaatgctttgaaaatccgattaaaaacagaggtttcgagtatttacgaacttatgaaggccaaggaaaggatattatctttcttgcacgaaaatgatgatgatgctcacgttgttgaggggaatagtggtataaaaaaattgaagaagttagaacgcgaaggtagtataagtaatattcatttcacgacaaataattctgatttaacgttatgttttgaatatctttttgagctcaatagcagaggtgactatgatcttgatagttga

SEQ ID NO: 179333 - DNA, 1161 bp, Klebsiella oxytoca
atgaacattttaattatagaagataatgaacttaaacgctcggagatcgagcaggttattaatgaagaattacataacaataacaataatccaacgtacagttatgctgacaatctggtcttcgcgaggaggcaacttcagacacaagtctatgatttaataattttcgatatgtacttgccgttagcaaataatcattatgatgaagttgattgttctgaggagcttatttctgagttctctgtaagtaaaaattatcaagcagaagcgattgcgttaactcaatttgaaattagtgaaattgaaaacttccagtcctttaatagcgctggcattacagtagtacattttaatgataataagcattgggtggcagctctccgccaaaaaatcacgcgggcatcacaaaaaataaagtctgacttcttgattttttgtgctttaactaaagaaagaaatgcctattctgaggcagaatgtgttttaggtaagcaaaaaaacatctcaggaatgaattgtcttgaaattactatagatgataagcatggcttcattataaaaccacacaatatggggttggtgaatatggccatagttgcatctaaagccatcgaattatttcagccaaaaatagtatcaatgagtggtatatgtgcaggggtaaaaggagaaaccaattatttagacatcattgttggtaaaacatgctgggagtatcaaaccggaaagtggaaagacggttcgtttaaacaagaaccttatcactccaccctctcccgcaatcttgaaacagatttggagcagtcttcagaagatccagatatactcgaaagcattagaaagggaatatataaagatgaattatctactatgcgtattcttttagcgcccatttcttctggctctgcagtaatcgcggatgcgaaaatgatggaggcgattgggatgcaacacagaaaaatggcagcgcttgagatggagatgtattcactgtatgaagccgcggcgcagtccctttgtcagccactttgctttggagcaaaagcagttgttgatttaggcgatagtaataaaggtgatggtttccatgagcctgcatgtaaaattacagcacggtacgtaactctaatgatagagcgtcagtttaaaaaacaggcatag

SEQ ID NO: 179334 - DNA, 156 bp, Klebsiella oxytoca
atgtcgctggcgaccattcaacgcgatgaggatttcctgccggcgttggccaggagtgacaatgaagtgttttacaacccagcccggcgcaaaagtcaccttggcagcgtcagtccggaggacatcgaacatgcttcgtcgtatggacagagatag

SEQ ID NO: 179335 - DNA, 1032 bp, Klebsiella oxytoca
atgatgaatagcaataaaaaaactaataaatacgtaatggtaataatttgtataaccttcacactctctatgttctacctatccacaaaggctgtaatttatattctcaacaagagagatgttgagggttttgcagaatccattctagaaagaagtgttttattaatggagcaaatagagtttgtggaaagtaaaagcaagagtgtaaatgaatcagcagtttgcacaaaagaacacataaaaaagctgcgtaaaattctctggcctcaacgttttattaaagacattgcttatgctaatcaagatacgctcttgtgtacggctttgtggggtgatgacctagcaccagaaaagctcaacaacaattataatagtgtaaagtatggcaatggtttttggttgcttgatgtaaaacctgggatcttaggaggtaatgatgtatacgttataaataatttagcaatcataccttcaccattcacgtttgctaggttttcattagattctgaaaataaaaaaataagtgcaatattttgcgaagatgaagtggatattcatctcaacccgaaaatcggtgctgactggcagttacgcgggcagcaaaaacgtgttgtcacaccgggccagaatgaaaagtactatcttgccggtgcgctgcacagcggtacgggaaaagtcagctacgtaggtggaaacagtaaaggttcatctttatttatcagactgttaaaacatcttaaggcgacataccggcgggcaaaaacgattacgctcattgtcgataactacattatccacaaaagccgtgaaacgttgcgctggctgaaagcaaaccagaagttcagggtcatttatcagccggtttactcgccatgggtcaatcatgtagaacggttgtggcaggcgcttcatgagacaataacccgaaatcaccagtgccgttcaatgtggcaactgttgaaaaaggttcatcactttatgggtaccgtcagcccattctccggtggaaaacacgggctggctaaagtgtag

SEQ ID NO: 179336 - DNA, 411 bp, Klebsiella oxytoca
atggttgaggttgaggaaataaaaaagaagtatcccggcgcagacgcctggcaaatgggtgacagtccggagctggccaaccagcttgcggaactgatcaaaaaagggatcaaaacggcctcttgcggatcttttgcctcttaccagcaggaagaatctgctccgaggatagggagttatcacattattcttgatggccagaatgttccagtttgcgtgatcagactgatttcgatgcagctggttcgtttttgtgatgtcacagaagcgttcgcccgcaaagaaggtgaaggcgatttaagccttgaatactggaagagagagcatcagagatttttcagctgcgaaggtcatttttctgaagatatggagttgatcgcagaagaatttgaagtggttgaagtgctgtga

SEQ ID NO: 179337 - DNA, 504 bp, Klebsiella oxytoca
atgaatttgtatatgttttatgtcggcggaaatgccggtaaatcaaatattgaagtgcatgacattcagtttgttgcagccagcgctcctgaggatgcatggcctgcgctacgcaaagcatggtttggcgataacgataaaattcatattgatgattacagccgtgttacatgggccgacggattttcggtctcgctttctccggagcctccccaaaccacgcagagattatttttcgtcaatgcgggcggttacaggcagggtacacttgccgaactacatgaatacgatctgttcgtcgccgaaaatgcccgtcaagctaaagagaaagcgttgcaggcgctactctgcgatgtcgatcaacagcataaggataatttaaaagaggttgacgactgtctgttacttgaaaaggtcggagaattgtttattcatctgacgccctgtgaaacaggatgtcgggatcttcctgagtggcaaggatatttacctataggagcctaa

SEQ ID NO: 179338 - DNA, 285 bp, Klebsiella oxytoca
atgaataatcattttggaaaaggcctgatgaacggtgtgaacatggctggtccctgttcgacaacgatgcctgcgaaattttgtaatgaatatgtacgtggatttgtaataggttattgctatcagctggaacagaaaactggagagaaaagtgttgcagctcttgaagcgggaagactgacgagacggtacaatcttgacaaggagatcatggccgaattctttctggaattcagatctgataaatttttacactatttcaacgttggatactatggtgactag

SEQ ID NO: 179339 - DNA, 510 bp, Klebsiella oxytoca
atgtcagtttccgctcgtaatcagctgtacggcaaagtttctgcgatacaccccggttccgtgaatgatgaaattgaaatctccctcacagcgggaggaaaactggtctccgttgtgactagtagcagtagaatcaggctggctctggagcaagggaaagaggtggtggcattaatcaaagccccctggattatccttgcttccgaggatgatggaatgcttttttccgctcgtaatcagttccctggtgtcatcacttcactggaaaagggggcagtaaacgcaaccgttcatcttcagacggacgaaggtacaactcttacggctgtcattacaaacgaaagcgtgacggaaatggatctcagtgaaggcaaaagaattattgccctgatcaaagcttcttctgtgctgctagcggtaaaaaaacctaaaaaccagccatcaaaaacgctacacaggacgtttcattgcaagcgtcctaattctagtcaccatagtatccaacgttga

SEQ ID NO: 179340 - DNA, 747 bp, Klebsiella oxytoca
atgcagctgatgcacaggctatctgtgatagcggttcgtcgcccacatatgcgatttgtaccagttaaggatgaaagccagcaggcgatgcagtgcctgcatcgtactcgtcagggatttatcgaagagaaaacagcaacgtataatcgcctgcgaggattgatatctgaattcggcgtcatcgcgccacaaagtactgattccctgcgacacatggtttctgcacagaagaattccttaccacttcaggttcagcaatgtgctgatgatttgctggagcacgttgcccgcatcgaagccaacatagctgaatatgacagaattttgtcccgcatggccaaaacagatcatcgcagtcagcggctgatggaattaaagggcgttggccccacaacggcctgtgcgctggtcgccagtattggtaatgcacatgattttaagaatgggcgccagctggcagcctggctggggctgacgccatcacaatacagcagcggcggaaagtcgaagctcggcaggatcacaaaagccgatgatgcgtatctgcgaacgcttctggtacagggagctcgttcagtgcttattggcgctgagaaaaggactgactcattcagccgttgggtttgtatgttggttgagcgcagagggtactggcgggctgttgtggccatcgccgccaaaaacgcgcggctatgctgggcatcactacattacggtgatgatttccggctgtactcagccaattaa

SEQ ID NO: 179341 - DNA, 1026 bp, Klebsiella oxytoca
atgttactgaaagtcggcgaactggcacgccgttccggtattaccgttcgcacactacactactacgacaatattggtttgctgatcccttctgcgcgctccgactccggctaccggttgtataaccgggccgatatcgcccgtctgcatcatatccaggcgctacgccgcatgggattgacgctggccgaggtcggggcgattctggaacgttcggatctggagctgccaacggtgcttgagcggcagattgccatgctgaaccagcaactggcgcaaatcaccgcgctgcgcgctcgcctgcagacgatgcagctgcaattgacggcgggcgatgatccggaactgaacgactggctgacaacgttggagttaatgactatgtatgataaatatttcactgctgatgaactggcgcagctgccgttttatcaggccgatacgcaacgccagcaagaatgggcggcaatggtacagcaggtgcatgaactgatggcaaacggcacgccggcggaggatccgcaggcgcagcgcatcgcgcgccgctggatgctaactctggagcgcgacactgccggcaatccggcgtttctcacgcgtctgaacgccatgcacgccgatgagccgtcaatgcgtgaacagatcggtatcacgccggccatgaccgactatatcacccgtgcatttgctgaaaccaagctgacaatttatcagaaatatctgtccgaagaagagtatgcctatgtccgcaaacactatttcgaccgcatgcaggagtggcccgcgctgatcgctcgcctccaatcagccctcaacgacggcatcgcaccggacagcgcacatgcccgccaagtggccgccgactggctggcgctgttccgttcttacgccggtgaaaatccagccacgcagatgaaaatccgccgggcaatggagcaggaacccacgctgagcgaaggcacctggcttacaccaccactactggcttatttgcgtgaagctgtcgtaaatttgaatcaaaaataa

SEQ ID NO: 179342 - DNA, 804 bp, Klebsiella oxytoca
atgaccaaatttaagaccggctttttgctcgaaagaattccctatattcgcatgggtgatcaaactgatcccgtgatcgtgatcaacggtgggcaaggttttgtacgcaaacacagctttgaccggatgctccgggacgcaaagcgtgtcgcacgtatgttgccgccaacacagggcttcatcctgattggctacgatcagcagcccgaagcaaaggcgacgattgaaacgattgtgacagactatgagcgcgccatcagagacatgaaggtctcggcgttttcgctcatagggatatcctatggcggattgctggcgacaaagcttgcggcagcgcgtgaagggtgggttaagaagctgattctggtggcgagcgctcacaagttcagcgagaacggcgaaaacaggataaatcgacaaatccagttcgcccaacaggagcagtactacgagctgatcaatgactttgcggcaatattccgcaatcccctgctgaatttgttactgaagataaagctctgggtggactgcaacaaacttacagaaaaaatgaactccggtgacgttattgtgcgatatcttcaattgataatgcaggctgagccagtcgatctgacctcgatcacagcaaggacattgattatcggaggggaactggatcagttttttggcgacggcatgatggaagctgcccgaaatggtataccagacgccaagctacatgttcttgaaggacaaactcacatggctccggttgaatgtagccgacagttacggagattcctgacggaatttctcgattga

SEQ ID NO: 179343 - DNA, 411 bp, Klebsiella oxytoca
atggttaagattaaggaaatagaaatgaagtatccaggcgcaggggcttggcaaataggagacagtccagacctggcaagcgagcttgcgaaccttattaaaaaaggaatcaaaacggcatcttgtggatctttttcttcttaccaacaggaagagtctgctccgaggattggcagctataacataattcttgatggacagaatgtcctgatatgcgtgatccggctggtttcgctgcaactggtgcgtttttgcgatgttaatgaggaattcgctcgcaaagagggtgaaggcgatttaagtcttgaatactggaagcaagaacatcagcgatttttcacccgtgaaggtcatttttctgaggatatggagttgatcgcagaagaattcgaagtggttgaggtgctgtaa

SEQ ID NO: 179344 - DNA, 417 bp, Klebsiella oxytoca
atgaacatatttaaaggccggcattttcagcgagacatcattctctgggcagtacgctggtactgcaaatatggcatcagctatcgtgagctgcaggaaatgctggccgaacgcggcgtgaatgtcgatcacacccccctttatcgctgggttcagcgttatgcccccgaaatggagaaacgcctgcgctggtactggcgaaacccttccgggttctactcatggcatctcgatgaaacgtatatcaaagtaaatggacggtgggcttatctgtaccgtgccgttgacagcaaaggtcgcaccatcgatttctatctctctcctcgtcgtaacagcaaagctgcatatcgttttcctggaaagattttaaataacgtgaaaggctggcaggtcccccggctcatcaacactgattaa

SEQ ID NO: 179345 - DNA, 1650 bp, Klebsiella oxytoca
atgaaaattaatgacatgcgtgtcagcacccggcttagtgccggtttttgcctcgtactttttatgatgcttctgatgggtatcagtgcctggatgtttaccagggaaaatgtacaggatgtggacgaaatgataaatctcgacctgcgtaaagagcgcatggcggaagaatggctgaccctggtggacaggaacagcggagcctcaatggcggccatgggaacggaaaacagagcgctgcgggagaaaattctcagtgctattgctaacgactcagcgaagaccactcaggtgcagtcgatgctgaccccgctcatcaagctggaagaaggtaaagcccgtctcggtaaaatggtcgccttgcgcgaaaaatacatcacactccgtggtgaaggtctggctatggctgagcggggtgaaaatgacgccatgaatgacttcatttccggacacttcctgcccgtcaccgaggaataccagcaggctgtacaggctttggtggactttcagaaagaggtgatcgatgacacacatgcaggaatacggcagacctcagaaaagacagagatgctgatggtattgtttgttgttctgggcattgccctgggaatatttacagcctggtatattacccgcagtattacccggccgcttaaagaagcggttaacgttgcgggcaaagtggcccatggagatctgacgatccaggtgcaggtccactcccgggatgaactcggacaactgatgcattccctgaaagacatggtcagcgcgctcggagtcacggtcagtaatgtccgttccggcgcagaaagcatcgcgcttgcagcggatgaaatcgatgcaggtaatcaggacttagcctcaagaacggaagagcaggccgccggtgtggaggaaacagcagctacactggagcagctgactgccacaataaaaagtacagcggagaatgcccgtcgcgtgaacaatatgtttactgaaacgggacgggtagtaagaacgaacagtgagcgtatgcatgaagtctctgctgccatggacgatatccatcacgccgcacagaagatgacagacatcataacggtgattgaagggatcgcattccagaccaacatcctggcactgaatgccgcagtggaagctgcccgcgccggcgaacaggggcgtggatttgctgtggtagccggagaagtgagagcgctggcgcagcggagttcatcctcagcaaaagagatacgtgacatcatcagtgcttcggtaaataaaattactgacgggcgtgggcttgtatcagaagcccacaacggaatgcaggcaatcgttgagaatgtttcccgcgtgcagcagctggttgatgaaatatcgcaggccagcgatgaacagagtgatgggatcagccagataaacgtcgcgatgggacagatagacaccaccacccagcagaactcgtccctggttgaagagtcctcagctgccagcggctcactgaaagaccaggcaggcctgcttcttgacagtatacgggtttttgtacttcgggacgcagggatgaaaccggataatgcccgcataaaggcggccggtatggaaaccactgtcagtcaaccgaagaaaaaaattgccagtgaacaccgggaaacattctga

SEQ ID NO: 179346 - DNA, 855 bp, Klebsiella oxytoca
ttgaaataccagagatcgtcagagctccggcatggcgcagggttctcgactggtcgcgtgaggagctgctgcaccgcctgggatacgtggctggatccttcatcctcttattttgcccgcccctatacgcttgattaccgtaaacccgacggcacaggccaccttgaggggctcctgattacgatcccggaggctgaaaatctcatccaggaagagataattcacgattttcagtgtgacatcagtttactgaaaggaatgtccagttctaagtcagagagccatgacatcactgatattaacgatcttgcggtgctgcgcagtcccgggctgaccgaacccgtcaccccggaacatcttcagaagaatatgtctcatggcgggttgcgcctcgaccgtatgcggtttgcggaatatccgtggtctgaacgccggtattactggcacaatgacgacggttcccatcatttcagcgctgcccggtatcaggctggccgcctgcagcagcctgttccgctgacaggcgcgctgcaccgctacagtgtgaatgtgcagatggtgcctgcattgcgtaataaatggcagatgtttgtgatcccgaaggaagagctgttcggcagtttttatgattcgatgaaggcctttgaaagcccgttcgcctggtcagcgttacctgagaacatgcacgatccgaggacgagtggcacagagctgtgcattatatggctggagcgggataacgccagagcctgtgccgcggcaaacgttctggccagatatggattccctgacttcggcgagacgctgacaggacttgccagatacgggcaaaggaagtcagtgctggccggttag

SEQ ID NO: 179347 - DNA, 1014 bp, Klebsiella oxytoca
atgagtaatgcgcacaatccgcaacactggagtcagctggatacggaagaacagatccgtttctggcagggggtagaggacggccatgtggcatcttttctggtttccccggagaagaaatctacccgtcgccggcgcggcgagcactccacaaaacccaaatgtgaaaacccgacctggtttcgaccggagcattacaaaaaactgggtggccagctggggcacgcctataaccgtcttgttcaaaaagatcgcaccactggtgaggtgcgactgcgtatgcacgtatcgcttcatccgctgtacgtcagggaacgccgtcgggctggccgccggtatggcttccggccagaaaagcaacgtctgctggatgctatctggccagtgctgatcagtttctgtgatgccggcaagctgacggtcggtatgtgtatttctcgtctggcaaaagaactcagccagaaagacagtcatggaaaagttattccggaaacagaggtaacagtctcacgtctgtcccggttgattgacgaacaggttcgttttggtgtcctggctgtatctgaagaaaatagctgggacagggaatcgcgtacctggcttcctaaatacgtctatatcaccgcgttagggtttcagatgctgggagtggatctggaaaaacttgatgcggaacaacaaaaaaagctccggcaaagcgaagagcgtcgtcgtcttatcgaggaggggattctgcgtgaagatgaggagatctccccgcgtgcagcacgtgagcgctggtaccgtcaaaaaactctcgatgcactgaggttccgtcggcagcgtggcgccgagcgtaaacgagctaaccgcctggccagatattctcgtgagcgccagattcacgaaatgtcgcttcatatcctgaagacaatgccggcagacgaggcttactggtgtacaacggagcggctgcagcagctggccattcagaacctgtatcagctggatctggccctggctccgccgtcctga

SEQ ID NO: 179348 - DNA, 330 bp, Klebsiella oxytoca
atgaatgcgttgctcatggcgatgtgtttttattacgatcccctgtcaaataaagttctgcgctcactcagagagattgccctggagtgcggacttgcaactaaatctctttctggcgaagtgtccattacacgagcaatcagggcactggaatcgctggaaaaagattttgaatttgttgcctgctcatcggatcgctatttaactgctgagatttttttcacccctaagctgttcgaatttcttggcgtatttccactctctctgagcgaagccagactgaagtgtctggccgccaaaaacagcggcagggagagtgcagatgagtaa

SEQ ID NO: 179349 - DNA, 270 bp, Klebsiella oxytoca
atgtcacaggtagtaaacgcaattacttcctcatccaaacgttcctacagaaaaggaaatcctctttctgcagcagagcgccagcaaaaagcggttgcacgtaagaaagagacacacaaagaagtcagggtgtttgtcaaagatgccctgaaagataagctgcaggtaatgtgtgaaaatgctggaatgacgcaggctgagatgattgagctgcttattcaacgggcttcagtgaaacaggatagtaacgtaacgacgtcacattcttga

SEQ ID NO: 179350 - DNA, 537 bp, Klebsiella oxytoca
atgaaatactcagtattgtctggttttctggcagtgactttgttcgcccccggtggggtgatggctcagccaactgtacaggcggggttttctcctgaagggtcggcgttgcagctggtactgaatacgatcgttactgcgcagcaaagtattcgcttgatgggctacagcttcacttcaccggaagtaacgcgagcactgatccaggcgaaacagcggggtatcgatgtcagagtggtacttgactggaaagccaacagcgcgaaagggagtgcaggtgtggcggcgatgaatctgctggccaatgctggtattcctgtacgaaccgtcagccagtttaaaatcatgcacgacaaggtgatcattaccgacggccgaaacgtggaaacggggtcgttcaactattcccgcgctgcggcgaacagcaactccgaaaatgccctggtcatccgggattaccctgcgctggctgatacctatctgaagcactggcagtcccggtgggagatggggagggactggcttactacgtactaa

SEQ ID NO: 179351 - DNA, 789 bp, Klebsiella oxytoca
atgaatatcaaaactgctttaattgcggtggctgtctcctcttgtatgttaacccctaccctgggccaggccagtgaacattcttctgtattcaccccggaacaggaaaaaagaattggtgaaattgcagcagattatatgcgtgcgcatcctgatattcttattcagatgagcgaaaagctgcaggcagaacagcaggaaagggaaagtcgcgagttgaaatcagctgcgctggcacaacaagccagaattctgtctgataaaaacatcccatcatggggacccgctgaagggacggtcatggtcgtcgagttcttcgactatcagtgcatctggtgcagcagactggcaccagaactggaaaaagtcatgaaggctaacacgaacgtgcggtattacttcatggagtggccagtgtttggcagccgctggccggaatcacttctcgctgcgaagactggtctgcaggtctggaaagagaagggggcagaagcatatttaacgtatcataataatatctatggtaccgggctgaatgaaggcagactcacgcaggagattattgaaaaacaatccgggaaaataaattttaaccaacacaccattgaagcaatcaataatacgttgaagaatatcaatcagatcgccacaacaacaggcttaaccggcacgccgggtgtaattattatgccgctcaatggagcgacagaggataacaccaccgtcttttccgggatgacagaagcagagaatattcagcaggcaatcaataaagcacaggggaaataa

SEQ ID NO: 179352 - DNA, 585 bp, Klebsiella oxytoca
atgacggaagaaaaacgacccacgctcagtctgaaaaaaaagccagcagaacggtcgactggtactgagcctgaaagcccacgcattgtcaggcgcaagcaagtggttaatgtcaccacgccgccggcatggaaagtcaaaaaagaaaagctggccaggaaagcggagaagatcgcttcggctgaacctgttccgcctgaacccgctagcccagaaaaaaccaacaggaaaattcgttatctccgcttgccggcgttgcaggtggccattgataccctgcaaccctggtggcccgcactttttgatggtgataagccacgtctgctggcgacggggatccgggaaaccatatttaacgatatagcttcccgcgggataccgctgtcccataagcaggtcattaaatgtctgaaacggattactcgctctgaacaatacctgtcatcgatgatcgccggtgctgaacgcgttgacttaaatggtactccggtgagtgtcgtgactccggatgaagagcagtatgcgaagctgagaatggaaaagcagcgccggcagcaggcaagaattcagagcgatatggtttaa

SEQ ID NO: 179353 - DNA, 723 bp, Klebsiella oxytoca
atgagagcacaacacacatttcttggcgcgacagacagctggcttcagcgtctgctgacctggacaccgggacaaacggatatgattaaaacggtcgcactggtactgatggtgattgaccacactggcttactgctggccggaaacaatgaagtgatgcgcctgctgggacgcggttgttttccactgttcggactggtgtggggaatgaacctggccaggcaccaggaaatccgccagtcgcagctgaatcatctctggtgctgggcgatgatcgctcagggggcgtttatcctggtgggctatccctggtacatgggcaatatccttttttcattcgctgtcacggggcaggcgatgcgctggttcagcttacggacccgtaacgatatgcttctggctatcgctattgtgatcgcctgggtgccgttgtccgcggacagctatggcctggctggcgtctttatgctgatcaacagttaccggctgtgccgcgccacggaagcggtggaaagaacgggctatgctttactgtgggcggtaatggtcctgctgttgaatcttcatgatgccgggcagtctgtcgctggtctggcgatcgcccttcttgtcgtgagtgtgtgctctgatatcgggaaacaggttaaacggttctggccaccccatttttttgtattgttctatgctgttcatctggcagtgctggggattgtggctgcataa

SEQ ID NO: 179354 - DNA, 5259 bp, Klebsiella oxytoca
atgcttagtttcagccaggttaaatcagctggcagtgccggtaattactatacggacaaggataattactacgttatcgggagtatggacgagcgctggcagggtaaaggcgcggaagcgcttggtcttgaaggaaaggtggacaagcaggtcttcacggagcttctgcagggaaaactacctgatggcagcgacctgacctggatacaggatggcgtgaataaacaccggcccggttacgatctgaccttctcggcccccaaaagtgtatcgatgctggctatgttgggcggcgataagcgtcttatcgatgctcataatcgcgcggtgacagtggctcttaaccaggtggagtcccttgcctccacacgggtaaagagagatggcgtttctgaaacggtcctgaccgggaatctgattattgcccgctttaaccacgatacatcgcgcgctcaggacccacagatacacacgcacagcgtggttatcaatgcgacacagaacggcgataaatggcagacgctggccagcgataccgtcggtaaaaccgggttttccgaaaacatactggctaaccgcatcgctttgggaaagatataccagaactctctcagggccgatgttgagtctatgggttacaagacagtggatgcgggtaagaatggcatgtgggagatggagggcgtgccggttgagtcgttttccacgcgcagtcaggagctccgggaggctgcaggacccgatgcctccctgaagtcccgggatgtggccgcgctcgatacccgcaagtcgaaagaagccatcgatccggcagagaagatggtggagtggatgaacacgctgaaggagaccgggtttgacatccgggggtaccgtgaggccgccgatgcgcgagccgcagagctggcccgtgcacctgccgcgccggtgaacactgacggtccggatatcacggatgtggtgacgaaagcgattgccggtctcagcgaccgcaaggtgcagttcacgtatgccgacctgctggcacgcacggtcggccagctggaggcgaaggacggtgtatttgagctggcgagaaagggcatcgatgccgccattgaacgggagcagcttatccctctcgatcgcgagaaagggctgttcacctcaaacatccacgtactcgatgaactcgccgtcaaagccctgagtcaggaggtgcagcgccagaatcatgtctccgtcacgcccgatgcgtctgtggtgcgccaggtccctttcagcgatgccgtcagcgtgctggcgcaggatcgcccggtaatgggtatcgtttccggccagggcggtgcaaccggccagcgggagcgggtggccgagttaaccctgatggcccgggagcaggggcgtgacgtccatatcctggcggccgataaccgctcacgtgattttctcgccggtgatgtgcgtctggccggggaaacggtgaccggtaaatccggcctgcaggacgggacggcgtttattccgggcggaacactcatcgtggatcaggcggagaagctgagcctgaaggaaacgatttccctgctcgatggcgcgatgcgccataacgtgcaggtcctgctctccgacagcgggaagcgcagcgggaccggcagcgcgctgacggtgctgaaggacagcggcgtgaatacgtatcgctggcagggtggccatcagaccacagccgacatcatcagtgaaccggataaaggagcacgctacagccggctggcacaggagtttgccgtcagcgtgcgtgaagggcaggaaagcgtagcccaaatcagcgggacgcgtgaacagagcgtactcaacctccttatccgtgactccctcagacaggagggggtgctgggtgagaaagacacgaccattacagccctgacgccggtgtggctggacagcaaaagccggggcgtgcgggattattaccgggaggggatggtgatggaacgctgggatccggagacccggacgcacgatcgctttgtcattgaccgggtgaccgcgagcagcaatatgctgaccctgaaagaccgggaagggggccgtctggatctgaaggtttccgcggtcgacagccagtggacgctgttccgggcagaaacactgccggtggcagagggggaacgtctggcggtgctcgggaagataccggacacacgcctgaaaggcggggaaagcatcacggtgatgaaagtggaggaggggcagctgacggtacagcggccggggcagaaaaccacgcagaccctggccgtgggcgcgggcgtgtttgacggtattaaaatcggccacggctgggtggaaagtcccggcaggtcggttagcgagacggcaacggtctttgcgtcggtgacgcagcgtgagctggataacgccaccctcaaccagctggcgcagagcggaagtcatctccggctgtactcggcgcaggatgcggcgcgcacgacggagaagctgtcgcggcataccgccttcagcgtggtctcagagcagctgaagacccgatccggcgagacggacctggatgcggccattgcgcagcagaaggccggactgcgtaccccggcagaacaggccattcacctggccatcccgctgctagagagccaggacctaaccttcacccgcccccagctgctggcgacggcactggaaaccggcggtgataaggtcccgatgtggtctattgagatgaccattaagaaacaaatcaagtccggacagttgctgaatgtcggtgtctccccgggccacggtaacgacctgctgatatcccgtcagacctgggatgccgagaaaagcatcctgacccgggtactggaaggcaaagacgcggtggcccccctgatggaccgcgtgccggccagtctgatgacggacctgaccgccggacagcgggcggcgacccggatgattctggaaacccctgaccggttcacggtggttcaggggtatgccggggtggggaaaaccacccagttccgggcagtcatgagtgccatcagtctgctgccggaagagacccgcccgcatgtcattggtctggggccgacgcatcgtgcggtcggggaaatgcagagtgccggcgtggacgcgcgcacgacggcgtcgttcctccacgacacgcagctgctgcagcgcaatggccagacacccgatttcagcaacacgctgttcctgctcgatgagagttcgatggtggggttatcagacacggcgaaagccctgagcctgattgcggccgggggaggtcgcgcagtgctcagcggagataccgaccagctgcagtccatttcgccgggccagccgttcaggctgatgcagcagcgcagcgccgccgacgttgccatcatgaaagaggttgtgcggcaggtgcctgagctgagaccagcggtctacagcctgattgaccgggatatagatcgtgctctggccaccatcgagcaggtcacgccggagcgagtaccgagaaaagaaggcgcctgggtgccgggcagttcagtggtggaattcacgccgacgcaggaagaggagatacgtaaggcgctgagcaagggggaaagcctgccggcaggccagcccgcgacgctctacgaggcactggtgaaggactataccggacggaccccggaggcacagtcgcagacgctgattatcacccatctgaataatgaccggcgggcactgaacggtctgattcatgacgcacggcgggagaacggggagaccggcagggaggaaatcaccctgccggtgctggtcacgagcaacatccgtgacggtgaactgcgcaaactgtcgacctggacggctcacaagggggcggtggcgctggttgataacgtataccaccgtatcgacaatgtggataaggataatcagctgatcaccctgactgacagtgaaggaaaggagcgatatatctctccccgtgaagcctctgctgaaggtgtgacgctttatcgccaggaagagatcaccgtgtctcagggggacagaatgcgcttcagcaagagtgatccggaacgcggctatgtggccaacagcgtctgggaggtgcagtctgtttcgggtgacggtgtcacgctttctgatggcaaaaccacccgcacgctgactccgaaggcggatgaagcacagcagcatatcgacctcgcctacgctatcacggctcacggcgcccagggggccagcgaaccgtatgccatcgcgctggaggggatggtgggggcgcgaaaactaatggccagcttcgagtctgcttacgtgggattgtctcgcatgaaacagcatgtgcaggtctataccgacaggcgtgagggctggataaaggccatccagcattcacctgagaaagcgacggcgcacgatattcttgaaccccgtaacgaccgggcggtgaaaaccgcagatctgctgttcgggcgggcaaggccactggatgaaaccgccgctggccgggcagccctgcagcagtccggtctggcacagggaagttcaccgggaaaattcatttctccggggaaaaagtaccctcagccgcatgtggcgctgccggcattcgataagaacgggaaagccgccggtatctggcttagcccgcttaccgatcgggacggacggctggaggctatcggcggagagggaaggattatgggcaatgaagacgcccggttcgtggcgctgcagaacagccgcaatggtgaaagcctgctggccgggaatataggagagggggtcagaatggcccgcgacaatcccgataccggggtggtggtgcggctggccggtgatgaccgcccctggaaccccggggccatgaccggcgggcgggtatgggctgaaccggcgccggtggctccggtaccgcaggccggggctgacattatcctcccgccagaggtactggcacagcgggcggcagaagaacagcagcgccgggaaatggaaaaacaggcggaacagactgcccgggaagtggtcggggaggcgcgtaaagccggcgagccggcggaccgggtgaaagaggttatcggggacgtcattcgcggactggagcgtgaccggccgggtacggagaaaacgacgctaccggatgatcctcagttccggcgccaggaggcggcgattcagcaggtggcctcagaaactctgcagcgtgatcgtctgcaggctgtggagcgggacatggttcgtgacctgaaccgcgagaaaaccctcgggggcgactga

SEQ ID NO: 179355 - DNA, 2328 bp, Klebsiella oxytoca
atgagtttcaatgccaaagatatgacgcagggcggtcagatcgccaatatgcgctttcgcatgtttggtcagattgccaatattattttctacgtgctgttcattttattctgggtgctgtgcgggctgatgctgatgtatcggctcagctggcaaacctttgtgaacggctgcgtatactggtggtgtacgacgctgggtccgatgcgcgatattattcgttcccagccggtatacactattcagtattacggccagtcgctggaatatacctcagatcaaatactggccgataaatatactgtctggtgcggagagcagctgtggaccagtttcgtctttgctgccgtggtttctcttgttatctgtatcgtgacgttcttcatcgccagctgggtgctgggccgccaggggaaacagcagagtgaggatgagaataccggcgggcgccagctttccgataagcccaaagaagtggcccgccagatgaagcgtgatggtatggcctccgatattaaaattggcgacctgcctattcttaaaaactccgaaatccagaacttttgcctccacggtaccgtaggctccggtaaatcagaagtgatccgccggctactgaactacgtgcgtgcacgtggcgatatggccatcatttacgatcgctcctgtgagttcgtcaaaagctattacgacccgtcactggataaaatcctcaacccgctggattcgcgctgcgctgcctgggatttgtggaaagagtgcctgacgctgccggacttcgacaacatctccaacacccttatcccgatgggtaccaaagaagacccgttctggcagggctccggtcgcactatctttgccgaaggcgcgtatctgatgcgcgaagacgacgatcgcagctacgagaagctggtcgataccatgctgtccattaaaatcgacaagctgcgcgcctatctgcagaacacgccggcagcgaacctggttgaagagaaaattgagaaaacggccatctccattcgtgccgtgctgaccaactacgtcaaggctattcgctacctgcagggcatcgagaagaacggggagccgttcactattcgggactggatgcgcggtgtccgtgaggaccgacccaatggctggctgtttatctcctccaacgctgacacccatgcttccctgaagccagttatctcgatgtggctgtcaattgctatccgcggcctgctggctatgggggagaaccgtaaccggcgcgtgtggattttcgccgacgagctccccacgctgcacaagctgccggacctggtcgaaatcctccctgaggcgcgtaaatttggtggttgttatgtgttcggtattcagtcctatgcccagctggaagacatctatggcgttaagcctgccgccacgctctttgacgtgatgaacacccgggccttctttcgctctcctagtaaggagattgcggagtttgctgccggtgaaattggtgagaaagaaattctcaaagccagcgagcagtactcttacggtgcagacccggtgcgtgatggtgtgtcgaccggtaaagaaaaagagcgggaaaccctggtcagttactccgatattcagacgctgccggacctgtcctgttacgtcacgctgcccggaccgtatccggccgtgaagctggccctcaaatacaagccgcgtccgaaaattgcagagggatttattcagcgccgactcgatacgcgtgtcgatgcccggctcagtgcgctgcttgaagcgcgggaagctgaaggcagtcttgccagggtgcttttcacgccggatgcgccggcatcggggcccgctgatacaaacagtcacgccggtgaacaacctgagccgatcagtcagcctgcgccagcagaagtgaaagtatctccggcaccggtaaaagcgccgccgccaacgaagatgccggcagaggaaccctccgccagggctcctgcatcaccgccacctgaggcgcccgtcctgcgggtcacgaccgtaccgttgatcaaaccaaaagcagccgcagcggccgctgctgcctcaacagcatcctctgccgttacccttgctgcagctgcaggcgggacagaacaggagctggcgcagcagtccgcagagcaggggccggacatgctgccggccggcatgaacgaggacggtgtcatcgaggatatgcaggcgtatgacgcctggctggcagatgagcagacacagcgggatatgcagcggcgtgaggaagtcaatatcaaccacagccaccgccacgatgagcaggatgatgtcgagattggggggaacttctga

SEQ ID NO: 179356 - DNA, 732 bp, Klebsiella oxytoca
atgaagcttaataaagtcatggctgtgatggtcgtcagctctgcgctggtgttatctggatgtagtgcaatgggaaccgctattaaaaagagaaatctggaagtaaaaacccagatgagcgaaacaatctggctggaaccttcaaataataagacggtttatctgcaaatcaaaaatacctccgataaggatatgagtggcctgcaggcaaaaattgccagcgccgtcacttcaaagggatatcaggtcgtcagtaacccggatacggcgggctactggatccaggcgaatgtcctcaaggccgataaaatggaccttcgtgaatctcagggttggttaagccggggttatgagggggcagtgactggcgccgctcttggggcggggattaccgcttacaactccagttctgcgggagcgaccctgggggtagggcttgcagccggtctggtggggatggcggctgatgctatggtggaagatgtgaactacaccatgatcaccgatgttcagatcgcggaaagaaccaaaactcaggttcagactgataacgtggccgtattgcgtcagggaacatccggcgcaaaagtgcagacaagtacggaaacgggtaatcagcacaaataccagactcgcgtcgtctctaacgctaataaagttaacctcaagttccctgaagcccagcctgttcttgaagaccagctggcaaaatcgatcgcaaatattctgtaa

SEQ ID NO: 179357 - DNA, 534 bp, Klebsiella oxytoca
atgttaacccatcaaataatacaaagtgaagtcgaagagttaaaacagcttctgactgagagagatctgacgatcccctcattttggagttgcgtctggcctggtctgttatgtatgttgtggtttctgctgtcatcctatttttcttatggcatcagtgatttttcaactagcatggataagttaggagcaatggtgtttgcaggggcaatgggagtgttttcaatcattgcgatagcaaatacacgctcattgtttctatctctaccggaagatttcaggaggaagtcgatattttttaagtgtatatccaaaaaaagcaaggtttatggcttaactattttagttatgttttctttttttgcattcactacttcatcaattggatggaatgttgttggcttctgtgttttgactatgtttagtattgtaataacagttatggtgatgaatattgaccttggtcgttatcagttggctaccctgacgtgtgttattgaatcggttagaaataaaggtgtaaaactgcaataa

SEQ ID NO: 179358 - DNA, 2844 bp, Klebsiella oxytoca
atgcttgaggtatatgccattgcaggcggtgactggttacggggcaacctgaacgcgattgcggcgtttatggggactggcacatggtcgaccatagaaaagatgtgtatcgccatctcggtactcattgtggcggggaactgggtaaaaaaacacaacgtgatggaccttttgggctgggtcttttccctcaccctggtctcaatgctggttgtcattcgcacccctgtgcatatcatcgattacagtaacgttgcgcaggtctatgaagtcgataatgtacctattggtctggccattccggcgtcgctgacaacgcgggtaggcaacgcgcttatccagagttatgagatggtcttcgcgctgccggacagcgtcacgtacagtaaaacggggatgttatttggcagtaatctggtcgcgaaaagtacggattttttgtcacaaaatcctcagattacgacgctgttttccgattacgtacaaaactgtgtgatgggcgatatttttctcaatcataagtacacttttgaggaattactgaattcatctgatccgtataccctgatttttgcaaacccgagtccactgcgtggcgtgtttgataaaaacaaccagttccagacatgcgaggaggcctcacgggatctgaaatcggctctcgcgctggatactcagacaggcggtaaaacctggaactactatgttcgtcagctgtttggcggcaaacctaatcccgatctgctgttcagccagatgattggcgacagttacagttacttctacagctcgggacagagcgccgggcagattatccgccagaacgtcacgatgaacgccctgcgcagcgggatccagagttatgcggcccgcagcggcgataccgccagtctggtcaatatcgctaacacatcatcccttgaaaagcagcggctggcacaggccacaatggggcaccaggcgcttcgcacacttccgctgatgcagaccgttatcatggggataatgattgggatgttcccgatcatggtgatggccgccatgtttaatatgatgacgctgcaggtgttaaaggggtatgtgtttgcgcttatctggctgcagacgtggccattactgttcgccatcctgaacagcgcgatggcctactatgcgaagcaaaatggcgtcccggttgttctctctgagctgtcgcaggttcagctcaaaaactcggatattgcgaccaccgcgggttatattgccgtgatgataccgcctttgtcgtgggggatcgtgaagagcatgggagcagccttctccagtgcctacagccatttttcttcttccgggcttggtgcaacatcgcaggcggcttccggcgtggtggatggcaattactcgtttgccaacatgcagatggagaacgtcagcggctacagctggggtaccaacagcacaaccagtttcggacagatgtcgcggcagctggcgaatggaggcatgagcacgcagacgcgggatggctcgatggtctgggacagtggtggtgcaatgtcaaaactgccggtggatatcaacgtcggtcgtcagatagccagtgcgcagcaacagatggcccgtgaggctgatgtcctggccgaaagtgcgctgcatggctataacagcagcgtgacaagtgcctggaatagtctgcagcaatttggcaccaataaagggaacagcgcctcaacaacgaccggggccgatactaccgagtcttcgcaggattcaatggccagaagcaagatgtggaatgcggttgttgctaatgcgaaagccaacaacatcagtaatgaggagtctttccagcagttgatggataagtccactaagggagctgtgtctggagagatatacggtggcggaaaatggagttctggtgatcaactggccgggaaactgggtaaattggctaccgggttttctgctgatggaggtttcaaaggaagtgttgcattaagtggaactagtggttctactgactcgacaaacgaatctggaagggaatctcatgacagtaggcatgataccagtagtcaggcggcgaaagactttaaagaagcatccgattactttaccagccgtaaaaccaccacatcgggcaatattaccgataataatgccagctcgcgtgttgaccagttttccgcgtcactctccagtgccaaaaacagctatgaccagtatacaaccagccggacacgcagccatgagtacagtgaaatggcttcgcgcacagagagcatgactggccagatgaacgaaaacctgactcagcagtttgcgagctttgttcagcatcgtgctccacaggatgcagaggccattctgaccaataccagttctcctgaaattgccgcgcagcgggaagccctggcgcgtgaattcgtcaaagagcaggttgaacccagagttgatgctgcgtatcaacagggtcgcgaaagcatcggtcagaatatgacaggggtgtcaggtggtggagacaatggttcggtaatggctgactacggacaaaattctggtcgtatcgattccatgacgcaagacgctggtattaaggataatgtgggtcagaaagtggatgggatgattgcagagaataaacaacagcatcaggaaacccgtgaaaacatacaacagcaaggcgttgaagtgaaaaaagagaatgctgagctggaaaatgaccacaaaacaaaaggaaatgatttcaaaaacacttataataacaaaaaggaaagtcagactaaattgcctggcgcagatacaacaaaagaattgttggataaggcaagaaaattagaaaacgagacatcaaagagatag

SEQ ID NO: 179359 - DNA, 1392 bp, Klebsiella oxytoca
atgctgtgcgtaatggaggacaggatgcgaattaaacttctgtcactcttctgcggtgccgcgcttggcctgtcatttagtgccgccgccgacgtgaatggcgacatgaaccaattcttcaataagcttggctttgcgtccaataccagccagccgcaggtctggcagggacaggcggcgggttacgcctccggcggttcgctgtatgccagaacgcaggtgaaaacgatccagctggtcagcatgaccctgccggatattaacgccggctgcggcggcatcgatgcgtacctggggtcgttctcatttatcaacagcgagcagctgcagcgcttcggcaaacaaattatgtccaacgccgcgggctacttctttgaccttgccctgcagaccacggttccggagatcaaaactgccaaagacttcctgcagaagatggccagcgacatcaacagcatgaacctcagctcctgccaggccgctcagggcattgtgggcggtctgttccctcgcacccaggtggcgcagcaaaaggtctgccaggacatcgccggtgagagcaacatttttgcggactgggcggcttcccgtcagggctgttcggtgggggggcagatggacaaagtgcaggataaagccagcgataaggacaaggagcgtgtaatgaagaacatcaacattatgtgggatgccctgtccaaaaaccggctctttgacggcaataaggagctgaaagagtttgtgatgaccctgaccgggacgctgatttttggtgagaacagtgagatcaccccgctgccggcacgcaccactgaccaggatctgattaaagccatgatggagggcggcacggctaaaatctatcactgcaatgattcggataagtgtcttaaggtcgttgctgatgccaccgtgaccatcatctccagtaaggcgctgaaaagccagatttccgctttgttaagcagtatccagaataaagcggtggctgatgaaaaactgacggatcaggagaaagggtttatctccagcaccaccattccggtgttcaaatacctggtcgacccgcagatgctcggtgtgtctaactcacttatttaccagctgacggactatatcggctacgacatcctgctgcagtacattcaggaacttatccagcaggcccgggcgatgatctcaaccggtaattatccccagtcgacaatggatatgatcatggaaaacctcaaccaggcgagtgtccagattgccgctttccagtcccgcgttcaggtccagcaggacgccttgctcgtggtggacagacaaatgagttacatgcgccagcaggtctctgcacgcatgatgacccgctaccagaataactatcattttggggggaatcagtaa

SEQ ID NO: 179360 - DNA, 444 bp, Klebsiella oxytoca
atgaacaaatatatacgttcgacgggactgtatgcgtttttatttccagccagtttaaaagcacccgggcagacagcagcagaaaaaatagaacaactgaagccggaatttgtccaccgggaaaggcgtatggaaatctatctggaattattcattgtgtttctgactgcaggtgccctgctgttatggataatgagatttttatttaatctctgcgtggctgactggatagccagcggtgacctgcgagtaaaagacctgtggaatattatgatgtacgccatcccttatgcgctgatggctgtcgggatggggttctttgttgccggagtgacattagcgatcctcaaatttttcagtcatcacctgaaaatcctttttattctgagaaataacagagttaaaaataatgctgtgcgtaatggaggacaggatgcgaattaa

SEQ ID NO: 179361 - DNA, 558 bp, Klebsiella oxytoca
gtgaaaagcagcctgaagaacatcgctaagacgccgctggcggtgctgtctctttcccttgcactggccggactggcacaggcgggaacgctcgatgaggtgaagtcgctctgggatccgcggggaatctccggtactgaaacggcttccccgcagagcgacactccccaggcggtgagcggggcatctcagccacgctggttacggctcagcaacggaaagcaggtggacctgcgcgactggaaagtggtgctgttcatgcagggacactgtccctactgtcataaatttgacccggtgctgaagcagctggccggacagtatggcttctccgtgttctcttacaccattgacggacagggtgatgacgcgtttcctgaagcgctgccggcacctcctgacgtgatgcagacctttttccccaatatcccggtggccaccccgaccacgtttctggtcaacgtgaacacgctggcagcgtacccgatcctgcagggcgccacggatgcacagggctttatggccagagtggatacggtatttcagatgatgcactga

SEQ ID NO: 179362 - DNA, 240 bp, Klebsiella oxytoca
atgcgaaagattcgttttccggatttagatatcaccgggatgtgggtgctggccgtgggcgtgtttttccacctgatagcccggcttgtcagaaagcagcctgagctggccgtccaggccggggaaatcttcgggctgggaatggtggtgttcgggggataccgcattcttaacgccctcattgctgaagccgaaaaagaggagaaagcctgtgaaaagcagcctgaagaacatcgctaa

SEQ ID NO: 179363 - DNA, 753 bp, Klebsiella oxytoca
atgcgaacaatacatgccgccatgctggcggggtgcctttactgcgccctgatgccggctttcgccaaagatgcgggctggcagtggtacaacgagaaactgaagccccgtgatgaggaaaggccagccgcaccagcggcaccaccgccgcaaatggatattctggagaaactcgccacactccaggcggccaccaaacggtcgctgtacgaagccattctgtatccatcgtctgaaaacttcgtgaagtacttccggctgcagaactactggacgcagcaggcaggtttgttctcgatgagtgcgaagaaagcgatgctggaaaacccggaactcgattacaacctgcagtacagccactacaacggcacggtaaaaaaccagctcgccgccgactatgccgaacagcgtcaggctatctccaccctcgcacagcactacggcgtgatgttcttctaccgggggcgcgaagcgatcgatggccagctggtccaggtgattaaaaacttccgcgaaacctatggcctgagcgtcataccggtgtcggttgacggcgtgattaaccccatgctgcccgacagccggacggaccagggccaggctgagcagcttggcgtgaagttcttccccgcgatgatgctggttaacccgaaaagtggccaggtgaagcctctcagttacggctttatcagtcaggacgacctggcgaaacagttcctctatgtctccagcgactttaaaccgaatttctaa

SEQ ID NO: 179364 - DNA, 327 bp, Klebsiella oxytoca
atggaagagagaaaatcgtatggaatggtggtgctgtttgtcagcgtgtttgttgtttttctggtgagcattatgtcgtacagcctgtggcgggacaggcaggttaacgcatttatgaccactaaccgggcctgggggatccagtgcgacactgtttctcagaccgcgtgggtggtcagggacggggagcgggtggaccttcagataaatcatctgcctctgtactgcagcggttaccgctttgaagcccgtgatgatgcaggaaaggtacagcgccagctcgataaatacagtgtctatcagcatctgtcacgccagtcgcaataa

SEQ ID NO: 179365 - DNA, 228 bp, Klebsiella oxytoca
atgaaagttaattttcacaaacagcctgccattgattttgtcctgagattaacgctgacaataatcattatttttccggtgatttatttctcctgggatgccgtcaaagggacatcggggagtgattatgtcgagagtgtggtctttattctctgcatgggcggtgtcgggcttatgaattatctgtttttttcggcgctgaccagacttttacagaagggaaaataa

SEQ ID NO: 179366 - DNA, 282 bp, Klebsiella oxytoca
atggctacgtccttgatggtcgttgttttgcttgtgctctttcttttcattccggcctgcatcgccctgttcatgtcaggccgcagtctgctcctgatattcctgggggccgtggcgtgccaggcggctgttgccgttgcgtttgcaggactgtctgcccggggctggtctgagtcgatggggatgggggcggcatcactcattttctacgttatcgggctgcacaaggctgacggtgtaaaacagaatactcataacgggagagaaaagaatgaaagttaa

SEQ ID NO: 179367 - DNA, 1956 bp, Klebsiella oxytoca
atgaagacggttatttccgtgctgaccgcgcatttttttgtcctgagcgccttcatctggctggcatcccccgcctgcgctgacagcggaagtgactataaagccggttcggattttgcgaaacaggtgcagggcaatggtctgaactcactgaaaaatttcagtggtgagcaaaacctgccggggtataccgacaacccggatcagacaaaatactacggcggcgtcacagccagcggagacagctccctgaaaagcgattcagccctggcgttcagccagggatataccggcaaagcgattacggagtcgttcacgaaccggccaccggatcagatatctcaggatgcgccgtttattcaggccgccagggatacagaatcccgtgccgacagcattgtcggtgataccggacagtcctgtaccgcccaggttgtgaaccgcagcgagttcaccaaccatacctgcgaacgtgatctgcaggtggaaaatttttgcacacgggaagcgaccctgaaggataacgccaccacgcagaaagttaaccgaacctatcagcaggtggtgacgctgaattatgcccggagtacccggcaatggagtggcaacctgacgatcccgaccaacggtcgtctgctgaatgcctcggtggatggtgagcctctggtcatcccctggattgaagaatgcgacgccgaagggaaggtgcgggatagctgcaagagtgcagtcagtgaaagcctgaccctctttgaacgaacgttacccattgatgtgatcagctggccacgatcagaatcgatatgttcaggcggccagaacacgcattgtacgaaatatacctatgacgggcaggggaagattcatcagtcgtttggtgtggacaaagcggtcactgcagggcagaactttgctgtaagcaaaatatctcgaaccgtatcatcggccagccagaaacccgtacaggtcacggtcaccctggtgatggaggaaaccgaaaccgtctatgcacctgaagtcgtctgggtggaaagctgtccgttcagtaaggatgaaggaaataaaacgggcgaggaatgtatcagcccgggaggaacgcgaaccatcaccctcggaggcagggattactcgttcacggaagcctgctggaaatataaggatacctggctcacgcagccggcggacaacggctcctgtgaaagcctgatgaaaaatacggcctgtaccctgtcatcccgccagtgcgccttctccagcgaggaaggcacgtgcctgcatgaatatgcaacgtattcctgcgaaaccaggacgagtggcaagcaaatgatctgcggcggtgatgtcttctgcctcgatggtgaatgtgacaaagccacgtccgggaagagcaacgactttgggcaggcggtgtctgagctggcggcactggctgctgcggggaaggacgtcgcggcactgaacggggtggatgtccgggccttcaccggaaacgcgaagttctgtaagaaatttgctgccggcttcagtaactgctgcaaggacagtggctggggtcaggatgtggggctggcccgctgcagcagcgaagagaaagcgctggccaaagcgaaaaccaacaagctgaccatcagcatcggggagttctgctctaaaaaggttctgggtatttgcctggagaaaaaaaggagctattgccagttcgactcaaaactggcgcagatcgttcagcagcagggaagaaacggtcagctgcatatcggttttggcggcgccagcagcccggattgccggggcattaccgtcgcggaactccaggggattgattttaacgagctggatttcacaaacttcatggaggatttaataaataaccagaaaatcccggataacagcgaactgaccgaaaaaacaaaagcgcgtattaaagagcttctcacgcagtcttcagcaaagtaa

SEQ ID NO: 179368 - DNA, 384 bp, Klebsiella oxytoca
atgaaagagaagccgtaccattatatcgacaacgatatccggtacctggtggcttgtatgaatgcttacgcgtacaggacgtatgcatcctgtcatgggcacggctaccccgtcgatatcgtgatgccctatgttgctttcacctcgtctgttacccaggcctcacggctttgccggcgtctgcgcgcagatgctgaatcaggagagcctgagctgaactggggatgggaaatcaccggcagttttgattcagtgtattccctctgcttccggctaaatccgacgaagccacataacaacatgagccgctggcgccggaacactctccggcaggacctgatggcgttaccgggaatggtgaaggatgcgggagggtggatatga

SEQ ID NO: 179369 - DNA, 639 bp, Klebsiella oxytoca
atgaaattaatgaatctgtttatggtcatgcttttgttgaacggacgagcagtgttggctgaaacttcctcggttacagacagggaatggctgaagcagcaggagaacctcagcgaacagctgcgccagcatccggataaacagctgcagcaggagcttgaggcgcaaatcagccgcaatcctctgcccaaatctgaccgccagtttatcgataatctggtcagccagcagaaagcggcgaatcaggaaaagccgacagaaggagcgctgtactttgtctccttctcgatacctgaagaggggctgaagcggatgctgcacgaaacccggctgtacggtattccggcgacactgcgtgggctcgtcaataacgacatgaggaccaccactgacgcggtactgcagctggtgaaggatggcgtgaccgacggagtgcagatcgacccgacactgtacacgcagtacggcatccggagtgtgccgtctctggtggtacggtgtcaggccgggtatgacgtggtacgcggtaacattcacgtcaaacaggcgctggagaaagtggcacaaaccggtgactgcgcactggtggcccggcagatgcttgatgcgccctcgaatgccgccgggagccagccatga

SEQ ID NO: 179370 - DNA, 993 bp, Klebsiella oxytoca
gtgaaaaccctgacgcttttcctgagtgccctgatgttgtgggggtacagcctcagtgcggctgctgacccctcctgtgagggccggtttgttaacccgatcaccgatgtgtgctggcgctgcatcttccctctgtcgctcggcagcgtgcaggttggtaaaggcgacctgcctgataccagcaatcccggcagtcccctgcagctgtgtccggcgccgccaccgctttttgttcgccccggcctggccatcgggtactgggagccgatggccatgacggacgtcagccgttcgccaggctgtatggtcaatctggggggcttcagtatcaatctcggcaagaccggcatggggaccgcgagaaaggatgacaagcaggtgaacggcgccttctatcacgttcactggtacaagtacccgctaacctattggctgaacatcatcacctccgcaggctgtctggaaggcggcgacatggatattgcctatctgtccgagattgacccgacctgggtggacagcagcctcaccaccatcctgaatccggaagccatcctgtttgccaaccccatcgcgcagggcgcctgcgcagcggatgcgctggccagtgcattccatatgccgctggatgtgctcttctggtgtggtggaagtcacggctcactttacccgtttaacggccaggtcagtaatgagtccagcccgctgcagtcgtcgctactggtcagtgagcgtatggccttcaagctccaccggcagggacaaattatggagagcatcgggaaggacaaggcggtctgttacgaatatccctccccgatcatcccgaaagaacgctggcgctatcagatggtgaacatgtacccggacagtggtcagtgccatccgcttggacgcagcgtgatgcgctgggaggccggcaaaaatccacccaacacccgcaagaactacggctatctgatgtggcgtaaacgcaattgtgtctttctctga

SEQ ID NO: 179371 - DNA, 627 bp, Klebsiella oxytoca
atgttacgactgaaaggctgtctgctcgccgcctgtctgctagcgccgctgactcaggcggctgatctcggtacctggggggatttatggcccgtccgggagcaggacatgctgcagctcatcacgcagcgtctgcagtcgctgcaatcctctggccagtgggaccagacgatggatgcgtttaagcagcgggttatcgagaacagtcagcgtccggcgccggtggaaggcattaagcgtgcggagaaatacgagcagcgctggtttgatcccagcatccgcctgaccgaagacctgaaggacaatgaggggcgggtgtttgcccgcaagggcgatgtggtgaacccgcttaaaaccgtaccgtttgtccagaccctgtacttcatcaatggtgacgatgccgaccagctggcctggatgaagcgtcaggtgccggaaaccctgatgagcaaaattatcctggtccgtggcagtatcccggacacctccgcagcgctggacagccggatctatttcgaccagaacggcgtactgagcaagcgatttggcctgacggcggtcccggcgcggatcacgccggcgccctccggtgaacggctgaatattgagaccttccctgtaaaataa

SEQ ID NO: 179372 - DNA, 390 bp, Klebsiella oxytoca
atgaaaaacaacaccgaacagccagtcagtacgacctctcatccctttcgccgtatatcggtcatcgttgctctcgtgcttttcgccctggcaaccagcgcgtttctctcgcgcgtggttctggagtactccacgccgcgggtggtggcttttgatatgaagaagacgctcgacagctttatggacagtgtcagtcagaagcagctgacagaggcgcagtcaaaagcgctctctgatcggtttaacgacgcgctggagaagagtctggcggagtatcagcagcagcatcatgtggtcattctggtttcacctgccgtggttcagggcgcgcccgatgtgaccagcaacatccagcacgacattgcccgccggatgaaaggagaacagtaa

SEQ ID NO: 179373 - DNA, 276 bp, Klebsiella oxytoca
atgattaacggcttcggctcggccaaagagcagtggttctcctcttttatgctgcaggtggaagcgaactgctcctggcaccgcctgttcgtcgacccgctcagccgggcgatgtactcctcaaaaggcccggattttgagtacatgaaagcgcgccggcaggagggggtcgatatccacgatgcggtgtacggcctcgcgtgccacaactttaaagaagaaatggctgagcttgaatcccgaataccggtgaatgacatggaggataaacagtga

SEQ ID NO: 179374 - DNA, 642 bp, Klebsiella oxytoca
atgcccagaagaacgaaagaagatgcgttaaagacgcggcagcttctgattgagtctgccattcagcagtttgccttacgtggcgtgaccagcacgaccttagccgatatcgctgatgctgctggcgtgacgcgcggagcggtgtactggcactttgcaagcaaagctgagctatttaatgaaatgtggcaacagcagctgccgctacgcgacctgcttcagcatgaatttaaccttaaagacgatcaggatccgctcagcacgctacgagagaaatttattattggcttacaatatatcgccaataatccccgtcaacgtgccttaatgcaaattctgtatcagaagtgtgagttttccagcgacatgatgccggaagctgagattcgcaagagaattggttttagctatccgattattcgcagcattttgcagctctgtattcgtaacggattattgccagcggaaaccaatgttgaaatttcattaattgtattacacagcgcatttaccggtattattaaaaactggctggtggagcccgggcaattcgatctgtatcgccaggcacccgccctggttgataatattatgtcaatcctttgcggggctaatgggcagcagacgatagccagccattaa

SEQ ID NO: 179375 - DNA, 2484 bp, Klebsiella oxytoca
atggttcgatatgagctacagcgcctgccgggcgcacctaagcaacgcggaacggaagaaccaggcacacagttgatcgccttgctcgacaagctgaagctacacaataacgtcgtggtgaagctcaacggccgcaaactggatgatgattttgacctatcctgtccgctgcgcgctggcgatgtggtttcggtatttgaccagccagagggcggcggactgattaaaacgctgctcaacccgattgagcacctgaacccgatccgtttcaccaagaaggtgctgtcgggaatcatggggcaacagactgcatcatctccgtccatttccactggtgaatccccgaataacgacgccaccgggcagaccaaccgcgcgcggctgtacaagggaaggccgaatatttatggtctgtgccgggtatatccggatttgattcagcaggcgctgtttgagtacatcgacaacaacaaattcatcactgaatggtttgaagtgggcttcggtaaatacaccatttcctctgtccgatattctgagtcgaatctcgggagtctggccggcgccagttatcaaattttcgaccctggcgtgacgataggcaccattgatgttgggtatcagtttgatgacgtcgataacgaagaagtgcctgggctgaatgaaagtgaggattttcccgcccagacagcgacgacgacagcgccgacagccatgctgatcgaaagcaaccagctgaaagccacagtgttgtcgaatgatgataacttttcatacttcgcggcgcttgccgttccgcatccggtgactttcgttatcaacgcgacatggaactccggcggcggcccggtgacgaggaacgttaccggcagcggaaatatcgtctactcagaaagttatatcggggaggatacgcagtcttacaccacgttctatcttggcgatatgacaggggaggttacgacgctaccggcggacgccacgctgaacctgacacttttcaccctcaacgaccagacgccgctggtgattggcccgtcggtttcaccattggtgtcatctcaggtatgggtgcacgtaatggtgcagctcggcgcaacggcgggaacgtcacgctatcggatccggttctggaaggtcgacgacagcaacaaccagatacctgggacttcagagcagtacgattatttcttcgataacgatttccaggtgactacgcggtattttcgcacctcgcacaaatacacaccggccgccggcgccgggcgttacgctgtgacgattgagcgcctggataacagcaacgatggtaacgtcgtgacactgatggcgatccatgcggtgaatgtgcgcgaaaacgtgatttaccctgacgacactatcgccaaagtcaccataaaggggccgaacaacagcaacagtaaccgcgagcagaaatataacatgctcgcacagcgccataccatcagctacgaccgcaccactggcctgattgattacacgctgcgcccaagccgctcgtttgccgacgccgtactgcatgaatggatagtcatcggcaggcaggacgctgcgagcatcgatatcgctacgctgtacgcgatcgccgattcgataacagttcctgagttgggatacttcgattacaccttctcggatgaaaagttgtccctcggcgagcgcatcaaaaccatctgcaatgtggcccgagtcgatgggaacaacatcggtgatgtgctgaccttctggcgtgatgagaaagtcgagaatcctgatgcggttttcgcgcgctcaaacatgttctgggacgagtataaagtttcctggcagatgtcactgcccggcggttacgacggcgtcacggtagattatgtcgacccgctcaccaacaagaaggcctatatctacctgcagattgaccagagcgggattgttgaggttgaggatgcgaccatcaacgcgttgcagatcagcctggacggttcccgtaacaaggtgcaggcggaggacagggcgtggcttgaggcgcgccgtattatgctctcgcgcgtcggtatgacggtgaaagttctggaatcgacgcaagttatccgcggcgcggtggtgcagtgtcctgatatgtacgataacaagcagcagaacggatatatcacctcccgtaacggggatgtgttcagtacctctgagcgcatcgattttacgctcggagatatgtgggtggtgatgactgacagcctcggcaattaccgcgggcgctggcgggcctatccggtaagtggcaaggccaaggcattccaggccgcagccgataccttcgaactcaacatttatgaccgcgcaaatgtgcaaaacccaagccggtatttcatcgctaccgattcagagcttaactccacaatctggcgtgttgatagcgctaaacccaacggtgacgatactcaaaccatctcactcactgagtattcagactcgatttatccgtaa

SEQ ID NO: 179376 - DNA, 396 bp, Klebsiella oxytoca
atgacacagagcgaatttatcgggctggttaatggcaagccctgggctaaccgcgcctgcacgttcgacgaggtggattgttggggtctcgtcgttttgtattaccggcacgttctggggctggagctccaccacgtcgcaggatacgaatctggctcagattttatcacctgctacgaagaagagctcgaacactggcggcgggttccagtgcctgtttccggctgccttgcggtgttctattacggcaatcagccggcgcacgtcggcgtgatgattaacccgggtaaatgcctgcactcccgcggcgagttcggctttgtccgcatggacagcgccgtcatccttcagaaaatctataacaaagtggagtatctggtgcatggttcgatatga

SEQ ID NO: 179377 - DNA, 471 bp, Klebsiella oxytoca
atgccgacattaagagagtggaaagagcgccgcccggcgagcgacatcaaacagaccattgagttttatcacccggcgttcggttactaccgcgtggccaataagctgtttcgtgaagcgtcgtttggcgggaacctttaccagcctgcggcattcgacatcaccgagcccacacaaaacgggtcggccatcatcacaatggctatcacgttcctgcagggcgccgaggacgtcaggaacacgcttaagagctggacaggcgccgggcgcatgatgcccattacctgcaaataccagcaatggaatgcgatcggcgatacgacgccgatgaagacctggtcgttgtttgtgaaggacgtcggcgccgatggcagcaacgtcacggtgaactctggcaagaccaacccgctgacgctggccaaccccatcatttacaccacgaaagactaccctgggcttattaccgtatga

SEQ ID NO: 179378 - DNA, 477 bp, Klebsiella oxytoca
gtggcaacagtttcatacccggatacgctgccgcttcctcagcgcgcagaccagaacatgacgcaggatacggcgtggcagacaacgcagccggctgtcgggcctgtcatcttcacgccgttaaccaccgaccttaaatcgacctggtcgctgcagtggaaattcacgctgcagcaggcggagcggtttaaatcgtggctccgctcaccgacgtactgcgaccgtggccgtaactggttccagatgcggattgacctcggcgatacacagggcgtgcagctgcagaccctgcatttcatcagcatgccggtacaggccagtaaaaacggcaatatcgtcatctggaccgccagcgtcatttgcaacggtatcgaggacatcaccgaggactacgacgactggatcgtcgaggcgccagagaactacggctactggctggattacctgattaccgctgttatgccgagggctgattaa

SEQ ID NO: 179379 - DNA, 177 bp, Klebsiella oxytoca
atgtctggtttgattaaccccaaagactcccctgaagagtcagcctacgcactaatcatcgaactggtgagggcgcagagggtccctgtatatagctcaggaaacatctcaagtctgctttccatgtatgacgatgccgttaagcacttcaaagaagaaggtgacgacaaaagttaa

SEQ ID NO: 179380 - DNA, 2724 bp, Klebsiella oxytoca
atggcggaaaaagcaggtgagatttattatgacattgaggcagatgtatcagggctgatccaggcacagcagcaggtaaataaacgtcttgatcaaatggattcaaagtttgaacagtcttcgagatctgctggtcgatttgagggtgccttaaataaggttggcgttgccattgcagcggcttttaccattgatgcagcaaaaaaacttatcgctataggcgatgagatggtcacgcttcaggctcgagtggctcgcctaagccccagcattgatgtagccaaagaaaccttatcagccttatctgccatcgcatctcaaacagggaatagcctatctgagactgaaaggttatgggagtcgttaaccacagcattaaaagaaacaggtgcgacgaattcacaaattctcggccttacctctacgcttcagaaaataggtactatcggcggttcctccacagaggaaatggccaatgctttaaggcagtttgggcagtctatttccggcggtattgtgcgcgctgaggaattcaactccattcttgagcaaatgccagagcttgctcgccagattgctgctggtcttggaatatctataggcgaacttcgcaagcgaatgctggaagggaaactaaccgcccaagatgctctgaatgccatacagaaacagtcgcaatcggtaaacgaagagtttgataaaatgccggtcagcattgatcgcgcaaagaacagtcttgatgttgccttcaaaaatgccattaatgacttaaaccaagctatcggcctcacatctacccttgctgggttaatgcaaaccgtcgctgacaaccttaattactacaacaataatgtcggcgattcatcgagaatgccgaaactaattaagctccagcaggatttaaatagtgaacttaaggacagtcagcgttggtatgagtcggattcagttttccaggctcgccgggcgcaagcggctgttcaacttaagcaggttgaaggcgaaattgcccacataagagcgaaggcgcaaaaagatgctgggaataatcaattcagcgcaccaccaaccaagggcgatgacgccgccacaaaaaaactggtccagaactcggagcgccggcttgcgctagccaaacttgaaggcgaggcgcgagccaggcttcaggcccaatatgatgctgctgatgctggggtgactgatccgaagcgaataaaagcgctgcaggatgagtatgccgaaacctaccgtgttacggaggctcggaaggaaagcaacaaagcgggcaagcaatcagcatctaccgctgagtctatagcgcagaaactcgaaaatctacgccagcagtcagagcttgcagccagttcaacgcaggagcttagccgggaacaggcgatattacgcgcgcagcagtcactcggaagcgcagcaactaaggcgcaaattcaggaagcagggcaatacgccgctaaagcatgggatgctgcagcagcggcaagaggtgtaacggaagccctcaaggctataccggagcaggcggagaataaatcctacaccgaatccatgcagaacctaaaagcggcacttaatgccggaaagattgacctgcaggagtacaacgcagctactgagcagatggagcaacagcaccaggctaatctggctaagatacgcgcccagcaggtggttaacccaacacagcaggcagtggctgaggttgacccggtccagcaattggccaatcaacacgctcaggaactggccctcatacagcaatttgaacagcagggcgtattagcccatcagaacgcgctggctctaaaaaatgcggctgatatgcagtatgagcagcagagagttgcagctcagtgggcattgttcacgcaacaaagcgttgggtatgaggcactcggcgccgcggttgatgcatttgggaatcaggcttccaatgcgctcaccggaattattacaggcagtatgtcagcctctgatgctcttcagtcaatcggaaacacgatcctgaacgacgttataaacacgttcgtgcagatgggtatccaacaagccaaatctgcaatcatgggggcaagcgtacagcaggccactatagcggctactacagcaacgcaagtcggagcgctcgccactaccactgcggcgagtacggcctctgctggcacgacaatggcggcctggcttcctgccgctctggttgcgtctgtgggatcgtttggtgctgcagctatcatcggtggtgctgcgctggttggggcgttcgcgctgtccaaggcgttaggccgtaagaatggcggctcggtgtctgctggaaatctctatgagttcggcgaaggtaacttgccagaagtcatgcagatgggtggcaagagttacatgctgcctgggaacaacggtcgcgtattcagcaacaaagacgttacaggtacgccaagcatcaaaaaggcctcaacgggtagcgaataccttagccagagcagcagcggcagcggctcaaccggttctcaatcgtcgaggccaatagaaatcaacttccagttctatgaccagacgaccggcggccagcactcctttggggcccaggcaacgcaggaggggaatgttgttacggttgatgcgtttctcagagatcttgatagtgcaggcccgatggcttcaggtatggagtcgaagtacggcctccgccggcaagcatcaggcgactactaa

SEQ ID NO: 179381 - DNA, 330 bp, Klebsiella oxytoca
atgaaaaaagttttatttgtggccatggcgttaatgtcatttagttctatgtcagcaacgacagtaagtattccgactgattcgaaagctaaatacaccattattgataaagctatgaatggctccatggctaccatcacgaccatgagagatggcccatcaggcgtgtcttactctaagcgcctttacgactgtacggcctggactgtgaagtatcttggcgatggagacacgcttgatcagatgaatgcatcccagcctgacgatggcatgtctccgatagtagataattcaatagcgtattacttaggccaaaaggcctgcaaataa

SEQ ID NO: 179382 - DNA, 342 bp, Klebsiella oxytoca
atgaccgaagaagagtggctgaatgggcttcgaggattgcctgatgatgtgattctacagatccactttgacctccaagagaaaattaagaagcactataaacttcgagagtctggcaagaaccttgagaaggccattcatttttgtcagcagcaaatagcgcttgctcctctggccatgtctgccttaaagaaaaacccagccatgtacaatgacggtaagttttttgcgcctgggcatcatggatacaggcaatacgcgacgatcctacgcaagcaaaaggacactgctggcctagatggtctccttaaaaagaaaaaggcggaaggatgggcagactaa

SEQ ID NO: 179383 - DNA, 213 bp, Klebsiella oxytoca
atgcatgacaggattacccgtattgagatggttgctgaaaaccaggagaagctaattagcgatacaagagctgatttgcgtggcattcggtctgacatgaagtccatggaaaacaggattgttgacaaaatggacgaaaatcagaagtggctggttggtcttttggtgtcggcaatactggtgcctttgttcatcgcgttggttaccaagtag

SEQ ID NO: 179384 - DNA, 756 bp, Klebsiella oxytoca
atgacttctaagaatgtagcaaatgtaggttcaattgtcactgataaaactattgacagccagtcactgcttgaaatggtcaatcaggcgcgtaagcaatgcggagagaagccggtacgtaataacgtattcatcgatcgcattcgtgatgagcttgagggggagggttacaaaacttttgtaacccccatggacaagtctaagggcggcgccgatcaggtcgtaatcgaaatgacggtcaagcaggcactgcgcgtggctgcacgcgagtctaaggccgtgcgccgctctttggttgataagctggaagacatgcaggccatccaggtgccgaccaaaagcacatctgggcttactgaatatcggcttgccaaagctgagcaactcaaggctcaggcactggagaaaaacatcgcatctgctcgcgaactaatgtcaatgttccctcggcttggtgaatcggctaaccaggtgatcgttgccactcttgttaacccgcttctcggtcacgaagttgtgccactgccagcgattgaagagcattactctacggcgggtgaagtggcggcacagctcggttgcactgcgaacaagatcggtcgtgtggctaataagcacaacctcaaaactgagcagtacggcaagttctttctggataagtcgagacactcagataagcaggttgaggcgtttcgctacaacgctgagggggttcaggcacttcgccacctgatccatggtgctgatgtagcgtaa

SEQ ID NO: 179385 - DNA, 705 bp, Klebsiella oxytoca
atggtcgttaaaaacagcgaagcccagaagtgcgctaacaccctgggcctcttatcgaacaaatcccgcgaaggaaatatcgacatgaatagtgtacagaacaacgaactaactttccacaataccaattttgcatatatggaaatgggtggccaggtttggcttacggctgcagaggttggccaggctctggagtacgctgacgataaagcagtgcagcgcatctattctcggcatgctgatgaatttacagcgcaaatgacaggggtggtcaaactgaccacccctcgcggaatgcaagagtcgcgtgttttctctctccgcggtgcgcatttggttgccatgtttgctcgtacgcctaaagccaaagagttccgccgctgggtgctggatattctggatcgcgaagtcgcgcattctcccattgcgaagcagtttactgaagatgagctttgctctctggcttggttgtggcgagcgagtgacatcatgctgacagcctgtgagagcgttacaccattactgagggtggcggaacatcgacaagccgggcactttcacacgatcgggcaggagttgccgcggacaattaacaaggcaagagcgatcattaagcgcgagacggcgcatatcgaatttcacccatggaaggatgataactggagcagggtattaccacacctgcgtcaggagatgttgcaatga

SEQ ID NO: 179386 - DNA, 174 bp, Klebsiella oxytoca
atgcaagatacacttttcacagagcgtaaaaacatcaagctgaacctgcggcttcccgctcgtttagatcaggaaattcgccggttggcagaaatggattgtatttcattgaattctgcgattgttcgtttgctggctaaaggggttcgcgaagaggtggcaaatggtcgttaa

SEQ ID NO: 179387 - DNA, 354 bp, Klebsiella oxytoca
atgagcaagtaccccagccagatgcaagacaagttcaatctgcgatttccagacggcatgcgcgacgccatagctgagagagcaaagcgcaatggcagatctatgaactctgagatcgtgcagataattcaggacgcccttgatctggaatcatcggttacaacggccgatgacattgagttacacgcaacggcgcttagaaaaatcgaatcccaagaagagagagataaatttgtcaaagatctcgcaaacaaagacgcttttgccgcactgctactgaaggagcaagaggaataccataaaagaatgactcgtatcctcgttgaacacctcagcaaaaaccttgaaaaatag

SEQ ID NO: 179388 - DNA, 696 bp, Klebsiella oxytoca
atgacccccattaaagaattaggcgaatgcattatcggcagtggtgatcgggaattctttttccgtccgtcattcagggctatggcgcgcataggtgatccggctgaaatcgtgcagacgttttacgatctgtgcaacgatgaggcgacgccattcgcacagcgcgcagctgaggcctatatccgcgatgagtacagccgacttcctgattgcgtcctgcggtttatgcaaagcgggctcctgtcacgcaaagcgatcatggctgctcacacggtactgacagcatgttgtgacgatgatatcggcgatttggttggatggatgaagccggggaaatcacgcaagcgtggcttcgtctggcgcccgggcagcatgccgcctgaaattatggtcatcgtcgcgcaaaacctgatgatgcatggcattgccggtaaggcgaagattcgccagttgcagcgccatgaaagcaacgaaaccacttcggaattccgcgccactgactacatcatggcggcccgtaaccacttcggcataagccgggatgaggccgagaacctcaccatgacggagtttgcattactgctcaacgccaaatacccgaatcagaaaggatttacccgcgaagagtacgacacggttatggacgaagacgatcggcgctggcaggcgatgatgcagcaggagcagaaaaaatag

SEQ ID NO: 179389 - DNA, 765 bp, Klebsiella oxytoca
atgcaaggctgtgctaatgataccggcaagctgattggtaaggtggccgtgctacgcatggcttttggctgtgctgataccgttccggccctttccgaatggaaacgcctgggcgcgctaaccacgaaaggtttcgactactccatgaataccgtcacctctgaggctgacgatacgaaaggtctggttgagaacctggtcaacaacatggacttcaccatctccggggaaggtgagttccgcaaaaaagataaaacgactgaaatcggcgccatcgctatctcgaaatatattttcgatgaagtccaggccggtcgccagccgacactgtgggtgcgctttgacttcactggtgaagacgccggcacttatatcatgggttatttcaacacaacctcatggtctggtgatttcggcacctctgatatttccaccttctccggtgagtggaaagtctacgacgctgacactgtcgtgtttgaagtagctggcccagcgctggcattcaccacgaacctgacagcaaccaagacagtggccgctggctcagcccttaatatgtcggtagcggtcgatggcggcacctcgccttacacctatgtgtggaagaaagacggctctgtcgtcagcgggcaaacaacggcgacgttcaataaggccagcgctgtttccggtgatgcaggcgtttacacctgcgaagtcaccgattctgcatcaacgcctgtgaaaatcacgtccgttgcgtgcacggtgaccatcagctaa

SEQ ID NO: 179390 - DNA, 384 bp, Klebsiella oxytoca
atgacacctgcgatgtacatgcgcctcaaagacctgtttgtggctcaagggcttgccgcggggtttaaggtgcaatggcggcaatggcgcgataccgggaaagacgccgatcagttcatcgttttccggccgtccggcggtaccaatatcgagtacgaccgcggcggcgactggtatgtgatgatcgacgtcatttcttcgaaagcgaatccagatgctgcggacaccgcggtgaacgccatcgtcgagtatatcagcgcgcaatccggcgccgatgattgcgtaggtgcgctgcggcttgtcggtaatgtcccggcgccgatcaccaccgaagagggccggttagtaaccaggctgctcgtctcctgcacatacggcgaataa

SEQ ID NO: 179391 - DNA, 369 bp, Klebsiella oxytoca
atgggcgctaaagttcgcggcatccgccaggctaaggccaaccttgaccgcatcattaaggacgtacaggggcgcaaggtagtgcgcgcgttgcagtctgcgatgcttatcggtagcgcgcaggcagcactttataccccgatcgacacgtcgacgctcatcaatagccagttccgggaaatcactgctaacggtgtacgcgtgaccgggcgcgtcgtctatacagctaactatgcggtgtttgttcacgacccggaggtgaagcagaacttcaggcgcacgacggcgcggaaagagttcttaacgaagggcttcgaggatacccgcagtcagattgatgcggcggttaaaaaggatctttcgctatga

SEQ ID NO: 179392 - DNA, 363 bp, Klebsiella oxytoca
ttgagctcgatagcctcgtggtcatataccgcaacagcgacaatctggcggcgcatacgcgatgctgacggtagcgataccgacggcggaggtcagccgtacgggtgggaagcaccgatcgctatcctctgcgactaccaaggtggtctctctgcaaaaatcggcgaccttggccgggaaatcgtggttaaaaatacaatctggacggagtacgcagaggcaaaagagggtgactatatccttattggtgcatcttcagctacttcgccaccggatgaagccgatgagatacgacaggtaatccgctacgccgatacgttcgagcgtctggcggatgattatgcaattattacgcaggtgtga

SEQ ID NO: 179393 - DNA, 384 bp, Klebsiella oxytoca
atgtcagacaaaaccagcggtggaaaaatcgacgacgatgctacgtatggcgatgccggtgataggtcagaaacaattcacgttggtgccattcattacgatattgaagtcagcatagctgggcggcttcatatggaagttcgcaaactgattgacgttcacgcttttgagctaactgacaatgccggatttaattatctgttcatctggataaatgaccatggactgaagttcatgggcgttagcctcaaaacctacgaagaagcgaaagagcaccttatcaattatgaccgagagaaaatcaccggcccttcaggacgatgtgagcaaattccgggattgataagcgcgatttcacgaaagattgagaggttctcactttga

SEQ ID NO: 179394 - DNA, 381 bp, Klebsiella oxytoca
atggctgacccaatcacggcggcagacgtgcaggcgttcctcggtgagttgggttacgccattcccggcgctctgctcgatccgattctctgcgtggtgaacaagattatcccgtgcctcgatggtgcggggtatgacgaatgcacggcaaagctcatcctgatgtatgccgctgcacttatggcgacgtcatccggcgcccgccgcatcaaatcgcagggcgctccgtccggcgcttcccgctcgtttgaatatggcgacgacagcatcacctggctgcgcgactccttggcccggctcgataccagtggctgcaccagtgagttgccgattagcgccgggaacagtgtgggcctgtttctggtggtcgggggctgctaa

SEQ ID NO: 179395 - DNA, 240 bp, Klebsiella oxytoca
atggcactggtaaaagtggttcgagacaacctgctttccggtgccaatctccagaagctggaggttggcacgcaggtctcggtaagcggtgatgtcgctaaacgttgggcggccgccggtctggttgaaatcattagcgatgaagatcaggtgctggaagtggctacgcctgttgatgatgctgcagagcaggcagagcagcaggaagaatctgccagcaaatcgaagaaggcaaaataa

SEQ ID NO: 179396 - DNA, 1098 bp, Klebsiella oxytoca
atgtttgtattttccacccgacgcgcgactgagacgggcaacctcgaagcgaaccaggcgcagttcaatgagctgcaactggcgcgtaacatgagtgctcaggccgttgctgatttcgtatcccgcacccgctggcgtggtgatgcggcgaacacaccagtgctggacgcgacgaacgctgtcgacgatatccgccgcctgtatcgcgcttatgaccagactgtgctggctgaattcgaaccaactactgaattcactctgcttaacgacctgatcccgttgtcccgctctgtccgtcttgaagagtccgtgtacgagtacgctcgcaccggtggccgcggctgggcgcatacctccatgtccggccagattggtgcggcgctggatgcgcgcgcgtacaccttcgacggtacgatggttccgatccacgactctggcttcaaattccagtggcgtgacccgatttttaacaaagggtctgctctggcttctctggccgacgctcagcgcggctctgttgatgatgttcgtcgtcagtacgtggattacgtcttcaacggtttccgcgattccgccggcaactatatcgccttcgatggcaagacctggaagggcgtcaaagccgatgagcgcgtacagattgtagatctcagcgcttccggcctgaacatcgacttcaccagtgccagcgcaacggcggagcaaattcgcaacgcggctatcgcactgcgcgacgtgatgaagctgaccaacctgcagtatgcgcagcagacctggtatgtttccggtgagatcacctcaaacctggagcgctacttcagcgacaattaccagtctgacaccattctgcaagagttgctgaagctctcaggcatcgctgccatcaaagaagatgcgcaactttccggtaaccagatcctgattgttccactgacggccggtgttatcgctccgattgtcggtcaggctgtcggtaccgttgctgaccctcgtcagttctataacagcgattacgtctggcgcacctggggcgcgatgggcctgatggttaagaccgacatcaacaatcgcaaatccgttatctacgcgcacagctaa

SEQ ID NO: 179397 - DNA, 432 bp, Klebsiella oxytoca
atggctaaagacgggaaacacgtaattcacgcgggcgggattttccccaacccgcaacttaatcgtgaaggttctgcggccgcagcgtttctgccgggtaccgttattttcttcagtgcagctaagccgactccgtcggttgacggcaccgaagatgcgatcctctacgtcgctaactacgactatctgcgctgcaaaacagttgacgatgcctatgctatcggcgactgggtggtaaacatccagccaactccgggcgtattcctcaacgttcgcgctgccgccggcacctacaccaaaggtcagccggtttctgtggccaacggccaaatcaaagcactggcagcagatgaaaccatctttgcctatgtcgaagaagacaagtccctgaccgctgcagcaggcgatctggttcgcgtcgtgttcaagtaa

SEQ ID NO: 179398 - DNA, 1386 bp, Klebsiella oxytoca
atgaaacgcaaccgcgttaacgtgctgaccgtcgtcaactccgcttcaaacatcaccactgaaaccatcgacggcaagccacatatcgtggttcgcggcatcacgcctgtcgtggacgatatcgtgatgaaccggaagttgtacccggcagcagaaatcgaaaaggcctacaacacgcttgagcgtaacccgatgccgctgggccacccgaaggttgacggcaagcatgtgtctgctcgcgatgtccgggcggtgaatgaatatcacgtcggcgcatggttgcagaacgtcagccacaaagacgggaaagtgacgggcgatatgtacgttaaccgccagtacgccgagtcaagcgagaagggcaagcgcctgattaaccgccttgatgagatgatcgccggtaccaactcagaacccatccatatctctaccggactcctgtattccggcattgccgctaacggcgagtcgaagggcaagaagtacaacgagatcgccaccaacatgatgtttgaccatgtggctgtgctgctcgatgagcctggcgccggaacgcctgcagaaggcgtcggcatcttcgttaactcagaaggttatgagcagcagatcgaagtagctcgccttgctgatggtatcgactgcacccgtgaaggtctgctcaacaagaccaaattctttttcaccaatgcctccaacttctcttttgacgacatttcacgcgctatcagcgacaagctgcgcgagggcgacacagaagataagtggctatggccagaaacggtgtggccagacagcttcatctaccgcgatgacgccagatacctaaagcagaagtacctcatcgatgatgacggcaaagccgtgttcgtcggcgaacctgtagaagtcgtgcgcaaacccattgagtacgagattaaaaccaacggagagaacgatccgatgaaagaactgattatcaatgcgctccaagccgcggggaagccgactgaaggcaagtccgatgccgaactgatggacgcttacaaccagctggcggcagagaaggcggcagccaagaaagaaggtggcgatgaaatcgatcccgctaccggcaagcctaagaaaaaagagcaggccagcaacagcgaagaagtgccggcgtggtttaagccatttgctgatgatttggcagccgttaagtcaggcctggccgtgaactctgacaaagagaaaggcgaaaaacgcgctgccgtaaaagcgaaattcgggctggatgacctcgcagtgaacgctctcgacggcgccgcccttgatggcctgtttgctcagtgtcagacatctaccggcctgaatggtgcattccgcccggtcaacaacaacgattctttcagcgaaatgccggagtaa

SEQ ID NO: 179399 - DNA, 996 bp, Klebsiella oxytoca
atgatcctctttccgatgactcaggagcaaaagagtaaagtcggcacaccgataattccccgcagtaaagtcgacccaacgcagtcagccagaccggttagcaggatgtttcaggatatcgaaggccggtacctggatatcaagcgtcggctgaaagtgctgtttgaccagcggttaaccgggcgtcagcgggagaataacggcgatcagtcatggctgatgtgcaataacgaaggcgctgagccgtcactttaccaggtaaatgccggcacctatatttacgacatgacggcggcgcaattagccgaccttctccagattgtgcaaacgatactggatgatgctctgcttgatggtggcagccagaacctctgggcgctggactatgtcgccgcagagtatgagcgaggaacgcagcaggcctacaccaatttatcggtacagtcgccggtatacgccagccagacgacgctgcagcagctgctatccagtcctgcgtatcaaaaccagatcgccagtgcttacatcagcacgtacagcgactggaaggggatcagcgacaccgcgcgcgccgatcttgccaacgtcattgccgacgcgataggccgcggcattaatccccgcgaaacagccagtatcgtcagtaagcggttggacgtctcaatgtcgcgggcgaagaatatcgcccagaccgagcaggttggcgcgctgcggcaggcgcaatggaacgaaacggactgggcttccgagaggctcgggctgaacactggtcttctccatctttctgcgctgaagcctaccaccaggacaacgcacgcattctggcatggaaaggtcagaaccgtgcaagaggtgcgcgactggtatgcagtagatggtaataaataccactgctactgcagccagattccggtgctgctcaacgacgacggcagcattttcaacaaggggctggctgaacgactggcgaaagagcgtgagcaatgggttcagtga

SEQ ID NO: 179400 - DNA, 1422 bp, Klebsiella oxytoca
gtgagtgaattaagcaccggggaacagttcctcgttaatgcccttgctgatgcaatcgggcgccaacgcatgctctacgcagggcgtaatggcaacgtcaagcggaccaaattatgggacgagttcggctaccctgacgctctgacgttcgacaatttctatcgccagtatcgccgcggctctactggttttgcagctgtccataaattgctggattcctgctggatggacaggccgaccatcatcgatggtgatgaagacagggagtcgaccaaaactacgccatgggaaaagtcagttaccaaactgatgaaaaagcattgggcgaaaattaaagacgctgaccgccgcaatatggttgggcgttactcagcacttctgattcaggtgaaagataatcgagactggagtgagcctgttgatgtggcactggtccagaggctaggtagtgctgcactggttaaattgatcccggcatgggagccgcaagtcaaacctggcaaccttgatattgatacttggtcggaaacctacgggcagcccgtcagctatcagtttaatgaacaaccgataggcgacgagggcacgtatagcagccctcgttcggttcaggtgcatcctgaccgtatcattctgctctgtgaaggctcagaggatgagaatatcctgtcgggaatcccgcttcttgaggccggctacaatgacctgctggatattgagaaaacgaagggcggcagtgcagaagggtttctgaagaacgccagtcgtcaactggcgatggagttcgacgccgccacccaaattgacacgctcatcaagcaagccaaggatgctggatataacaaccttggtgatgcgatgaatgacaaggtgaataagcttaaccgaggtacggatgctgcaatagccatgcaggcaggaaaggcgagcgttctttctgttgcggcagctgatccgacaccaacgtggacggtttctgcaaactcattcgcgtcgacgattcagtgtccgtttaacatcctgtttggcaagcagacaggcaaccttgcttcagaggaggataaaaccgcgtgggccaatcgttgcaatgcgcgacgctggggctttatgtctgacgtcatcacgcgcgtgatagagcgattctggactattggcattatcgaccctccggtatcgggtgaggtcacgttggcatggtctgacttgctggctcccagtgagaaagaaaagctcgcgaatatggcgactatggccgatgtagcgcagaaaactcagcaagcctacggtaccccggcggtcgatgagaacgaggtaagggcagtcggtgagcttgaaccgcgcaaagaggttgccacgccagactcaaacaacaaggtgacaaccgatgatcctctttccgatgactcaggagcaaaagagtaa

SEQ ID NO: 179401 - DNA, 1560 bp, Klebsiella oxytoca
atgaattacaaggctgtatggaagcccttaccgggatcgcaatcgctctccctgagctgcccgtgtaacgagatactttatgaggggacgcgtgggccggggaaaacagcggcgcagctggcccgatttcgccgcctggttggtctgggctatggctcgttctggcgtggcgtaattttcgataccgagtataaaaacctcaccgatatcatcacgcagtcgaagcgcatgtaccgcctgttcaatgatggcgcacgatacctggcgtcagcctcagaattgcgttgggtgtggcctacgggtgaagagcttctcttccggttcggtaaagaagagagcgactactgggactatcacgggcaggaattcccctttatcggattcaacgagctgacaaagcagcaatccgccgagttttacgaaatgatgttctcctgccggcgctcatcgttcaggcctgagaactatccgcttgctaacggttctctgcttaggccgatcccgcttgaaacgtttagcacaactaacccctttggcatcggccatacatgggtgaagaaacgttttatagagccagctccccgcggcaccatcatccgcgaaactcagcgggtctttaacccgcagacggagaaagaagaggatgtgacgcttacccgcgttgcaatccacggctcgttcaaagagaacccgtacctcgacccgcagtacatcgcgaccctgatggccatcaaagacccaaaccggcgcaaagcgtgggtggaggggtcatgggatgtgaccagtggcggaagatttgaccacctgtggaatgaagcgctgcacgtcattaagccgttccgcataccggatagctggaccgttgaccgctcccatgactggggtgagtcgaagccgttctctaacctctggtgggctcaggccgatggaacagccgccgagctacctgatggtcgacagttctgcccgccagcaggctctctaatcctgataggcgagtggtatggctgcccgcctgatgagctgaacaagggcctgaatatgtcgtctaccaacgtcgcaaaaggcgtggcgtggattgataagcgcatggttggtgaagaggtcgacgaaccagaagaaattcagctcgacggcataacgcagggtcagttgcacatcatgcctggtatttgcagtgaagtgatccccggcccggctgacggggcaatattcaacaccggcgacaatgagctttcaatcgctcaaaagatggaagcacagggcataacttggttgccagctgataagaagccaggatcgcgcatcaacggtgcgtcgctgtttgcagatatgctggaagctgtcattgaaggtaaaaaactagaatctggaatgcctgagaaaccggccttctacgttttcgactactgcagaggctggataagccgaatcccggtacttgtccgcgatgataaaaaccctgacgacgtagacacccagcaagaagaccatgactgggatgctacccgctaccgcgtactgcactcacctaaaaaggttggtgcagtgttcttctaa

SEQ ID NO: 179402 - DNA, 489 bp, Klebsiella oxytoca
atggctgcactaaaaccagaagtgaaagccttcatcattcagatgcttgcatgctatgacaccctgtcgattgtagtcgacgccgtccaaaaaactttcgggataaaagtcaccccgcagcaagtcgaatcgcacgatccgacgaaggttagtggtaagggattggctaagaaatgggtagaccttttcaatgccacccgcgagcgattccagaatgagatttcagatattcccatcgccaataaggcataccgtttacgcgttctcaatcgtatggccgtaaatgccgaaagcatgaagaactacggtatgaccgcacaactgcttgagcaggccgccaaggatgttggcgacgtctacacgaacaagcaaaaagtagagcaaagcgtggttgcgactcataacgttatgccggtcccgtcctgtgacaacgttgatgaatgggaaaaggcagcgcagaagcagcagggtgaggtattaggtggatga

SEQ ID NO: 179403 - DNA, 636 bp, Klebsiella oxytoca
atggatcaaaatgaagaccgccgaccattcccccctgtcaacttcactggcgaaaactggctgccttacaccaggctaatccctgctgccgaaatcggagaatgggtaaatcagaacatcctctccgaaggggggcgaatccataaccctgaccatacgcacttggtcgacgctgatgtggcgttcatgtgggcatctggctcattcgccaaaagcggccgcattgtgctgggtcagtgtgaacaggtaatgatgcgcgctggcggctggcagaagtcccgcatggagcagcagatgcatgaatggttcggtcgcataccgaagttcatcatcaccctggctgccgactactgcgagcaatgcaacgatctggagttctgcgcactggtagagcatgagctttaccacatcgcccaggctaccgacgactatggcgctccgaagttcaacaaagataccggaatgccggtgctcaaacttcgcggccacgacgtcgaggagtttgttggagtggtcaggcgttacggcgccagcaaagacgtgcaggaaatggtggatgcggcgaacaggccggcggaggttgctcatatcgatgttgccagagcatgcgggacatgcatgctgaagctggcataa

SEQ ID NO: 179404 - DNA, 390 bp, Klebsiella oxytoca
atgagccgcttaaccgccattatcatcgccgtggttatctgtctggtcgtctgccttggctggctggttatgcattaccacaacgccgccaatcagcaggaatccagagctgaaactgctgagcagcaggtaaataccgttcaggccatcacctccaacgtcctgaccaccatgacgatattcaactccatcgccgaggccaatcagcatgcaaaagagcagatcgcactggacgcatcgggagcctcggctgatatccgggttgctgttgcgaatgatgattgcactaatcgccctgtgcctgctggcgcagttaagcggctgcaacaattcgcggacagtttacgtcaaagttccggtggtcccgttaccggccagcctgacagctga

SEQ ID NO: 179405 - DNA, 573 bp, Klebsiella oxytoca
atggctatgtcaacaaagctgaggaatagcgttattgctgccgttggtggtggagctatcgctattgcgtcagcgctgatcaccggcccgaccggtaacgatggtctggagggagtgcggtataaggcttacaaagatgtcgtaggcgtgttgacggtatgccacggacacacgggcaacgatatcatgctcggtaaaacctacaccgaggcagagtgtcgagcgcttctcaataaagacctcaacacagtggcccgccagattaacccgtatatcaaacagccgatccccgaaacgatgcgtggggcgctgtactcgttcgcgtataacgttggcactggcaatttccagacctcaacgctgctgcgcaaaatcaaccagggcgatcagaaaggcgcatgcgaccagctgcgtcgctggacgtatgccggcggtaaagagtggaagggcctggtaacgcgccgcgagattgagcgtgaagtgtgtttgtggggtgaaaaaccgcagaaagctgatgatggatttgggccattaaatcccggcgtaccgccatctgctccgggagtgttctga

SEQ ID NO: 179406 - DNA, 270 bp, Klebsiella oxytoca
atgaccaaaatgagcaccatttacagcagactctcatacggcaccgggaccgcgctgacgggctgcggtgtctcagcaaaggcttacgccgatgtatcgaaaacagaggtatggattttggccgacaaagtggcgggtatgagcctgagtgactgggcgatcgttgtcggtatcgcatgcactgttattacctgcggcgtgaactggtattaccggcgtaaagagcgggaggaccggcttaatggctatgtcaacaaagctgaggaatag

SEQ ID NO: 179407 - DNA, 498 bp, Klebsiella oxytoca
atgaaactggaattaaccaacgaacagcaccagtggatagatcagtggctccagctttggggcgcgtggtgccagacagggaagatagacaaggcgatgataaatatgattgccaagttcatggccacggttgaaccgcaagcaccatcaaggcctgtatgcagcgatgatgacgggatgctgattgacgctgtaatccggcattacctgaaaaatgtagatgagaatgcatggaaggtaatttttgcctattacgtctgcaactcaagtgagataaggatcgcctcatggcagcatgcagtgagcaagcctcgcctgatgaagacccgcgccggaaaccagtataagcacccgagcatttcaaccatccgccgggaagttaaacaggttatcaatgcttcgttgttttgcctttatcagccattacaaaatgcattcaacgatcgagaaaatgtgaggaaaattgcaaaaaatagtcatatcgtgcttgcattttaa

SEQ ID NO: 179408 - DNA, 141 bp, Klebsiella oxytoca
atgagccgtgacgttatcgaacgcatccgcgaccgctggataaagcttcgtcttttacgcagcagcggcaccgtactggttgactatcgcatcctcaagaatttcgttcgcatctatcagaccctgggagagacagcatga

SEQ ID NO: 179409 - DNA, 363 bp, Klebsiella oxytoca
atgaatgaataccgtatcagtctcccgtggccgccgagcaacaaccgctactaccggcataaccgcgggcgcacgcacatcagcgcagaaggtcaggcgtaccgcgacagcgtctccagaatcatcaaagactcaatgctggatatcggcctggcaacgccagtgaaaatccgtatcgagtgtcacatgccggatcgccgtcgtcgggacctggacaatctgcaaaaggcagcattcgacgcgctgacgaaatccggtttctggatcgatgaccagcaggttgattactacagcgtgaagagaatgccagtcgtcaaaggtgggcggcttgagctgaccattaccgaaatggaggtcgcatga

SEQ ID NO: 179410 - DNA, 291 bp, Klebsiella oxytoca
atggctaatttatgcaaagcggcacgcggccgcgaatgtcaggtacgcatcccaggcgtctgcaacggtaacgctgaaacctcggtactggcccacatccgcattgctggcctctgcggtaccggaataaagccgcctgacctgatcgccactatcgcatgcagcagattccacgacgagattgatcgccgcacccgcctggtcgatgcggaatatgcaaaggagtgcgcgctggagggcatggctcgcacgcaggtcatctggcttaaagaggggctcgtaaaagcatga

SEQ ID NO: 179411 - DNA, 171 bp, Klebsiella oxytoca
atgtccactccactttcccgcgttatcagtaacgaaattttccgcgttccagcgcgccgcaagcgtaagccagcggttaaaccgtccgacatcccgacactgaaagactacaccgcccgcctggttgatcagaaatggctgcgtctcgcggcgaggagaacgcatggctaa

SEQ ID NO: 179412 - DNA, 456 bp, Klebsiella oxytoca
gtgaacatccctcaatgcggcatcaagctgcacagcggcaactttaacgctataggccagattcttcaggagcatctctctgacgggaaatgcctgcgcctgcaggtcaaagagtggcgcgaaaaacgcagcctttgccagaatgccctcagtcacatgtggtacacggaaatcagcgaatacctgattaactccggacgtaccgacgcgacccctgagtgggttaagcgcaacctcaaaaagacctatctcggctgcgaagaggtgacttacaccgacttcattaccggtgagaagaccaccacctgggagcctcgccacactgccgaccttgataccggggaaatgcacatttttctggtgaaggttgaaatgtggtgcgcccagttcggactggccctgactatcccgaacggttgcgagtaccagcagctgcgcgataagcaggaggcctga

SEQ ID NO: 179413 - DNA, 264 bp, Klebsiella oxytoca
atgaatacatatctggtgtggtgccccgaagagggggaagaacgagaagacgcgcgggaatttgaagcacgtgacgcaagtgaagccgcgcaggtgtgggcggagcatgatgatagctggagcgctgattatcaaatcgtttccggcatatctgagcctgtggtgtgtgtcgcgctgggcgatggacccgtggagcgttttcgggttagtggcgagtgcgtggctcagtattacgcccaccctgtcagcgggaaggaagactga

SEQ ID NO: 179414 - DNA, 726 bp, Klebsiella oxytoca
atgaacagcaaattaaccagagagcgcctgcaggaattagctgcaggtcaaagcgggttcaatcttcgaactgccacatacgaagagcctcaggagctggcccgcatggcgctggccgcaatggacagcgagccttatggtttcaccaatggtgaccgtcgcgggatgatttacgaaccacagtatgccgatcggctgaacgagccgctcccggtatatcgccacgcgcagccagcagtgccgggcgattacttctcatcgcttgtcgccgctgcgcgcttgcgtgcggataaagcaatgcgcaaatatccgcaaccaaactacgtgctgaacaaagtcgcagaagaaagcggcgaagttatcaaggcggtaattcattacaccgaagggcgcgaagaatgggcgagtgtcgaaggagagttcattgataatctggctatgttgattcgcctggttattgaaggggatcaggttatcgggttcactccccctgacgcctgccgcgccgccatgctccagtctggcaactctccggtaattccggatggttacgtgatggtgccgaaggccctgctttcagagcttcgcgattgggctcaccctgaaatcgaaaagtattgcgagatgtgggaagggcgcagagatagtgagtttccagcgctgaggaaagttatcgctgacgctgatgcgttgctcgcagccgccccgcaggagagtaaatcatga

SEQ ID NO: 179415 - DNA, 216 bp, Klebsiella oxytoca
atggctatagaaaacccgagttcatgcccgcactgcggcggtgagaatggattccacacgaaagaggttgtggatttcaagcagttttatgcttgggatggttcattccttgaggggcagcacaccagcggcattcgcggcgggaaagctttctactgctgcgactgcggtcggaatataacatcgcgcatcaataagccaggagcggaccaatga

SEQ ID NO: 179416 - DNA, 342 bp, Klebsiella oxytoca
atgacaactgatatcaccgaactggcgcagagagagaaattcgaagcgtgggctgaagtgcgttgcgctcttccatggggctacctcaaaaaacgtcgcaccacagaaggctattccgagcagatttacacctgcatgtggacggcatggaaagcggctagcgctgagctggtagaggcgctggagaaggcgcagcagcggattactcagctggagtcccgcaccgtgaagatgccagagccattcaagctggctaaatcatcgagcggattaacttactacttcgccgacgatgtcgatgctgcgctcaccgacgctggcatcaaggtggaggctgagtag

SEQ ID NO: 179417 - DNA, 324 bp, Klebsiella oxytoca
atgagcaaatttaaagcattaccagtagagcgcgaccaatacggttactggactcatccgctatacgatgaattttgtgatggtcgggagtttatttcatctgaggagttcaatgcctggctggataaaaacggactcgcttggaaagtggtttaccgtgatgaggatgacgtagacccaactgtcgatggttgcgacatctctcaatggcagccagaaccgcctgctggagaaggctggtttgttgggtcaattcacgacactgaagatggcgcggttgcatctggttgcgtcatgctgaaggcggtgccgcatgacaactga

SEQ ID NO: 179418 - DNA, 258 bp, Klebsiella oxytoca
atgagcactcgccgcaaaattaacaaaatcctcaaggggaaaggtctgtctgctggcgttgaatacgacggagctggcgccagtcgtgacgaatacggttggtggtcggttacattcgctccggagtctgtcgatttcattcggatggaacttaacgaacctgagtttaccggggtcgttgagttttgcgaaatcgacgacggtcttgagcaactttcagaactcccttcaatgtccagccaggagcatacagcatga

SEQ ID NO: 179419 - DNA, 450 bp, Klebsiella oxytoca
atgactatcacactacaggcagtaaacgagctcattcagtcgctggagtcggcgggcgagctgtcgatcaaagagacaaaggttatggcgatggcgaaggcttaccagcagctggctgcggagaatgtggcgctgaaggctgcaattagtgcagtaaacaggacagcggaagagtgtgagcttaacggcgacgaattgaaatacgttgtcgagccgtctgagtttgaggcgttgactgatttgctggatgaaacccccgccaccgatagcatctatgccgggattaaggctgcagccgcagcaccgttggttagcgctattacggtgatcgcaaattcagagcagattagcggcgaaacggttgtgtgtgattttgacacgctggtttctgttgccgccagtgcgctgcgtgattactacgccaagcagctgcgcgagggggccaaatga

SEQ ID NO: 179420 - DNA, 225 bp, Klebsiella oxytoca
atgatttttctcaaattagcacaaaaagtggtggttcagcaccagggcgcacacggttgggaatctgaaacagtctacgagcctgtgtttgttgccgcagaccacattatcagtatgtttttcgccgggctgacagtcctgaaaatgacctccggagagcgcattgacgtgaaagagacccccgaagaaatcatcgccatgcttaccaaaggagcagccaaatga

SEQ ID NO: 179421 - DNA, 306 bp, Klebsiella oxytoca
atgaaacgtatatccggaactcaaatcgtcatcaattttatcggcagcaatcctggttgcactttttcagagatacgcacagggacaggcttgcactcttctgtcgttaactcagctatctgggccacgtttaacgatggccgggttttgcgagcaggggagcgcaaaggctatcgctacacccttgcggagcagacgaccgtaaccgaaagcacgtcggcggattttcagttcagcaatcggcactgcggcgccaacaagttgaccaacctttttaaccagtgcctggcgggagtaagaaaatga

SEQ ID NO: 179422 - DNA, 780 bp, Klebsiella oxytoca
atgaccgctcagcttatgaccgcgatcagcaatcgcgatggtgatgcgctggccagaatggccgcaggtagcacggagccgcagaggcttctcgatttcgaagctgaaaggctggttgactccctgttccgtcagctgaagcagatcttcccggcgtcaacgcagaccaatctgcgcaccgacgccgaagagaagacagcgaagcgccagtggattgcagcttttgccgaaaacgggatccgcacccgcgagcagttatccgccggagtgcgccacgcgagagccagtgaatcgccgttctggccatcgccgggccagttcatcaagtggtgcaaggatagcggcactgtgctcggcgtgactcttgtcgacgtgatgaacgagctccaccgctacagccgtgaaaaagggctgcataccggcggtgctgagcgcttcccatggtctcaccctgttatgtactgggttgttaccgatacccggcgagcaatgtaccagcgccagctcagcgaggcagaaaccgagaaatatgccgctaaaaagctggaagactgggcgctgaaagtcgccgccggagaacaaataccgtcgccggtactggctctggagaacaaccaggaagtgatccccacaaatcacgccagcaggcagcgcggttatcacccggaaggaaaaagcttcggatgcatgccaagtgccgcatcactcggcgcgctaaccccggctcagtggctgcgggacgaatacctgattggtaaagaaaaagggctgattcaatga

SEQ ID NO: 179423 - DNA, 729 bp, Klebsiella oxytoca
atgtcacttatggcgaaagcaatgggggtcaaagtgggaaactcactgcgtaagctcgttcttatcaagctggccgacaacgccaatgacaagggcgaatgctggccttcttatcaacacattgccgatcagtgcgaatgcagcaaatccgctgttcgcaaccatattgatgcgcttgaggatatggggctgctcaagcgtgaaaatcgcgttggggtcaacaacgggaaaggtaatacatccaacgtgtattatctgaaccttgatgccacccctatgccaccaaaaagcacaggggtatgccatgaaatagcaccccctatgccatctgatggcacaccccctatgccaccagatggcaccagaaccagtcactcttttgaaccagtcactgaaccagactctctctctgcgcgagggcagtttatcagcgaggctgcaaagagacggatcgggatttcacccaacggggaaatacctttccctcctgccttcaagccatcggcagatcacattgcgattgcctcggagaaagggatcaacattgaaaccgagttgctgaactttcgtgattatcaccaggcccgcggcacaaagctgatcgactggaactcggcattccgggtgtggctcaggaacgcgagagttaatccgctttccgggcgccagagaagcgaacctgattccccacactggaacagccctgaaggctggaaggacttcatatga

SEQ ID NO: 179424 - DNA, 222 bp, Klebsiella oxytoca
atggagagttcaacgacacgcaacaaagtggaggctcgcaggatagaaagctggttacacagccagatagctgaactgggaaccacaactatcgccaaagtggccggagtgaataagtcgacggtaagtcgctggcgggaaagcctgctgccgaacatgtcgttgctgctggccatcctgatttctaacaggccgggagagaaaggtgactttgaagcataa

SEQ ID NO: 179425 - DNA, 234 bp, Klebsiella oxytoca; identical to SEQ ID NO: 111007

SEQ ID NO: 179426 - DNA, 486 bp, Klebsiella oxytoca
atgagagatgatggtgaagatgataagaagccatcacatatgaatcatgatgtgttcagggtcgacattttggatctggccgtcagtgctggcccgggcattgtgaatcaggagttcgtggagattctccactccgttgaatatgcgccagcggaagcgcgccacatgttcgatgggcgcaaggctgagaacatccggatcatcaacgtccggggcgacagcatgtctgggacgattgagccgggtgatctgctgttcgtcgacatcagcgttaagagcttcgacggcgacgggatatacgccttcctgtacgacgacactgctcacgtcaagcgcctgcagaagatgaaggacaagctgctggttatctcagataacaagagctatgcagcctgggacccgatcgaaaaagacgaaatgaatcgggttttcgtgttcggcaaggtgatcggcagcatgccgcagacgtacaggaagcatgggtag

SEQ ID NO: 179427 - DNA, 1077 bp, Klebsiella oxytoca
atgatatcggagctggcggaagttgcgaatgatatggttgatacaaataagaaatatttgatttggaacaacaaaggtggtgttgggaagacgtttctaacctacaatcttgcagttgagtatgcaatcgctcatcctgatgaagatgtggtcgttatagatgcctgccctcaatcgaatgtttccgaaattattttgggcggaaatggtgttggtgaagagaacttaaaccagctccgggacagaaataccacgattgcagggtatattaaggagcgttttagtaactctccgctttcccgtatgggtaacgaatcttcatattttgtaaaggctgattcggcaaacccaaaaatgccgaaaaatctttatctcttgccaggtgatgttgacttagatatttgctccaggcttatcgcacacataggctcatctcctgtaaaagaggcatggaaaaaaagtcgttcacttttgatagaccttattgcgtcatttgaggcagataaaaccatttccgagaggcctaaaacattttttattgattgcaaccctagctttgctagctatacagagcttggcgttgtcgcatcaaatagagtaatcattccctgcacggctgatgcagcatcgattcgtggtatcaaaaacttagtgaaattgatttatggggtttctattgatagcactgaacaagatgaaatgttccttgatttcaataaggaagccaagcaaagcaaaatagaatttcctaagttacatcttttcgtacaaaaccgctcgcgcaccaacgaaagtgacgcagcaaaagcattcaagtcacacgctgaagaaattaaaagaataacatctgaattattaaaaactcaccctcatttatttactgatgaaactattgatgaccgcgtaaaacacgtaaaagatggcaatacacttgctgcaattattaatcatgaaggctgccctttaagtggccttcagcacaaaagttacaccatttatggcatggcaacgcaagcaaacaaggcccaaattgatgctttggaatccgatgtaaacggcgtggtgtcctgcatttag

SEQ ID NO: 179428 - DNA, 177 bp, Klebsiella oxytoca
atgagaccgccaatcacaaaggaagaagtcgagttactgatgcaggatatggagatgcttgcagagcagaagttggtaggaatggaggcgttcgaggccctgagattgctggagatgcgtagacagaccggaaagttggaggctataaagcggttgatatcttttgggaaggagtag

SEQ ID NO: 179429 - DNA, 204 bp, Klebsiella oxytoca
atgtcgaatgaggatgagttttttgcagagatgcacccacagatagcgcaggtcatcgggatagcggttatgcaactgctggttgagaagcgcgagccatcaagagaggcgctgatagagatgattcaggtgctgtggctgggggaccagccagatctggctgtggagctggcactggatgtgctgatgctgcggaaagagtag

SEQ ID NO: 179430 - DNA, 969 bp, Klebsiella oxytoca
atgagcgaaataatggatttagtcgtcatcgagaaaaagaacgcgatggcggttttcaccaataacgaccagctcgacccgctaatcgaagcgatcgaaaaagaggctcgcagcctggttccggacgtgaccaccaaaaaaggccgcgacgccatcgcatccatggctcacaaggttgcgcgctctaaaacctacatcgacaacgcaggtaaagacctggtcgctgagctgaaggctctgccaaagcagattgatgaaagccgccgcgttgtccgtgagcgtctcgatgcattgaaagatgaagtgcgtcgcccgttgaccgaatgggaagccgagcaggaacgcattaaggccgaagaagccatgaacgcccttcacgtcgaagcactggccatgaatgaagacttcgatcggcggctggcagctcggattgagtctgaccacgaaatggccctgctgatgaatgacgctttcgaccgcgaacaggccgagaagaaagcagaagccgaacgccagcgcattgcccgcgaagaagagattaagctcctggcagaagagaaagcgaagcgtgaggcagcagaacaggcgcagcgtgaaattgacgccgcagccgccagggagcgcgaagcgattttggccaaagagcgagccgagcgcgaacagcgagaagcagctgaacgtgctgagcgtgaaaagcaggccgctgtggaagcagaacgccgcaaggcacaggaagaagccgatcgcatccgccgcgaggcagagcaacgcgaactggcccgcctggcggaggagaagcgcaaggccgaagaagaatcgcgccgcgccgctgatgttgagcatcgccgcggaataaatacagcagccgtacaggctcttatcaatcagggcatccctcatgaatgggctaaagcctgcatcattgctgtagctctcgggaaagtcccggctacaaccatcaaatactga

SEQ ID NO: 179431 - DNA, 285 bp, Klebsiella oxytoca
atgaacgaataccgcgcatatgacgtgatcgaagagcgtaagtgggccgagcaaactctcaccgaagagaagcaaaagtggattgacgatcgggcaaaagaggtctttgacagccttccagaggatccatacgcggcactacgccagtctgtatcgtccaaatcgtttccatatgaaggcctccgtagcgataaggctggcgaggtatacaacgatttgcgcacagcaatagcttacgcccaggcggaatacgactgggatcaccgcacaggctgcccgttttaa

SEQ ID NO: 179432 - DNA, 705 bp, Klebsiella oxytoca
atgcttgacagtatcattcggtcgtatatgtatacgcaatataatgatgatgacaatctgcgggcgttcttcactgcgtataactctatggcgcaggggatttatgactggatggtcaatgccaacctgcctgtgtttatcggagaatataacaccggagatcagcttaggtggattgcccatggtatctatggcgtgctgcccccggtaatctccagtagtgagcagagggagatagggccatataacacactggaatttaaccaactggctttcaatgaataccgggttattagccagtcagaccaggtggttgtctctgatgacctctttaagcggatcatgacctggaatttttacaagggcgatggattttacttctctatcccttggattaagcggagaattctgcgctttcttctgggtgtaaacggcacagacatcctcaacgaccagcgctggagtatctctatccagtttgtcgatggcggtattgtgatttccatctacaaggggcgacggcagttcacccgcagtgcaatctataacgcttctgcctataactccaggaagtacaaccagaaggacacggcttttgtaataactgaggatttcgaattcgccatcttcttcaagcaggccatggatagcggcctgctgcacatgccgttctatcagtcaattactgttgagattattgactga

SEQ ID NO: 179433 - DNA, 1419 bp, Klebsiella oxytoca
atgagcgatttaccggtcagttatacgtcagcaggccctgtgccgatgacggcggaagagctgcgcgctcagctcgtttcccaggctattgccttatcaccagggcttacgactgaattacctggctcgctgattgaggacgtagtaagtaccgatgttggcgcgctgatcgtctgtgaccaggcaagggtagacctgattaactcggtcggacctctaaaagccaacctcgctatgctggagcttctcgcgcagcaggccggcatccctggacagaaaacctcaggcacgacaacggtacccattcagttctccgggccggccgggtttgttatcccgcaaggatttatcgtttctgatgggacttatacctattcagtcagtgatgcaacgatcatctcatcttcaggcgtgtcggctaacgtaacgtgtgagggaacggagacgggcacctgggccgtaccagttaatacggtgaatcagattattaccagccttccgtctgacattaccatcacctgcacaaatacgatcgccggtaccccgggcgcggaccctgagacgaactatcagtttcgcgacagggtatggcaggcccaaatggctaccgttcaggggtacccgggatttataaggcagcacctcaccagccttgataacgtgcaggcgaggctcgtctccgtcattcaggacggggataagtggatagtcatgtgcgccggcggcgatatatacgatattgctggagcgctatataagtcagcgggggatatcagtcggctgaaagggtgttcactgagcgtaacagggatcacgaatgccaaccctggcgttgtgagcaccgacctgacgcatggttacactaacgggcaggttatcaggattactggcgtaactggaatgaccagcattaatgacgttccgctgactgttacagtgctatcgcctcacacgttttctattggcattaatacgacctcatccgggacgtggggcggcggcggagaagtgacgccgaacgtcagaaacaataccgtgacggttaacgactggcctgataactacgtgatcccatttgtgacgccgttactgcagcgcgttaccgtgacatatcagtggggaaccgaaagcattaactacctgacggacgctactgtcgcctctctggtctcggcaccaaccattcagtatgtgaacggcatatttgccggcaagccgctgaacgttaacaatctgaaagacgcgtttttgaaggcgattaactcgacgatcgatatggcgctgataagcacattaaatgtcgtggtcacaatcaacggtgtgataaccgatcctgatgccgggaccaatatcattagcggcgacaggttcagttacttctatattgcgtcagatggcgtgatcgttaacggagcgtag

SEQ ID NO: 179434 - DNA, 333 bp, Klebsiella oxytoca
gtgagaacctatggccgaaactctgagggaaagtgggtcctggtggaaacagacgaaaatgggtttaatgactcggtgtatttgaccaccctgatccagaatctgaaactggctccacaggaatcacctttttacgcaaacaacggcatcccggctgccgggtctgtgatacagcaaatcctgccgacgtattacgttaaccgcattcagaaacaattcagccagtatttctcctcgttgcagattgcgttagtcagcgatgacccgcctgtttataacatctcggcaatcacaaacgcaggttcaaaaattattactcaggtggccatatga

SEQ ID NO: 179435 - DNA, 717 bp, Klebsiella oxytoca
gtgaccattaatcagcgactaaattttgccaagagcatgaacaacttcgctgaggaaaaaattgccgaagctatgcagttggtcggtaaggtgttacctgcaacgatcgtcagccagtctggaaagatggttaccgtctcgttcagcctgacgaatatcccattcactttgccacaggtaaccattcctctttttggcccccaatacgtgcgctatccaatgcagcacggagaccgggggattgtcattcctgccgatacctatattggcggcatgagcggcctgggtggcggagttgccgatctgacgcagccagcgaacctgagcgccctggtttaccttcctatcagtcataccgagtggcaggacgtcgacgggcaggtggtgacggtgtacgggccggagggtgtaacgctgcgcgatagcggcagcaataccacttttctcctgaagcctgacagcatcgctatttccacgcctgacagcttcacggtaaccgttggcggcactgtattttctcttacggcaggacgctggagcttatctggtgatgccggtcacctgcaggactcagtggccagcaccagcccggcaatcatgcacgccgggtgggagtcccttgtggcgtggctgaacagccatgaacattccaacggtaacgacggaaatgataccggggggccgacttcaacgtttaacgggagtatcaccgagtga

SEQ ID NO: 179436 - DNA, 969 bp, Klebsiella oxytoca
atgaggtattacgatttccagatattcgaaaaaagcgggaaactttttaagcaatataaaagcctggatgcatacggaaactataaccctggctgcctgatggttgaatttgatattcagcgctatggcatgtcaacgcctatgggtaatagccttgtgagggtgtatggagtaagcatcaaggaaatgcagcaggctgagcaaaacatgttcggcatgacgatcaagggatttgtcggcatgtcgaaagggcttccactggccaaagcgtcacagagcgggatgattctcgaaggcgtcattcagcagccattcgggaactggcagggaatagatctctcgttggacatgattattactgctggttccggctctgtggataagccgatgaatatcacgatgccatggagtaaagggcaaaaattgtctgtggcgctcttttttgcgcttcaacgcgctttccctgattgcaaaatcaatatcactattagtgatctgctggtcctgaactacgactccccgatttactgttccagtatgcagcaactcgcctctaacctgaaaagcattagccgcagcattatcagggatgagggttatctcggcgttgaaatgggcatgttcccgggaaaggaaatcagggtatgggacagcgtagcaactgagaaaaagaagacccctattcagcttgaatttactgatcttatcgggcagccggtatggattgagtttaaccgggtgatgattacctgtgtaatgagggctgatattcaggttggtgactatgtgaggatgcctgcaggcgccatggctatcactcaggcttcctcgtactcgcaataccgtagcaagactgcattctcgggcgtcttcgccattcagtcatgtagatgcgtaggcaatagccgacagcccgacgcggcgagctgggtaactatctttgaggcgtatgtgacgcaggagccctaa

SEQ ID NO: 179437 - DNA, 276 bp, Klebsiella oxytoca
atgacgacggaaacctactcgtttactggcaatgagagagagagcatggctttcacacctgcgctcgatggaacggtatataactgccagataagatggaatatctctgcacagcggtggtacattctcattacggacaattctggtaataccgtgcttaataccccggctgtcggctcaacgaatgaatctggaataaatctgattgccggagttttctccagaacaaccatgatctggcgtgaacaaaacggcctgattgaggtaaccagctga

SEQ ID NO: 179438 - DNA, 714 bp, Klebsiella oxytoca
atgggattcactcgcgagctgtataagctgggctttgaagtttcccccgtcattctgtgcaatgggatcgcgcagagcatccccggagggatgctgcctgttgtggcattaacccagagcgccagctttatcacagggttgcttgggggcgcttttaaccttaccgatctggataaatatttctgccactggaagccggttcagggtgggacgatggtcgactatgacatcgcaaaatacccttttgccaaccagaccgtagcggctaatgctctgcttgctcagcctctgcgtatttcgctgatgatggatgcgccggtaaatgaaaacaccggagctatgactaagtttgtcacactaagtgcattgcagtctgtccttcaggcgcatgccaaccttggcggaacctatatcgtcgcgacacctgcgcttttttacagcgggtgtattttgcgaacggtaaaggatatgacaagcttcagcgaggcggtaccgcagcgatcctggttatgggatttcgagcagcctctggtcaatgaaacaggggcggagcaggccgtaaatagctttctgagcaaaattgacggtggaacaaagcaaactaccagcgaatggacaaatactgtcgctgctctcgggaatacgtcgcttggcggtactgtaagcgatattgtcggccttatcggtaggctaggcggggagtttggtctatga

SEQ ID NO: 179439 - DNA, 1839 bp, Klebsiella oxytoca
atggtagctaagtcgatcgtcgacattgacgtaaatgacgacaagtttgtcgcgtttatggagcggtttcgcgaataccagagcgcgctggaggatttgccggaagcgtggcgcgtggccgccgtcggcattggcgagggcagcaaagagaccgagaaggccaaaggtgaggcgaaggaattaggcgcggagtttaatgccgttgcagaggccatcctgaccattaacagcggtctcgaccggctgaataacaacctcgacgactcgaagaaaaagcaggatgagttcaataaaagcgctcgctctggaaagggattcatcagcgacgccacgaaggacgccaaatcgctggcctctcacattaaagatgcgacagtcagccttctttcctggggtagtatcgtcggggtattttctggcgttctcggcgtcggcggcctgttcgggcttaaccggctggcggccacgaccggcgcccagcggtttacctctctgggacttgggaccagtatcggtgcactggactccacggccattaactaccagaaagcgcttggcaaccctaccgggacgctcggcgctattcgcgattcgcaaatggacctgtcgaagcgctggacgtttcaggcgatggggattaacaatcccgaccaggacccggccaaactgctcccgcagatgatccgcaatgcccgcgatattttcgtgcagaacggcagcacgctgcagggagcgcaggcacacgggctgaccaacttctttaccctggatgacctgaaccgcttcaaaaacatgagcgatgaagagatcgccgccatggagaagcgtgcgcagcaagactcgcgaatgctgcagatcaccgaccagcaggcgcgtcagtggcaggacttcaacgtccagctcgactacagcagccagagtatccgaaacacgtttgtgcgtggactggggccgcttacgccgcagctgagcaaactgtctgatgcgttgtcaggcgcgatcgatacccttctgaaatcccccgaactgggtaagtggattgatggcctggcaagcgggatacagaagtttgcgaactatctcgtatctcctgaattttcgacagatgtaagcaactttatggataaagttgagaggatgggggatttaataggccgggtaattgactggatcactggaaaaaccagccttactgcggataacgttcaatccagttcatctatcctcaatcccgaggtacaggtcgacccgaaaacaggtaaatcatacacgccaggaagcgatgatgaccctcatgtctggagctggcttaaaggcgtaaggcgtttctttgatgatggcactgttaaagcggttgatccaaccccttctaatactgccgataaaaaccgaaccattgccgatcgattcaataacccagggaacctgcggtgggcagaagggtatagcagcgaaaatacgcgaaacggaaagtttgctgtatttccaacgctggatgaaggagtccttgcggccacaaaacagcttcaaatttatggcacacagggagtcgacaccgtcagggggataaccaccaaatgggcgccccctccaaagcaggccggtgatgataacaatgacactgaagcgtatatcaggcacgttgttaaggttacgggctttaatgaaaaccagaagcttaacctcaatgatccacaggtcgttgcaaaactcatttctgctatgtcgcaaaaagaaggggctggtagtcgggtttctgaaaaaacggtaatccagatttacaacaacacaggtgggaatgccattgtttccggcgcccttatcgcaggggggcaataa

SEQ ID NO: 179440 - DNA, 603 bp, Klebsiella oxytoca
atgaaaatcgataagaaattgaatctcgttagcaacatcacccgcagagatggttctatcgtctatctgcatgtcacgccgttcccgtatgaagtggtcgaagaatactgtgtattgctgggtaatctgtttaccaacttcattgcacaggttggccctctcggctctgcgcgcgtagccgctatgatgctgagaaaaaggctcaggcaggacatggaagcgagaaaacaggacaatcagaacctggctgaacctccgcaaaccctgaccatcgtcgacgagattcagcgcctgaccgtggttgtctatagcgacgatggtcagtggaagaccgcgccgcttgaggtggcattcaagcaggggattgttgaccctgacgaataccgcgaggttgagggggaggtggttttttttatggtttcctctgccattcagaaagcgaacctgatcgctccaaccgtgggaacggtgatcaaaatgtacgatgggcaactcacctcatcgagcgttacggcgtttcgcgattcgttgctgacgtcgaagccggataccgataccccgacccagaatgcccagccggaaacgtcatatataccctcttag

SEQ ID NO: 179441 - DNA, 438 bp, Klebsiella oxytoca
atgggcaacccattagtaccgcagggctttcttaatcgcgttcgcggggctatctctgtcacggatacccccgcgcttaacgtctctgcctcatacctggcaaaagacgccatcagtctgcgcccggacggtccggcgaccgatattattccgacgctgaccggcactgtcggcagccaggcgccgtatcagcaggttacgctgaccgtgcatcttctgaaaacccaggggctgggtgaaagctatcgccagcgcttcctgactgataccgcgctgggtgaagtcgtggtgacgccggatgcgaacaccttcggcaacctgacgctgcttaactgctatctggtcaacttcaacgaactgacttttagcggtatggacccggcgtttgtggtgaccatcagcggctacatgaacaccaacgacaacatgtgggtgtaa

SEQ ID NO: 179442 - DNA, 1395 bp, Klebsiella oxytoca
atggcaattgttaatattaacgtgtcggtgacgaatccgccgaagccctcgcagttgttaaagtccggggcgatgatttccatgggtggcaccacgctgaatgcaggtgaatatcagctgctgaccaatgaaagcgaccttgccagcattctggccccggcaaaatcaatttcttctcttgcctgggcgaccggtgtggtgacggtgacgctttccgccgcgcatggctggacgaacggctcgcaggtccctgtgcttatttctggctcagcgccggcaggatacaacggtgcctatacagcgacggtgacgggggctaatactttcacgtatccgctgacgaccaaccccggtacctcgacaaccatgggctccgtgaaaacagtcgtttcgaacgaaatttcacaaatgaatacctcgttctggggtcaggggaaaacccggtcagtgtatgtgcttgagttgggagatgtttccattgctgacgccgtggctgctctggccaccttcattgccgaggatgtgtctcttggcaatacctatcagaaattcttctcctatctcgtccctcgggagtgggagtctaacgccagctttaaaactctgaccggactttatacctccccgggcagtctggtttacttcttcgttaccacgacgatcgccacctatcaggcatgggtggcaacgaaaaataaaacggtgtgcgcgggtgtagagtcaccggatatcccggccagcgagttttccatggccggtccgtttcagtcgtctctggctaacgaccctggctccagcaatatggtgccgccgatggcgtaccgcttcatgtacggcctgactgaatatcctcttgaaggcaacagcgcgctgctgaaatctttgcaggacagcaacatcaactatatcggcactggcgcggaaggcggcctaagcaacaaggtcctgttctccggccgcatgctggacgggaacccgtttaactactggtactcagtggcatggaccgcgatcaaccttgaactcgatctggcaaacgagattatcaacggctctaacacgacggttaacccgctctactatgagcagaagggtatcgaccgcctgcagcgccgggcgcttaaaacgatgcgtaacggcatcagttacggcctgatcctcggacgtgtcattgacacgcagttgatccagcaggatttcaacaccgagtacgataaaggcacctacgccggtaacgccgtaatcaacgccgttccattcggcaactataccagcctgaacccgtcagattaccaggaagggaagtacaacggactgagcgccgtcatgactcctcgccgcggctttgaatccatcacgttcaacgtgaacgtaacgaactttgtaggggcgtaa

SEQ ID NO: 179443 - DNA, 939 bp, Klebsiella oxytoca
atgccttccctgagtgaattacagaacgccaaaaccgagcttaatgcgaccctgacgcaagggcttgatgacctgagccggtttcaggtggtgaccttcacgaagtacatcagaaaggtgcttccgctcgatggctttgtattctgggtgaaatcctcggttctgtctgacgatcccagcaatgaaccagccactgtgaatgttaagggctatctgcacctgacgacagaaaccattcaggacgatgagcaactgtacgaccgcaatgtggtgacatttaccgcgcaggcggacattgacccgttcaacgatatcgggtcagaggtgctctacatcggcgagttttttggcgttcagttttctttctcccggcgtacagggctgaatgagccggcgaatctgtaccactacaccggagaggcgattttcccgcacatgcggtcgcagatcatcaactctgcggatgacatagacctgtctgacgtggtggtgtcgagttctttgccgatctggctggccctgaatcagtacatgccgatgtttccggcgatgctctcaacgcaaaacctttcgccgccctatgcgacggtgaaatgcagcaacacgtctccgatcgccggtgcattctatctggacgaaaagcaaaatcagtatcagctggtatcggaagatgtgacgctatcggtcaccggcctgcgtaacgccagcattgaagactttgtgcggtatgtgcaggactacacgaccggagattccccggagatggggatcatgaacatcccagttgtgcaggatgagcgtgtcacgcagaacgagctgaacatcatcgccatgcgcaaaaccatcaaattcaaaattaactactaccagcaacggatgcgtgacctgtcgcgccggctgatcacatctgcaattccgaacatttacccggagaaataa

SEQ ID NO: 179444 - DNA, 438 bp, Klebsiella oxytoca
atgagcatgaaattacaccttggggtgatagatatcccctatgagggagagtcagtaaccacaggggatgtcgcagagttccttgaagataaatacgggattatggctcactttttttggctatatgggccgattattgcagagctaatggccgaaagtatcgcggggcaattagaaaacattattgctggagcgcctccgtctaaggaccctttcgcagaagcgatgagcaaagttcatgacctttttgttaattttcttgatgacgaagaaatgaacggcatgccaggcgttcctacgctcagggctttgatgggcatatcgaagcgcttcaagggcaaaaaagggccgccgcgcccctcgttcattgacaccggaacctatcaggcagcaatgcgcgcctgggtaagcggggtgctgaatgccttccctgagtga

SEQ ID NO: 179445 - DNA, 429 bp, Klebsiella oxytoca
atgacaaccagtctgtcgggatttatcgaattcgttcgagctgatatgggcattacccccgaccaggttcccgacgactcgccgtctttttctctcgcatatggcggcgcggttgaatgggtaaaccctgatatcgcctcggttatgccgaacatgtatagcatcgcggtttataaccttggtgcctcgtttctcatcaactacggcacagaggctatattttctgatttccgcaaagagcatggcctgaatgacttcaaagccggggttattactggcgcgggagataactcaaccaacgcacagcggctggtgcctgatttcttcaaagacctgtctctggctgatcttcagatgctgcaggacccatgggggcgtcgctacctgatgatcgctcagcagttcgggagtctgtggggcctgtcatga

SEQ ID NO: 179446 - DNA, 483 bp, Klebsiella oxytoca
atgaaactgttcatcgccaacactaccaaacagcgccacatctttactttccgccaactggaaaccgggcgactccgccagattcccattgagcacggatcgcagatgcaagttctggatggctcgaccgaagaagtcgaagcagttattcagcatcatcaggtttatggcctggttgactcaaccaaaatagaccagagccaggcatttgtcggcctgtgctacagcatcaacaaaccagtttccgccagcgttattgagaaaactattcgcgataacgatggccatctgacccgcggcgcacatagccgccggcaggcatcagtcgccgctctggatagcacactgcgcgagagcgggatcggctacgaaggtgatatggaattcagcgcagagcaggccaagggtcgcgatgaccactctgacgatccgaccattaacgaaaaaattgtcacgccgaaagccgggagcaagaaaaaatga

SEQ ID NO: 179447 - DNA, 1032 bp, Klebsiella oxytoca
atggctgcaattacccccagttacaccatcgtcaacccgtcgtacatcgcgccggagttgatcatcggttaccagcaggcgtccggtgcgtttgaaaccatcgccagcggcaacccgcaggttcgccttggtgtaggcgaccagtacgtttatatgcgccgtctggatatccgcacccaggtaacctccagccagtccggcaacgctaaccagttgccgagcgtggcgctcgaagcgcgcatgatctccacccctacctatctgttccgttgccgtggcatctacgatcaccacgacaccgctgcagccggtaactggaacatggctcttccagaagctcagcgcctcggcatgcgccagggtatcttccagcagttgcgctctgcgctgctgtacgggatgaacccggcaggcggtgaaggcttgctgaacaccgcaggcgcgaccactgaaaccctgccgccggacagcaatagcaacaccaccgtgctgacctacgatcatggccagatggcagtttatctgcttggtcatgtgcaggccgcactgacccgcaccatgcagttgggtcgccaacagcgtgtcgttatcctcgggccgcagcgtgtgctgggcgcgatggagattcagcagatcgttcaactgacctcttaccagcgtcctggtggtggtactgataccgtcggcggaactgtgaaagaggttctgcgcggagcaaatgttcaggttgactgggtatacgacgacacgctgatcggcgccggcgccggcggcactgacgcggtggtcatcaccatcccggaagtggaagtgccgatggttaactccaccgtgaacaccaacgaattcgccaaacttagcccgtctctggcggcgaacgccctgatgttcaccgacatggccgcgccgatggaaataccgacgccaatccccgggggcgctatcgacgtgctgtcagaaatgcgctctacgtctggctgggcggtccgtccggaagctatcactatcctgtcgatggcatacagcgcctaa

SEQ ID NO: 179448 - DNA, 861 bp, Klebsiella oxytoca
atggctaatttatctcttaacccgatggcgaccacgaatgccgctggttccttcggtgtgcagtctgatggcttcattcagggcgttgccctggacgatcctgcaaaccgctttaatctggcgtcaggtactgtcgccgccaccgaaaccaaaccactctggggcgggctgccggttgctgagttgctgcccggtgtgaaatccagccctcgcggttcgaccattcgtcgtgctgtgtcgctggctgagcttgaaggcttcactgtcttcaatcaggctcacaacggccttaccactccacaatcaccggttccgctgtatgcgtccggcatgagcgtttcattctatcgccttggctctaacatgcgcgttccgctgaaagcttcagtgcaggtggtcgcgctgggaaccgctggcgcatcggtgaaaacggctctggcgtgggactttgtcaatgatcgggtgaccaccgcagccgcggcggctttttccggctctgacattgagacgtcttcggttacctactcaaacggcgtggccactgccactaccgcctcagcgcatggactgaccgctggacagtacgtgaagattagcggcgtagctccggcggcctataacggtaccgtcgttgtgctgtccgcgccgactgcgacaaccttcacctatgcgccggcaagcgcgccgggcggctccgcgaccgcgcagggcactatcggtgctgtggctcaggcagatatcacgctgccggtgaaagtcctctccatcgagaacgggaattccaaaactgtcagctatgacagtacgacgggcttccttacctggaaaaacgacgacgcctgcgcgctggtcttactttaa

SEQ ID NO: 179449 - DNA, 1617 bp, Klebsiella oxytoca
gtggctatttttggcagcgggataatgttccgtcaggggaaattcgtcttcctgatccagcgctcggatgatggcacatggtgtcagccgggcgggacgatagagccgggagagttagccatagacgccgcacggcgcgaggtgctggaggaaactggctatcagtacgatggcttgctcacgccgcacagcgtatacggtgactatctgacctaccgcgccgacgtgccggagcagttcgaagcgaagttaaacgacgaatctctggccgccggatggttccatattgacgatttgcctaagccgcttcatcagccattcgctgaaatgctggcgcagcaggcgctcaatgaaaccgacgtggccgcgctcatcgctgacggaaccctcagcagcccgcaatatttttacaacatgtggatgttcgccatccgggtgaccggaacaggggttacctggagatctgcagatcaggagatgaccttccgtaacccggacgactatctcacccctgaatttctccagcgggtagctggcgtcccgcttatctggcttcaccccgaaaaaagaacacttgatagtgacgagttctcaaggcgcgttattggcaccctgacaaatgcctgggttgccgataagggcgaagtgtgggccgttgcgcgtgtgtacgacgccgaagctgctgaaattatggcaacaaggcaattgagcacctcgcctactgtgaagttctcagaggttgctcaatcaatcattgtcgacggtcagcctctattggtggagccatcccccgagctgctcgaccacgttgcaatttgtgaacagggtgtatgggacaagctccttaaccccaccggtgttaaatctgattccattcccaaagaggctgaaaagatggacgaggaaaaaatcgtagcgctgattaataaggcgatcgatgcacgtttggctaaggctgattcagaagcagcagacctgaaagccaaagctgatgccgaagaagcagccaaaaaagaaaaggctgatgctgaggcaaaagaggcggaagaggcaaaagccaaagctgacgcggaagaaaaagccgcgaaggaaaaagctgacgccgaagccaaagaaaaggcagacgccgaagaggctgagaaaatggcaaaagaaaaggccgactctcaactgcgccaggaaatcgccgagcttcgctcccgcattcctaccgaactgagcgacgaagagcgcaacgaagttgctgaagcgcaggtgaaagccgatagcgtcttctccagctttggcaagcgcgctccgatcccgctgtccggtgaaaaaccgatggcgtatcgccgccggctgatgattcaactgcaggagcattcgccggactttaaagccgtcgatctctctgccatcgctgactctcaactgctgagcgcggctgaaaagcacatctacgccgacgcacagaaggcagccagcctgtcggttggcccgggcatgttgcgcgagattaagcgcaaggatgctaccggtcgtgagattagtacctttgaaggcgatccgtccgtcacctgggcgccgttccagtctggcaagcgtcaggtcaccagtttcaacaaccaggcttaa

SEQ ID NO: 179450 - DNA, 825 bp, Klebsiella oxytoca
atgaagactttcgcacgcaccgtgcgcgaggcggtgaagttctttctgcgcaatggctacacctcgcgacaggagctggagcaatggcagtccattatccggcaggctgccgaaagtgaaactgatgacgactacatgggcatggtttcagaacgtcttcggaagacctatgacctgcaggtaagcaaggctggcgcgctggagcgccacaaggggctttcacgtttcacgctgaattacatggagccaaagctcaggagcgaactggatcgccgcattctggccagcgctgacctgataaagctcaaccgcaagaaagccatcgacaccacgttgtcgcggtttagcggctgggccagcagcattccctcatccgacagcattgcgctgaccggcattcagggaacgatgcgggagactgcagcgcacattcagaaggccgccgagaaggtggactatgaagcgcgccgggtgatgattgaccagaaccataagctgatcgctaacatcgacaacgtgatcgcaacgagcaacaacgcgattgcagcgatatggcacagccactggcggaggccgggctatgacttcagggaggaccacaaggaacgcgatcagctttattacctgattcgcgggaactgggcgcaaaaaaacgggtacgtgaaagctggtccaactggttacctcgacgaaatcactcagcctggcgaagaggttttttgtcagtgctacgtgacctacatctacaacatccgaagcattccagaatacatgctgacccagaaggggcagaagttcatagagtcgatgaagaaagcagcatag

SEQ ID NO: 179451 - DNA, 1416 bp, Klebsiella oxytoca
atgaacgaagatgatatcgcactcggcagttgctcgccggagctgatcacgctcctggacagcgatgatattcagccgggtatgtcggctggctatgagacttgcaaaacgatttacctcttccacccgctgggcggaaaaatggtggatcgtcccatcaagatggcgatgaatgagccgcgcactattcacatttcgcaggcgtacggcattgaatcgcgtctcagtgatgcgtttgaacgtgagtggaaagcgctcggtgcagataagcacattgccaatgcggcgcgcatatctcgcatttacggcgtttctgcggctgcaatgctggttgataaccaggagccatcctcggcagtcgattaccgcacgctgtataagcacaacgtgactttcaacatccttgacccgctgaacaccgcggggagtatcgttctgaaccaggacccgaacgcgaaggaattccagaaggttgaagggatcagggtggctggcaagccgtatcacaaatcccgctgcgtggtgcagcagaacgaagaccctatttatctggcctataactcggcggcctttggctttaccggccgcagcgtttaccagcgcgcgttattccctctgaaatccttcattcagaccatgcgtaccgacgatatggttgcggtgaaaggtggtttgctgataacgaagattaagggtcctagctcagtcgtcaacaacatgatgcagaagctcagcggcatcaaacgaatgatgctcaaaagaggtaagacaggtgaggtcctgcagatcggagaaaatgacggcatcgaatcgatcgaccttagcaacctggaaaaaccgctagattctgcccgcaatcacatcctggagaatatcgcggcggcggccgacatgccggcaatcatcctgaactcggaaacgttcgctcagggttttggtgaggggacggaagatgcccgttcggtagcggtatatatcgacaacatccgcgaatggcttgagccgctgtacgactatttcatccgtatttgtcagtaccgcgcctggagtattgagtttttccagtctctgcgcgctgatttcccagaacttcaaaacacctatagcgtgtatttcgcgagctggattaacagcttcgaatatcgctggccgtcctccctgaaagagccggaaagcgaaaaagtgaaggtcgacgaaatccgctttaaggcgatcgttagcatgctggaagttctccttccgcaaaccaacacggacgacgaaaaccgcgctttgcttatcgagtgggcgcagaccaacgcaaacgccaatgaaagcctgttcccgcagcgacttgaccttgatatcgactcgctaaaggctaatcgtcctcagcagccgcagggggatgatcccagcggcgggatgatgctatga

SEQ ID NO: 179452 - DNA, 1332 bp, Klebsiella oxytoca
atggccgacatttacctacccacgctacacgacgggcagttgacggtctggtctgactcctggcatcaccagttgaatgcggttcgctgcggtcgacgctggggtaaaaccttcatgctgtcgagcgccgcggtgacctacgcgacgtcacagttccgccgcccgggtatggacattgaactgggtggacgggtcggtatattcactgccgagtatcgccagtaccaggagatctacgacaagctggaagaaatcctgcttccgctaaaaaagagctttagccggcaggaaaagcgcctgctgctgaagaacggcgggaaaatagatttctgggtcaccaacgacaacaaactggctggccgtggtcgtgaatacgaaattatcctgatcgatgaggcggcgtttaccaagtcgcctgagatgctgaaggagatttggccgaagtcgattaagccgacgctgctgacgacaaagggccgggcttacgtgttctcaacgcctgacggtgtggacgaagagaacttcttttacgccatctgcaataacaaatccctgggatttatagagcaccatgctccaacatcctctaacccgttcgtgccgcccgaagaactggagaaagagcgcgagaataacgatcctcgtgttttccgtcaggagtttctggccgagttcgttgactggtccgctgcgtcgctattcgacgtccgaaaatggtttgagggtgagaatcaggatcagcctgtcgattaccctgaaatgtgtcaggccgtattcgccgtcatggacactgccgttaaaggcggtactgagcacgacggcacggcggtggtgtactacgccgtcgatacccggcccggcattcagcgcctgacgatacttgactgggatgtagtgcagatcgacggtgcgctgctggaaacgtggatgccatcggtattcgagcgcctcaacgaactttccagccagtgtgtatccatcaacggcagcctgggcgtattcatcgaagacgccagcatgggcagcattctcctgcagaaaggtgaaagccttggatggccggtcaacaaaattgaatccgccctgaccagcaaagggaaggacgagcgcgccattatggcctccggttatcactaccgcggcctggcgaaaatatcccgattcgcctacgagaagacagccgtattcaagggcgaaacagccaatcatctgcataagcaggtatcacgattccaccttgccgataagaacgcgcacaagcgcgccgacgatttgctggatgattacacctacgggctgatcatcgcgttcggtagcggcgacgcactctag

SEQ ID NO: 179453 - DNA, 741 bp, Klebsiella oxytoca
atggcaaaaccggactggggagcactgcaacaccagttcctcgccgagcatgccaaaacaggaatatccccgaaagactggtgcgcagcgcagggactgaattactcatctgcgaaacgctatatcaaagccacgacttacggtgcgaattcgcaaaaaaaaagtgcgaataaatctgcgaattcgcagaaggagaatggtggggccagtaaaaacgggaaggtgaaaaaatccgcccgagaaacaggcgcccgctcaaaatctccagaaacgaaaccgatacgcggatcacgcactgcgccgccgacgaacgctttccagcctggcaaccagaatgcattaaagcatggtggctacggccgccggatgctgctctctgacgccatcaccgaagatgcccagatgctcacgctcgacgatgagcttttctggctgcgggcggcgagcctgacagccgcggagaatatcggacgctggcagacagagctggaaacagcctgcagcgagcaggccaaagacctgcacgacctcatctctcaggcgcagaaagccatgcatcgcaacaccgcgcgcattgagtcgctggagtacaccaaagcggcaatcattaaacagcgcgtcgatgctgcttaccgggaagctgctaccgaaaaggttgagctcgaaatcgatgtgctgaaagacggcgacaaggataacgcgatcgtcgtgcataactcgctgcctatcccgggaagataa

SEQ ID NO: 179454 - DNA, 468 bp, Klebsiella oxytoca
atgagccgattaaccgccattatcatcgccgtggttatctgtctggtcgtctgccttggctggctggttatgcattaccacagcaacgccaccgagttcaaaagtcagcgcgataaagtgactgagcagctcagcctggcgaaagacactatcgctgacatgcagacccgccagcgcgatgtagctgcgctcgatgccaaatacacgaaggaattagccgatgcaaaagctgaaaatgatgctctgcagcgcaagcttgataatggtggtcgggtgctcgtcaaaggcaagtgtccagtgtcagcctcaacccaaaccgccggcgccgccagcatgggcgatgatgccaccgtcgaactctcttcagttgctggacgaaacgttctcggtatccgatccggaatcatcagcgaccaaacagccttgagggcgctgcaggaatacatcaccacgcagtgcctgaagtaa

SEQ ID NO: 179455 - DNA, 498 bp, Klebsiella oxytoca
atgtctccagcactgcaaaaaactgttattgcagcggtcaccggcggcgcgattgcgatcgcttccgctctcatcactgggccaactggtaatgatggtctggaaggggtgagatataagccttatcaggatgtggttggcgtctggactgtctgctatggccacactggcaaagatattgtgctcggaaagacctataccgagtctgaatgccggtcactgctcaacagggaccttaccaccgtcgcccgccagattgatccgtacatccagaggccgatcccggtaacaatgcgcggggcgctttactcatttgcgtataacgtcggcgccggaaactttcagacctccacgctgctacgaaaagtcaaccagggcgaccagaaaggcgcatgtgaccagttgcgccgctggacctacgccaagggcaagcagtggaggggcctgataacccgccgcgagattgagcgtgaagtttgtctctggagtcaaaaatga

SEQ ID NO: 179456 - DNA, 207 bp, Klebsiella oxytoca
atggacaaactcacaacgggcattgcctacggttcttccgcaggtagcgcggggttctggatactgcagctactcgacaaagtatccccctcccagtgggctgccattggcgttcttgggagtctggtattcggcttccttacttacctgacaaatttgtatttcaaaattaaagaagaccggcgcaaagctgccaggggggaataa

SEQ ID NO: 179457 - DNA, 540 bp, Klebsiella oxytoca
atgagcgaaagaaagtatccttcgcaggataccgtcagaaagtatttcatttatgaaatcggaagcctgatccgtaaagagaggccggaagttgagttttccacctcgggcctatgtgaaagatggaatgccttgtatgccggtacgcatgcaggaagtctgagcaccaacggatatatttatataaagcttaatggcctaaggtttatggctcacaggcttgtctggatataccacttcggagatataccgacaggaatggaacttgaccacatcaaccatcaaaggcgcgataacagaatagaaaaccttcgtatggtcaccaggaagcaaaactgtcgaaatcgtgctttgcctaagagaaacacatctggggttgttggagtaacatttgataacttactgaaaaaatggaagtcacaaataaacattgatgggaaaaacatgaatcttggaagtttttccacctttgaaaaggccgtgacagcaagaaaatctgccgagaatttttacggctttcatgaaaaccatggtcgttaa

SEQ ID NO: 179458 - DNA, 690 bp, Klebsiella oxytoca
atgacagctcaatacttggaatttgttcgccagcagctgatagtggccaccgccgatctgagcggtgcgacgaaagggcaactggtagcttttgcagagaacgcacaattcactgctacggcgcgcagccgtggaaggaagaaggtatatagcgaggtgaagcaaaaaatggttaaccctgacgggccgccgatgagcggcagccagtcccgcgcaaaaggttcatcaatcgctctcgttctgcccgttgagtattcgacggcaagctggcgccgagctctcatgtcgctggaagagcatcagaaagcgtggttgctgtggaactacagcgacaatatccgctgggagcaccaggagacgatcacccggtgggcatgggagcaattcagcgagaagctggccggcgtacgcattgcgaagaagactgtcgatcgccttcgtcaacttatctggctggccgcgcaggatgtcaaagccgagctggcagggcgggagacgtatgaataccagtcgctggcggagctggttggtgtagcaaagtccacatggacagaaacctacctccctcattggctggcgctgcgcagcagttttgtgaagcttgatagcgacgctctcatatcggtaacgcgatcacgttcacaacaaaaggcgacaaatttagatgtaagtcttgcaaaaccgaactga

SEQ ID NO: 179459 - DNA, 141 bp, Klebsiella oxytoca
atgaaccatctcgccatagagcgcatccgcgaccgctggcaaaagcttcgcctcctgcgtagccgcggcaccgtgctggttgactacaaaatattacgcaatttcgtccgtatctataagcgcctgggagagacagcatga

SEQ ID NO: 179460 - DNA, 357 bp, Klebsiella oxytoca
atgaaaatctacgatatcacaccaatcggcaagcctcgcatgacccgcgcggataagtggaagcagcgcccacctgtaatgcgttatcgcgctttttgcgatgaagtccgcctgcgcaagatgaccatgcctgaatccggatcacatgtgacattcgtcctaccaatgccaccaagctggagtaagaagaaacgagcggagttcgccggtaagccccaccgggccaagccagactgcgacaacatgctgaaggccctgatggatgcgctttatgaggatgatgctcacatctgggattgccgcatcaccaagatctggggcgagaaagggcaaatcatcatcggggagtgcacatga

SEQ ID NO: 179461 - DNA, 285 bp, Klebsiella oxytoca
atgagtaaaacctaccacagcaagaagtggctcgccgcagtcggccagattgagcaatgcgtcctgtgcggagcgtggggcgtacaggtagcacaccgcaatgaaggtaagggaattggcatgaagacagacgactgcgccaccgccgctatctgtgtcacctgccattcagagatcgataacggaaagggtttgagccgtgacgaacgccgccagttaatggaccgcgcgattgtactgaccgttatccagattgcccgtcgtggcttggtggtgcccgcatga

SEQ ID NO: 179462 - DNA, 669 bp, Klebsiella oxytoca
atgagcctctatcgaagcattaatggtgctatctggcgcaacatctgggttgttggcgatctgcatggttgccatacgctgctgatgaacgagctggaaagggtccgtttcgacccgttgtgtgacctactgatctcggtaggtgaccttatcgatcgcggtgcggaaaacgtcgaatgccttgagctaatcgcaatgccctggtttatggctgtaagagggaaccatgagcagatgatgctcgacggactatcctcttccgggaacgtgaatcactggctcgctaacggtggcggatggttctttaaccttgactacgacaaagaacgcctggctatcgcgttggcccatttggttgctggtttgccactcatcatcgaggtaatgaccgagggtaagagggtggtggtctgccatgctgactaccctcataacgaatatgcgtatgacaagcccgtcgatgcagaacaggtgatctggaatcgtgagcgagtgagcgcggctcaggatgggattgtctcgccgatagccggtgctgatctgtttatcttcggccatacccctgcgcgccagcccctgaagtatgccaaccagatgtacatcgacaccggagctgtgttttgcggaaacctcacgctggttaaggtgcaaggtggtgaccatgagtaa

SEQ ID NO: 179463 - DNA, 168 bp, Klebsiella oxytoca
atgcacagtcttctcgctaaggtcatggatcgcggcatattccgcgtgccggcgcgccgcaagcgcaaggtcgaagttaaaccatcagatatccccacctttcactatacggctcacctggcagatgtccgctggctgcgccgcgctgccagaaggaaaattgcatga

SEQ ID NO: 179464 - DNA, 468 bp, Klebsiella oxytoca
gtgaagcaacaattctgccttatcaacgacaacgttaagcgtaacgtcgtcagcttcatccagtctctgcccgtagaccaccgatcgccgctgattatcgaggcgcgcgaagaaagccgcaccgacaaacagaatcgtctcatgtggccacttttgaaagacctgagtgatcaggtgatctggcacggagaaaagctggagccggcggagtggaaagacctcatcactgtgctggtcagccagatgcaaaacccggagcgtgagcagaaatctgccccgggcatcaacggcggccgcgtctacttcggcgttcgcacctctcaatccagcaagcgctacatggtcgaggtaatcgaggcgatctactggttcggcaccgagcacaatgtgaaatttagcgagaagtccagcagtcggattgcatgggcccaggaatggagggcttcgcatgcacagtcttctcgctaa

SEQ ID NO: 179465 - DNA, 258 bp, Klebsiella oxytoca
atgtcacagtggaatatcgcatcaaagacaaaagacgagcaggataaggtcaatgtcgacctcgcagcctccggcgttgcctataaagagcgcctgaacatgccggttgtcgccgaggtggtagccagagagcagccagagcatttaagagagtatttcatggagcgcgtccgctactaccgcgagcagagcatccatctaccccgcgcatccgatccgcgctatctggaaatggccagtcagaacgagaaaaaatag

SEQ ID NO: 179466 - DNA, 240 bp, Klebsiella oxytoca
gtgaataaggtcgaattgcttcagaaggtatcggcgctcgccactgaatgtcacacgctggcctgtgagcttgatattggcgatgagcgcacggaaatgttcgaaatctacggcgtgctgcacaacctcggtcgccgcggctacgccagtcaggtggggcggcgaatgaatccgctgctcgcatcctgcgatgacgacgaggatgaggaagatgacgattgggaagaggatgaagactga

SEQ ID NO: 179467 - DNA, 729 bp, Klebsiella oxytoca
atgaccagcaaattaaccataacagacgagcgcctggcggaattagtggcgttcaaaccattacctagcacagatatcaactcggccacccgggatgaatggatggctatggccgcagagctacaggaacgccgcaaggccgacagcgcgccggttggtgaattctacgaagatggaccgctaaactggtatcaaatatctgatggcgaccgagttccagcccacaagcgtatcccgctttatcgccacgcgcagccagcgctggcagataaaaatccattactcgaatttgccagggaatatatcgagtcgtgggaactgggtatgcctggtgacagcagtctgctggccagcgccagaaaagcgatagcggactcagaaattccgcagccagcgccggtagtgccggagaaagcaaccgttggcgaaatgccattccttggcaccagtgaaggggcatatgtgaggggctggaatgactgccgcgccgccatgctccagccgctgcacaccatcaaagccgcgccagctctgtgttcgttgtcaaaaactggcgaagtgctgcacgccaactctccggtaattccggatggttacgtgatggtgccgaaggagccgacaccagaaatgctggcagttataaacgaagccataaaatctatgcgtggttcagcggcaacgtatgcaagggtgctcgcagccgccccgcaggaggtgaaaggtgaataa

SEQ ID NO: 179468 - DNA, 519 bp, Klebsiella oxytoca
atggcactgacacacgatgaactttgccagatagcctatcaattccttaaacggaacggcttcaaagtctgctttcacgatcgctttgttgctgtaaccagcaccggtgaacagccagacgccatggggttcaggaatttcgcttcctgtctgatagaggctaagtgctcacgcgccgacctcctcgcagacaggaaaaaacgtttccgactacgccccgagcttggcatgggtgactggcggttctttatcagcgagccggggattatctctgtcgaagaccttccgccaggctggggactgctgcatgtagtcaatggaaaggttcgaaaggttcacggatggccacagggaaactgttgctggggaagcgaagaggataagccattcaccggcaataagcaggtcgaatgcgattacatgctttcagctctgcgccggatggagctgagagggcatctaaacgaaatttatgacggcgtgatagtgaaccgggcagcagaaggagccagccaatga

SEQ ID NO: 179469 - DNA, 630 bp, Klebsiella oxytoca
atgacaactgatatcaccgaactggcgcagcgtatgaaagcggcagcagagaatgcgactccgggcccgtgggaggttcaatttggcgatgaaatttacgcaacagatggcgtagataatgagcaggtggccattgcaacgctcgacgcccgtgatgcggatttcatcgccctggctaaccctgccaacatcctcgcgctggtagaggcgctggagaaggctcggcagcgtattgatgaactggagaatgacgaagttcgtcaacggctggctaacgcagagcaccaactctacatggctgaactggctaagcataacctcaaagctagccgcaaagcccagttccgcaagcgtagagcggccgagaagcgcatcgccgagctggaagaagcagagcaacaactctgtgccgctaacgtgacgctcgatgctcgcgcggaattggctgagcgccagctggccgagctggagtcccgcaccgtcaccgtgaagctgaccgatatcaacgagtacctggcagaggttcacgataaaacgctaaatcgggccttccggctactggctgaaggcgtgcgtgctggtgatgtcgccgctatgcgcgccactggcatcaaggtggaggctgagtga

SEQ ID NO: 179470 - DNA, 465 bp, Klebsiella oxytoca
atgagcaagctatcgaatggatatattttgcgtgctgtgtggcatgcagtcttgaagcagcttcctgttcgcgtatctcataactatttcggcgatgggaaagttgttgacctttgccgtaatgaacacttttggatgcgctcaagtaccgaaatttgcaccacaggccgcaaaaactctatagggctacctcttagcgatagccagtccatgaaccgtattaagcgccttgttgacgatggtcgtcttgagcgtgagaaggcgactgggggcgcattttatttctggcttcctgaccgtctgaatcaaccagcctttgagcgttgtcttgagcttatgcgggaagaaggcatcacggagaaagccaccaatatcaccaattacgatgaaatcgtggagagagtgagggaaaaactcatggctgagtttggtgccgtcgatttgaaacaggagcgtgcagcatga

SEQ ID NO: 179471 - DNA, 510 bp, Klebsiella oxytoca
atgaacatctcaacagtaaacgagctcattcagtcgctggagagtgcgggcgagctgtcaatcagagagacaaaggttatggcgctggcaaaagcgtatgtgcagctggctgcggagaatgtggcgttagctctggaaaatgtagcgatgaaacagatagttgactccgtaaccaacctagataacgaacctcagtaccacgccgaaggcatggggtgcggactggaagaccgaggcattactgaccggtacgacgcctgccgctatggctgggatgaagccatggagcggatatatggcgatgttatcccatgcgcagaagaactggacttttcgtccaccgatcgcatcgtagccgggattaaggctgatgagtcgaaattcattttccaaagcattcttgataatcctgccgtagccgaccttggctctcttgtcgactggcttgagcagcacgccaatgatagtgccgcagcagtgcaggctatgcgcgagggggccgacaaatga

SEQ ID NO: 179472 - DNA, 1104 bp, Klebsiella oxytoca
atggcaaatactgccgaagtaatcaatttccctgtgcctgtcgtggcactacaggagctgcgcgtggcagatctcgacgatgggtttacgcgcatcgccaatgagctccttgaagctgtcatgcgtgcgggtttgtcgcagcatcagcttttagtgcttatggcaatcatgcgcaaaacatacggcttcaataagaaatctgactgggtcagtaacgatcagctatctgatatgactggtcttgctgccactcgttgttctacagcgaaaaacgaactgattcgcatgtctgtgttgactcagtccggacgtcatgtaggcataaacaagatgatttcagagtgggagacaagtaagccagagcgcaggcgtgaatacggagctacaaaaaataaggctgggtatatttatgtctttgctgaaagtgaatcaggtcctgtaaagataggtttcaccacaagaaaggctgaagagagattaaaagaggttcgtcactattttgatggcaagaatcctaaggttttttacgtgtcaccattctgccttcatgctggagcaatagagccagtaattcatgcaaatctcaaggcgaagatgatacgcggagagatgtttgataccgacgttttgcatgcggttgaaaacatttcaaccgtaatgaaaacatttcaaccgtcagggaagaatagttttacaccgtatgggaataacgtttcccgccagggtggaaacacaaaagacaaacatacaaaagacaataaagacaatagtaataaaccccctaaatccccccgggcggtttcgttcgatgcatccagtgttcagctgcctgactggctgtccgtagtcacctggtcttcatgggttgaataccgtcgtgacctgaaaaaaccgatcaagtctcagcagaccgtgacgcaggctatcaacctgctcgaccgctgcaggctgaacggatacgcgcctgaagaaattattaaccgaagcatcgccaatggctggcagggcctgtttgaacctgacgggcaggctaaacgcagtcgcgatgcctgtcaggaagacccccactggaacagcccggaagcgtggagggatttcctgtga

SEQ ID NO: 179473 - DNA, 321 bp, Klebsiella oxytoca
atgcaaagcgcaatagcccgcaacttagaaccgccgatcctcaacccgattgagctggaaggggttttgctcaaccgcctttcatccatcgggcagaaggcttacgcggagatattgggtatcagtgaatcaacagtcagtcgcagaaagggggaagggcatttcgctgacatagcaaaagagttgtccgtgcttggtctgcaggttgtaccgcctgaagcggtagtggtttcccggcattacctgcggtcagtagaaacactggccgatattggactaagagctgagcggtgccggccagggccgttagggtgggactaa

SEQ ID NO: 179474 - DNA, 234 bp, Klebsiella oxytoca
atgagtaatgaacttttacgctggcgaaaagatgccagcacaggcgagtgggctcagttggcaaaactggcaaacacaaccgttggttatctggatcaaatcgcctatggaaatcgtcgggcctcgcctgagaaggcagaggcaatagaagaggccaccaaagggtttagccattaccaacccgtatccaaagagagccttgttttttcacgtccgcgatgttccgcggcttaa

SEQ ID NO: 179475 - DNA, 753 bp, Klebsiella oxytoca
atgctaaatactaagcaagaaagatttagcaatttgcatatttatcattctgctaaaaatgacaaaaatgagcagatggaaagtaaagagattagaaaagcgaatctggagaacttggtcgaacagcagcgtgtagatgcaggcctgaacaaggctcaatttgcagagcttatcgatacaagcccagcagcactgagtcagctgataggtgataaaccacatagaaacatcggcgataaaatggctcgtaaaattgaatctgcactcaatctgcctttcggctggatggatacattacatgccaaagagaaccacacgaacgtaacattcagatcagtaaatacccctcaggggagctacccagtgatcagttgggttagtgccgggcagtggatggaagctgtggagccttatcaccgaagagcgattgaccgctggtatgaaacaaccgtcgaatgctctgacgattctttctggttagatgtccacggcgattctatgacatctcctgtcggccttagcattcctgaaggtgcagctatcctggttgatcctgaagtggagcctattaatgggaaattggttgtggccaagctggaaggcgataatgaagccactttcaaaaagctagtaattgatgctggaaggcgcttcctgaagcctttaaacccacagtacccgatgattgagattaacggaaactgtaggattgtaggggttgtcgtcgatgctaagatattgaatattccctga

SEQ ID NO: 179476 - DNA, 285 bp, Klebsiella oxytoca
atgaacgcataccgcgcatacgacgctatcgaagaacggaaatgggctgaacagtcgctcaccgaagagaagcaaaagtggattgacgatcgggcgcaggaaattatcgacgtcctgccgaaagagccgtcaggcctgttccgcttctctgtgccgatggacaaaagcccatgcgaaggcctccgcagcgatgcagctggcgaggcatataacgatctcatttcggcagtagcttacgcccaggcggaatacgactgggatcaccgaaccggctgcccgttttaa

SEQ ID NO: 179477 - DNA, 234 bp, Klebsiella oxytoca
atggcacgaagaaatttactccacaaatcgaaattagccgacttcaaggagtggctctcgatgaacggaattcagtggagagatgggaaaggtagttaccaggtaatccaggtgaatacgggatgcggctggacaccgatttatgacagcagcaaagagcgacgcgagcatttcactattcaggatgctctcaggcctttggtaaacagattcatcagagaggctgcaaaatga

SEQ ID NO: 179478 - DNA, 129 bp, Klebsiella oxytoca
atgacccgcagcctccttgaccgcgagtcatttttactcgctctcgtctggctggaaggcgctcaatgcccgatatcctgcggcctttccattctggcacagaagatgcaaatcattgagaaaccataa

SEQ ID NO: 179479 - DNA, 132 bp, Klebsiella oxytoca
atgccgggcgacaacatcaaaatggttgttaccctgatccacccaatcgcgatggacgacggtctgcgtttcgcaatccgtgaaggtggccgtaccgttggcgcgggcgtggttgctaaagttctcggctaa

SEQ ID NO: 179480 - DNA, 1155 bp, Klebsiella oxytoca
atgaaagcattagttatcggcggcggaatcggcggcctgagcgcggcggtggcattaaaaaatgccggtatccactgcgaagtctttgaagcggtgaaagaaatcaagccggtgggcgcggccatctccatctggcctaacggcgttaagtgcatgaagcatttaggcatgggggatattatcgagagttacggcggccccatgtattttctggcttacaaggattatctgcgcggggagactctgacgcagttcagcctcgcgccgctggtggcgcgcaccggtggccgtccctgtccggtttcccgcgccgagctgcagcgcgagatgctcaacttctgggggcgcgacgccgtgcagtttggtaaacgcgtcacccgctgcgaagaaaacgccgacggggttcgcgtctggtttaccgacgggtcgatggctgaaggcgattttctgattgccgccgacggtagccattcggcgctgcgcccgtacgtgctcggctatacccctgagcgccgctacgcgggctacgttaactggaacggtctggtggaaattgatgaggcgattgcgccgggcaaccagtggaccaccttcgtcggcgaggggaaacgggtgtcgctgatgccggtctccgatggacggttttactttttctttgatgttccgctcccggcggggctggccgaggatcgcagcaccctgcgcgcggatctcagccgctacttcagcggctggtcgccgcaggtgcagaagctgatcgccgccctcgacccgcagaccaccaaccgcattgaaatccatgatatcgagccgtttgaacggctggttcgcggcaaggtggcgctgctgggcgatgccgggcacagcaccacgccggatatcggccagggcggctgcgcggcgctggaggatgcggtggtgctgggggatctgttccgccagagccgggatatcaccaaggtattgcgccagtacgaagcgcagcgctgcgaccgggtccgcgacctggtgctgaaggcgcgtaaacgctgcgatgtgacccacggtaaagatatggcgctgacggaagcctggtatcaggagctgaaatccgaaaccggggagcggattatcaacggtctgtgcgaaaccattcagggcggcccgctggggtaa

SEQ ID NO: 179481 - DNA, 1383 bp, Klebsiella oxytoca
atgtcagatgaaaaaaacggcggcttactgtacggccttgagcagcggatcccgccgctcccggctttttttagcgccttacagcacgtactcgccgggctggtaggcattattacgccgccgctgattatcggcgcggcgctggggctgggggagtggctgccctatttgatcagcatgtccctgctggcttccggcatcgggaccttcctgcaatccaaccgcctgtgggggatcggcgcgggcatgatctgtatgcaggggaccagctttgcattcctcggcgtcgccattgccggcggtatgtgggtaaaagggcagggcggcacgccgcaggatattatggccatgctgtttggcgtcaacgttgtcgccgcgctggtgccctgtctcgtcagccgctttattgaaccgctgaagcgcatttttactccggtgattaccggcagcgtgattgcgctgatcggcattagcctgattaaagtcagcgtcattaactggtgcggcggcgagcaggctaaagcgtttgccagcatgagcaatatcgccctcggcgcgggcacgctggggaccatcgtcctgctgagctgtgcgaaaaaccgctggctgcgtctctcttcggtggtggtggggattgccgtcggctgcgcggcggcggcgctgagcggatcgttccagcttaaaggcgtcggcgatgtctggttccgcttaccgcagctgttcccgtttggttttcagtttaacagcgcgatttttctgccgattgcgctggtgtcgctggtctgcattcttgaggcggtaggcgatttgacggccaattgcctgatctctcagcagtcgatagatgacgaagcctttcgttcgcggctgaaaggcggcattcttgccgatggcataagctgcatggtggcggcgatgctgtgcgcgttccccaataccacctttgcgcaaaacaacggcgtgattcagatgaccggcgtcgccagccgctacgttggccgctacatcggggtgattttgattctgctgggcctgtttccgccgttcggcgagatactgcgccagatcccggcgccggtgctgggcggcgcgacgatggtgatgtttggctgcgttgtggcggcggggatccgcattatcacccagaaaccgctaacccgtcgcgatatgctgatcgttggcctggccttcggttttggtctcggcattgaagcggttccggcgtttctgacccacttcccgccgatcgtgggtaacctgttcggttccgcggcgaccagcggcgggctggtggcgattgtcctgaatctgattattccggaagagaaaccggccgcggcggcggccacaaggagcaccgatgatcgcgctgaatcactttaa

SEQ ID NO: 179482 - DNA, 501 bp, Klebsiella oxytoca
atgatcgcgctgaatcactttaatcagctgagcggcgaacatgccgtcgccgtgctggaaccctgcgtggccatctccggctgggcggcggcgctggccgccggccggccctggcgcagccgcgctgatttactcagcgccgcccggcggctgatggcggcgtggggcgaagcggagctgaccgaggcgctaagcgcccatccgcgtatcggcgaaaagcccgccgggtctcaggcgcacgcggcgctctcgcgtcaggaacagggaagcgttgatgaccgcgatgctgcgctggcgcaggcgctgaaagagggcaacgcccgctacgaagcgcggtttggccgggtctttttgattcgcgcgaaagggcgcagcggggatgaaatcctggcggcgctgtcgcgtcgcctgcaaaacagcgagcgcgcagaagtcgaggacgcgttagcgcagctgcgcgaaatcaccctattaagactggaaggagcgattggcgaatga

SEQ ID NO: 179483 - DNA, 327 bp, Klebsiella oxytoca
atgagtaccttaagcacccatattctggatatttccaccggccgaccggcgcagggcgtaaagattgcgctggagcgcgaaggcgcgctggttgcccgcggcgtcaccgatgataacggccgcattggcgaactcggcgccgggacgctggcgccggggcgttaccggttgtgcgcggaaatcggcgagtggtttgccgccagcgggcgcgagacgctctacctgagcgcgcagattgatttcgtcatccgcgaagcggctggcgagcactatcatttaccctttttaattgcccccggcggctggtctacctatcgcggcagctaa

SEQ ID NO: 179484 - DNA, 189 bp, Klebsiella oxytoca
atgaacacaccgcacaatgaatgggacgcttacctcacacaaatggaacagctgctggcgcttgagctggacgatgcgcggcgcgcagagctcaggatgcagtttagccgcattgccgccatggccgggccgctgctggcctttcccctcgacgatcgcgtcgaaatcgccggagtctataaagcatga

SEQ ID NO: 179485 - DNA, 537 bp, Klebsiella oxytoca
atgactattcatggaaaggatcgtgtatttatttctggcgtagagaatatagtgcagacgctgagcgatggcgcggatgcggggttaagcaactgcgtgtatgtcacctgcgggatggatatccaggagatatatgctttgttctctcgccatccgccggagcactacgccatcttcatcacctctgagcgccattttgagaccatcaaccggctgtttccgggcctgttaaagctctgtttgtcagagaggttgacggtcgaagagctgcgtcaggcgttaaaagtgatgggcctgttatcggcccagaaccagagcgttgcttatctgcccgatacgtttaattttacccatgccgagcgacagatcatgaggctcagtttacgcggccattctctggatgatattgcccgtatccgcggggtcagcccgtccacggtcagcgtccagcgtacccggctgatgaagcgcatgggaaccaaaagcctgcaggagctctgctccctctatgcggctatgcgtaccagcgctttctga

SEQ ID NO: 179486 - DNA, 315 bp, Klebsiella oxytoca
atgacgttttccacccttgccgatgtcagaagccagatcgattcgattgatagcgaactggttagcctgattgctcaacgtgctgagtgcgttaaagccgctgccgcattcaaaactgaccactccgccgttcgtgctcccgcgcgcgtgcagcaggttattgatcgggttcgcgaaaaggcggctgccgcagggttacccgaagtgattattgagaaagtgtatcggtccatgatagatgcattcattgaatatgagcttgagaaacataatcagctacagcggcaaaaaagtaacggtgtgttgggtgagtga

SEQ ID NO: 179487 - DNA, 834 bp, Klebsiella oxytoca
atgattgacgatctggcggatattttaaatcgtttagtaaatcagaaagataatctgcacgtcaggttccccgacccggatatctccgagcccgagctggcgtttaaggtgccctttccacggctggaaattgtgcttgagggcgagcttaaggagagcgggctgccgctgtcggagacaatgctctccgcctcgcaggtgctctacgttcaggcgggtaaatggacgctgccggaatggaccgcgccggcgtcgacgttaagcattctgtttggtcgccagaagctcgggttttgcgttcagcactgggacggcaagcagctgcgcacggaaaagcagaacgtcgcccgcctcggaccgcgcgtgggctcctacctgctgctgtcgctcaatgaaatctgcctgcagccggacccggtaaccgccaggctggtggtcgcggccctgttgagccactgccttgagcagctggtcggactggagatgcgcgtcagccgcagccgcgatctgtttctggcggtacaggattatctcgaagagcatctcacccagccgctgacccgcgagtcggtagcgaagcgttttcatattacgcccaactacctgtcgcatatattccagaaatccggctccgtcggttttaatgagtttctcaccagcgtccgcctggaaaaggcgaaaaagctgctgcgcggctacgacctcaaggtcaaagagatcgcccacaactgcggttttgtcgacagcaactatttctgccgggtgtttaaacgctacaccgagcgctcaccttccgaatatcgtcgccactgccgcagcgcgcagcagggatag

SEQ ID NO: 179488 - DNA, 630 bp, Klebsiella oxytoca
atgactgaacgcctttattacaccagcgacgccgaggaatgccttgcgcaagtcgtcaactgcctgagcgaagccgatggccgctatgccattcagctggatcgcacgctgtttcacccgcagggcggcgggcagccggcggatcgcggctggattgccggcctcgccgtcgagggcgtggttagccgcggcgatagtgtggcgcatatcgtttcacagccgctgccggccggcgaggtcacgatccgcatcgatccagagagccggcggctgcacgcgcgtctgcactccgccgggcacgcgcttgcccaggccggggagctgtcgggctggcagccgatcaaaggacatcactggccgggagaaagccgtattatttttgccccaggcgcgcatggcgggctgcccgaggccagcgcgctgctggaaaaagttgaggcctggcaggcagacaatttaccgcgtcagcttacttttgccgatggcctgcgcaaggtcgggttcggcgacatgcagagctatccctgcggcgggacgcacgtggccagcttgtccgaactgggtaagatcgtcatttcccaggtgaagatgaaaaaagggcaaattattgtcagctacacggtggaataa

SEQ ID NO: 179489 - DNA, 1056 bp, Klebsiella oxytoca
atgaagagcattccctgtgtattaatgcgtggagggacatcaaaaggtgcctttctattagcagatgatttacccaaggatattcagaaacgtgatgagtgcttgttaaccataatgggatccggtcacgagctggagattgacggtattggcggagggagcccgcaaaccagtaaagtggccattattagccaatcccttagcgacaaagcggatatcgattatctgtttgttcaggtcatcgtcaatgaacggcgggtggatacgacgccaaactgcggcaatatgctgtgtgcggttggcggctttgccattgaacatgggttggttaaggcgctgtcgccggttacgcgagtgcgtataagaaatgtgaacaccaatacctttgttgacgctgacgttcaaacaccagatggaaaggttatttatgaaggcaatacgcaaatcgatggcgttccaggccatgccgcgccggttgcgctgacttttctgaatgccgcgggcgcaaaatccggccagcttttcccaacgggcaatcgtatggaagtctttgataatgtacgagtgacctgtattgatatggcgatgcctatggtggtgatcccggcccagagtctgggaaaaaccggatatgaatctgccagcgaattagatcgggatacagccttactcaaatcgctggaatctattcgccgtcaggccgggaaggcgatggggtttggggatgtgagcaatatggttatccctaaaccggttctgatttctccggggctaagcggcggaacgataaatgtacgttattttatgccgcataactgtcataaatcgctggcgattaccggcgctatcggtctggcaagcgcatgtgttattccaggcactattgcgaatgaactgacgaagctatcgggcgatggcgttattacagtcgaacatcccagcggggggatcgacgtcgatttaagtcatacagctgagcgcccggaggatattcgggcatcggttatacgtaccgcgcggaaaatcctttcaggaacggtttacatccccgaataa

SEQ ID NO: 179490 - DNA, 132 bp, Klebsiella oxytoca
atgccgggcgacaacatcaaaatggttgttaccctgatccacccgatcgcgatggacgacggtctgcgtttcgcaatccgtgaaggcggccgtaccgttggcgcgggcgttgttgctaaagttctgggctaa

SEQ ID NO: 179491 - DNA, 474 bp, Klebsiella oxytoca
atgatagcgactttggcattctttattatttatggcgggttattactcacgctttgttggcacgatctgcgctatggcttgctacccgataaatttacctgccctctgctgtggggcgggttgctttattatctgtgtatgtcaccagccaatctgcagcatgcagtctggggagcgatagcaggctatctggcctttgcgttgatctattggctctacaggggaatacgcgggcgtgaaggcatcggctacggcgatgtcaaatttctcgccgcactaggggcatggcagggatggagagttttaccgcagctcgttcttatagcaacgattctcgcctgcgctgccgtaacggttctgatgctgtgcggcaaacataggcaggcattacgcaacccgctgcctttcggccctttcctggccacagcgggtttgctatgtggttggcagacgttttttagtcagccactttaa

SEQ ID NO: 179492 - DNA, 324 bp, Klebsiella oxytoca
atgaaatggcgttactctctgcgctggaaattaccatcgccctgtcccggaccgcatgaactggcatccgaagtggtggaggcgggacagcctgcgcctgaatccattatgtcgcgctgggtggcgggcgccgggtatgcggtgtgcgtggattttcccgatgagcggcagattaagcgctggagtgatgagcgcaaagccgctgcgcgtcgaaggaatcttgagcgtcgggtcaacaggatggcgcccctgtttgctgaggaactgattgagagggagcttgagaggcgaccagactatttccggggaaaatctcagacctga

SEQ ID NO: 179493 - DNA, 729 bp, Klebsiella oxytoca
gtgaacgcatcaacaacgtctctgatgaccctgaagccagcccggcaggcagcgctgcaggcggtcctgtcggtggaggaatcccgccgtctcggtgcgcgtctgcccgccatgccacacgtgcgcaccttcctgcgtctgctgaccgggaacagccgcatgaacacgaccgtggcacagcgcattcccggcctcaactgggacccgaagcatcgcctgagcagcctcaaacaggtggaggaggcgctcgacgcactgattgccagccacggggagtgctgcccgctgccgctgccggtggacgttcaggctgaactgttcccggaagtgctgcacacccgtacagagcgtcggttgcagcgcagaaacatcgcgttcacccgcaggatgcgccgggaagaacggacgctggcacatcactggcggctgcggcagaacctgctggggcaggccgtcacggagctgaactttcagtccccggaaacggtcagcagctggtaccgccggtgggccgaagagtttgacgcgcgcgagctggagccggctttctggcactggcggtcgcggtttgcgtcgctggcttccctggactggctgcgtgacgcgaaggaaccgctgtacggggtcattcatgaaatcggcttcattgtgcgtgacaccccggcggctgtccgtcaggcggagcgctggcaggtcccgaacaaactgacggaccggaggcggggatga

SEQ ID NO: 179494 - DNA, 432 bp, Klebsiella oxytoca
atgcgcaatattattacccccgatgtcctgaaaaccatgatcccacaggaatacgaagactggcgcgaaggaggggaggatttgcgccgcgaactgacccatgccgtgatgcgtgacctgaactgcccggataactgggacatgaacggggagtaccgcagcgagttcgggggctttttcccggtacagatccgcttcacgccttcacacggtaactatcatctcgccgtgtgcagtcccggcgatatctctccggcctggatggtggtgtttgtcccggccagcggtcgtccgttctcggttatcagcacgctgtcggactggtcgccggaagccatcagccacacgctgagtctggttgcccggctcgatgccgatggctacagtcaggccagcatcatcagcatgctggtcatggagggcgcacagtga

SEQ ID NO: 179495 - DNA, 2001 bp, Klebsiella oxytoca
atgtcagtgaccgagtctaaaacaaaaacccccgcgaaaaccagcaaaaaagcggtgaaacctgccgaatccgccgccctgaaagccgcgcttgaggccgcacagattgagatggtgccgctgtcagcactggtcaaatccccgctgaacgtccgtactatcccgtatccgccggagagcgtgcgggaaatggctgactccattctcgcggtcggcctcattcagaatctggtggttcatactctgccggacggactgtcgggcgtcgcggcgggcggtcgtcgccttgctgccctgcagcttttacagcgcgagcagcgcatcgatgccggacatcttgtcatcgtgaagcgcatcagcgacgaactggcggtggtggcctcgatggtcgagaacaacaaccgggtggcaatgcacccggcagagcaaatcaccggattccgcacgttgtctgagcagggcaaaaccccggcacagattggtgaccagctggggtacagctcccgccacgttcagcgcatgctgaagctcgccagccttgccccggaacttatcgtcctgctggctgagaacaaacttgacgtggagcagtgtcaggccctgagtctggagagcgacccggcgcgtcaggtggagatttaccagcgcgtgaaggcgcagcacagctatgcccccgctcacatgctgaaacgcgccatcacggacaccgaaatatctgtccgcgacgcccgctttatgtttgtcgggcgcgaagcgtatgaggccgcagggggcaacgtgcgtgaggacctgttcagcgctcaggagggagacggaacggcagacggggtgctggtcgggcgtctggtgcaggagaagctggagtccgccgccctggcgattgaaatgcaggagggctggtcatggtcactggcacgggaaggcgcggtcagaaactacggtgacgaccgggagcattatctggtcctgccggagccggagggcgaactcagcgctgacgagcagcagcgtctcgatgaactgtacgccacgcaggaagccacggcgacgtatgaggacgaagccgcgattcaggtgctgattgacgagactgaagaggccgcatcgatccgggcatggacaccggagcagaaagcggcctgtggcgtggtggtcagtctgagtgacggcgagcttcgtatccagcgcggtgtgcagaagaaggtgcaggaggcggtcgctgacgggcaggaaagcacgggtactcaggcctccctgcatgtggtgagccgcagtaccccggatgcggcagagggtatcagccttccgctcctgaaaaaaatgtcgtccgagagaacgctggcggtacaggcggaactggtacggcagccacagaaagccgtggccctgatggtctggcggctgtgcagttgcgtgttccactactgtatcaccacccggcacccgttcgtgatgaatctcggggttcaccacagcagcctcaccagcgaagccccgaccggagaaaacggtcaggcatggcagttgcttatgcaggagaaagcccgtctggaggcgctgctaccggagggctggaagaacgatttcaccaccttttttgccctcgacggacagaccctgatgtcgctgatggctttctgtaccgcctgttcggtggacggcgtccagacccgtgaacacgggcatacccgccgcagtgaccttgacggtgtcgaggcggcactcgggttccacctgcgcgactggtggcagccaacggcggataacttcctcgggttactcagcaaaaatcagattgtggcggcgctgaacgacgccggactgaccggggccgcctcggatgctgaaaaaatgaagaaaggcgatgccgccagtcacgccgaacagtggctctccgggacccgatgggtgccgggatggatgcagtccccggatgctgcaacgccggaagaagcagcctccacgcctgacactgacgaacccacctcacacgctgcctga

SEQ ID NO: 179496 - DNA, 249 bp, Klebsiella oxytoca
atggaccacaacgttttgtccccccttgaatccctgtcaaatggcacgtttacccgcgagcaggccagagcggtcgcggtgcagtgtcagaatgtggcgattgaggatgatcaggggacccattttcgccttgtcgtccgtcatcaggatgacggcagcatggtctggcgtgtctggaattttgaaccgggcggtgagttcctgatgaaccgttacatccgggactacggagtacgtaaaacgcaataa

SEQ ID NO: 179497 - DNA, 558 bp, Klebsiella oxytoca
atggcagcacgtggcgtaaacaaagtcattcttgtcgggcatctggggcaggacccggatgtgcgttatatgcccaacggcggcgcagtggcaaacctgacgctggccacgtccgaaacatggcgtgacaggcagagcggggaactgcgcgaaaacaccgaatggcaccgtgttgtcatgttcggcaagctcgcggaagtggctggcgaatacctgcgtaaaggcgcgcaggtctacatcgagggccagatgcgcacccgtagctggcaggacgataccggtgccacacgctacgtcaccgaagtgctggtcgggcagaacggcaccatgcagatgctcggcggtcgtcgtggaactggtgagcctgagagcgccgtgccgcagcagcccgcgcagccgcagaatcctgctgccccggctcaacctgctcaggccccggctaaatccccgaaagcgaagggcggtaaaaaaggccgtcagagcgccaccccatctcagcttcctccccagactttcccggacgattacccgctgaccgatgaggatgtgcccttttaa

SEQ ID NO: 179498 - DNA, 321 bp, Klebsiella oxytoca
atgcgtatgtctgtactatttgctatcacgtgtttgttcagcgcgtttaatcttgtatttatgccattccatcccgtcatgatgttatgggctttcggcctctctgtcgccttcattattgtcaatataattgccgacagactgcgtctgtggtccggtattgcatgggcgatggctgccgccgtcatcgtcgcttttatgcttaatggtgcagaacccaatgaagaaaaccgggtactcatcagtacattcgcctgtctcgcctcagcatggtatgccggggttcagttcagaaaagagaagagagagtctctgtcctga

SEQ ID NO: 179499 - DNA, 264 bp, Klebsiella oxytoca
ttgtcaaaatggaatatcgcctcattctcaaaagacgagcaggacaaagtctccgtcgataaagcagccgccgctgttgcctggcaggaacgcatgaacaagcctgttgttcacgaactcgttgagcgggaacagcccgaacatctgcgcgaatatttccgtgaacggctccgggtgcatcggctgaacagtcagcagctgccgcgcgcaaatgcgcccgaataccagaagccggaagacggtggcggtgagagtaagccttaa

SEQ ID NO: 179500 - DNA, 192 bp, Klebsiella oxytoca
atgaaacttgcaccacaaagccgcgagatcctgcgacagtacaaagccctgattaacgcacgccgccgggatgccgggcagcgggaactgaccaccgcgcaggtgatggacgaaatctgctattacatgacctgccagtgtgccgtctacatcggcggacacttcatcttacagggcggtaaagggcagtaa

SEQ ID NO: 179501 - DNA, 507 bp, Klebsiella oxytoca
atgaattcatccatcaccactccggccgtctacgtgggcacgtatcaccagtacaactgcggcagcatttttggcaaatggtttgatttaaccgattttgacgacgaagacgcgttttatgacgcctgccggacgctgcacgccggcgaggaagatcccgagctgatgtttcaggactgggaaggtattccttcaccgtttgcctctgaatcctctgttaagtgggcgtttattgaggctttccggcaggcacaggatgacgggcgcgccgccgcctttgtggcctgggcggagtataccggcgagtgcgactatgacgcctttgatgacgcatattacggcgaagcggaaagtgaggaagattttgcttatggctttgtggaggacaacggcctgttaaacgaggtgcccgaatccctgcgcatgtatttcgattatgaggcatacgcgcgggatttattcagcgacgggtatgtgttccatgacggttatgttttcagaaactga

SEQ ID NO: 179502 - DNA, 429 bp, Klebsiella oxytoca
atgcagtatgtgacaacacgcccggccctgaatgttgaagagtccgaccgcctgtcttttatgccctacatgttcggcgctgattttatgctcgcagaatcgcaggtgtatgcgctggccaaaaaatggatgcccgaatatgaagccgaattctggcattacatccgcttaccggagggcggcggttacatgatgcccgattgtggccgcgtccatatggtcagcacggaaagctggtttgaccgcattgtgagcgctgacgcggcgggcattattctgacatcgctggccgttaaccgtcgtctggcggcaaatcatgacagcggcaacccggccctgactcacctttatatgctgcgtgatgcccagctctggaatcacatcacccttcacccggaatgcaacgccatttacgccgcgctggactga

SEQ ID NO: 179503 - DNA, 126 bp, Klebsiella oxytoca
atgatgatggcgggggaagggaaatatcttcccctcactgaccagcgcgggatgaccgtatgcgataaggatgtccccgtgccggctccgcgtttacccggcccggcctccgggcctttgggatga

SEQ ID NO: 179504 - DNA, 768 bp, Klebsiella oxytoca
atgagaaacgacacactcaacgcgctgatactccgccacggcgaccggatgctaaaggatgcgggctggccgccttgcgtggatatgatgcaaatcgcgcctgaaaccatgcccggctggtcagtcgccaccggctcgctcgatgccgcacacattctggcgctggtcacgcacctttgccagccgctgacgtatggccgggccgggttgctgacagccagcgcccggcggctggcgggaaccccggcgcggctgtatctgtacccggcaaagggctttatgcccccggaaaaactggcggacgcccagacacttcatctgccttatgcacaggaatggctgacggcggcggaatgtgacgatctgctggctttcctgaaagcctccctcacgcagatagcggaaatcgtcaggctggatgcgcaccgccttgccgctgcgctgaaaccgtccgtcacgccgcgactgatggacaggcggtttggtgactggcgcgtactggctgacgagtacgagcatgaaaactggctcgatgaaaacgacactgacgtactggatgccgtccttgacgctgttctggtgcgcggggcgtcgttctgtcccatcctgttgaccgtggttaatgaacgacaggaggaaatcgaagccgcaggcgttatcaccgatatgctgcgtttccccggcgacccggcccgccgctggcttgatcgccgtgtactgcgcgaggtagtgagtgaagcccgggcgacgcccgtacaaactgaatga

SEQ ID NO: 179505 - DNA, 411 bp, Klebsiella oxytoca
atgctgtatggcacccgtaaagaactgaacaaaaaacttaaacgcatgtttgggaacgaagaacgctacgccctgctggtctggacgaaagaagacgtgatggccctgtccgggaacatgacggaggtcgaggctcacaccctgcttgagcttatcggccgcacgggaacgggggagcacaccgaagaaggcgtgtcattccgcaccgtgcaggcgctgtacgccgggattcgtccgggcattccccgcgtgagcgtccccgtcgatacgctgtatcgcatcacggacattgccgcacaggcgattaacggagaggacgagcattcgccgtcgctgacggtagatcactacccgagtgtcgctgacgctcaggcagaaatcgcctggctgaaacgcgaactggccgcctga

SEQ ID NO: 179506 - DNA, 222 bp, Klebsiella oxytoca
atgaactacgacggacacgacgccctgcgccgcgatatggccgggctggccaacaacatctgcgacctgaaaaccaccctgaaagtgctggaagacaaataccactaccagcacgacggactgccggaacggctggcaggcgtgagcctgcgacgcctcaacgtcctgatggacgaggcattcaatatcgccctgttactcgatgaatctttcagagactga

SEQ ID NO: 179507 - DNA, 702 bp, Klebsiella oxytoca
atgtccagattcattctcgggaactgtattgatgtgatgcgcggattccccgaccgtgccgtggaccttatcgtgaccgacccgccctatttagtgggctttaaggaccgtcagggcagacagattgccggggatgtgacggacgaatggctgcaaccggctacgcaggagatgtaccgcgtcctcaaacaggacgccctgatggtcagtttctacggctggaaccgggtggaccgctttatggccgcgtggaaggcggcggggttctatgccgtgggccagcttgtgttcaccaaaacctatgcttccaaccgccgtaatgcgaaagaccgtcgcggattcgtggactaccgccatgaaggggcttatgtccttgccaaaggccgcccggtgccgcccctcagaccgctgccggatgtgatgccttttccgtataccggcaacccgctgcacccaaaccagaaaccggtggaggcgctacagccgctgattgagtcattcagcgccccgggcgcgattgtcctggacccgttcgcagggagtgcctcgacctgcgtcgccgcataccgcgccggacgccgctatatcggcattgaaatgctggcgcagtaccaccgggccggaaccgagcgactggccgccatgcaccgggccgtcaacaccccggcggcgaacgatgaatggctcccggaggtggcgtga

SEQ ID NO: 179508 - DNA, 231 bp, Klebsiella oxytoca
atgtcacccggattcagaaacgttcttcgctttgccggtgtccccgtcgacagcagcgaaccggtacgcaggcagtacggcagccgcatgattggcattgtgacggtatgcctgcttccgctcctggtgttcgacgtcccgctgtgggttttcgtgctctcccaggtcatctggggcgcgggcgtgtatatcggcctctccgtggccggagataaatcccgggatcgttga

SEQ ID NO: 179509 - DNA, 426 bp, Klebsiella oxytoca
atgaagtttattgctgcctcccccgaacccggggtcatgaccctccccctttttaccgagcgttgcgccgccggttttccttcaccggcggcagattacacggaagcggagctggacctgaacgagtactgcatccggcaccgggcctccacctattttgtccgggctatcggcaactcgatgaccgatattggcctgaattcaggcgacctgatggtcgtcgacaaggcagagaagccggtacacggtgatattgtcatcgccgaaatggagggagaatttaccgtcaaacggcttctgctgacgccccgtccggtactccagcccatgaacccggcctaccctgcccttcaccctgacccggagacgctgcagatttttggtgtggtgaccgcgtttatccataaaacgcgcggagtggactga

SEQ ID NO: 179510 - DNA, 156 bp, Klebsiella oxytoca
atgtttgccctggccgacgttaactcattctatgccagctgcgaggaggtgtttcgccctgacctgcggggtaaaccggttgtcgtgctgagcaacaacgacggctgcgttatcgcccgctcaaaagattatgtggaattgcaagtaacactgtga

SEQ ID NO: 179511 - DNA, 2229 bp, Klebsiella oxytoca
atgatcgaatatttcgaattgggtaaacgcctcgattcatcggggcgtgatagcctatatccgcaaacaatctcattgcttacagcatgcgaacagcatccctatataactgttcgagaattacgtttatctgagcaaaacaatgaccgctcggaatacctagtcattgatgttgctgatggtacagtaacttctggcaataaggctggcattcgtcgtaaagaacgattagctattgagataaaccctaagttcactatcccgatcctagttcatgcattgcgtaaagattttcctgttttatctcatcaacatgcaggtgtaccagactctccaaaaattctttgcctttatgatgtatcttggagcgccgtcgaacgcaactggacacctgaaagatttattgagcgaatattttggtggctcagagaatcagctgaacaacgtttgcatcgagaagaccaacctcttgagcaacttttttatatgagcccctatcaacttattttaccagcgaattatcttgattataatcatgccgcagctcataaactcagcctccagatggtcagcaatggtaagccgataattttaagggctgtacctgaacattctaatcagggcatcagaccatttcgcttattaaccattgccgtcccaccagttgaagcctcattagttgcttcatatcctgacaatctgaaaaaactggaagagcagcttcaatcctggggaagtgaacttctccagccactcgctgatgctgtttatgatgctatacctgatacaggtcttcgccctagctctggtgaaaaggaaggtttgctaattctgctatgggttcctcgtttaagggatggtaaaacagaacgtactgatgttatgggctatatcgtggaacgctcactctacgaacttgccagcgtattagacatacttgcccctaggaatgagcggggaatacagcaccgtttccgactacttggtggcgtaagaggtacacaatggcaacaattaccactgttacctgtcgaaatacgttcggctatgaatgctgcacgagcaagagacatttctgctgttgattctgataatgcatctttctatggtgttctggctggcgttggggctcttggcggcacattagctgatatctggatacgaatcggctggggacactggacatttatcgatcctgacaaactccttccacataatctgccccgccatattggggttgatgatcatattggataccctaaaactgatattcttcggcacctcgcaggtagtatttatccacatgaacctctccccggagcgatcaataaaagtattcttgatgacgatcatgatattgccagagctgtgaatgaggctcacttagttgtggatgtcagtaccacctttgaggtgcctaggaccctagcgttaaaagatgatatacccagaacagttagtctgtttctgacaccatcaggcaaggccagcgtgatgttaatagaggatacagacagacagtgccgaattgatgcaattgaggggcaatactaccgggcaattttgagcagcgagtggggaaacactcacctacagcacaattatggtgatcgttgggtcggtggtggatgtcgggatatttctgtacgtatgtctaacgaatgtattcacgttcatgctggtatcctgtcgcgccaactacggcagaccgtccttaaggatgatgctcgattatgtatctgggtgtctgatgaaaattcaggtgcagtgagcgctcatgaaattgagctttaccctgtggtatctgtaattgctggcgaatggattgttagatacgatcaaggcttagaacaaaaactgagacacacccgtttacaggccctaccgaatgaaaccgggggcgctattgtgggcataactgattttaagaacaagactattattctggttgatgtgctcccagaacctatcgacagtaaatcctcaccagccttctttgtccgaggagaagagggacaaaaggaagcattagaacgggttcagcagctgaccgctcgtgttgtcgattatgttggtgaatggcactcccatcctcaaggattttcagcgaaagccagtaatgaagatgataatttaatcaaaaagttacatcaaaaaatgagtgtggaaggtttacctgctgtgatgctgattgttgcggaaaacgatatcaatattatagtcagatga

SEQ ID NO: 179512 - DNA, 1182 bp, Klebsiella oxytoca
atggcagcaaaagttacttttttccaggtcggcaacggtgatatgacactggtgcgtttggctgatacccagggtacatccattctgactgatgtacatatccgttctgctgctgatgaccccaaagatgacacacctgatgttgcctcggcgctacgtaacagattgaagtacgataataacgatcgcccttttgttgacgtctttatgctgagtcatccggatcaggaccattgtgggggtctacgtaaacatttctggctgggccgtcctgaagactatccagatgaccatctgaaacgttcagaaaaacgcataatcatccgagagttgtggtcatcaccattgatttttcgacgtcgttcgaaaaatcacacactttgcgaagatgctcaggcatttaatacggaagctcggcgccgtgtaaaatactggcgggaacatggttacgcatttagcggtaatcgcattcttatcatgggtgaagatattaacggtaaaacggatgatctgagtgccattcttattaaagctggagatacattcaccagaattgacgggcaagtttcagacgttttctctgcacagcttctggcacctgcaccacatgaagatgatgaaaatctggaagaagccctttctaaaaatgaatccagtatcattatgaatatgaaaatactgccttccgcatattctcgtaatcctatgcactttttactcggtggggatgcagaagttctcatctgggagcgattatggaatcgttacaaaagcaatcctgaggtgctggagtatgatcttctcctcacaccacatcattgttcgtggcattcactttcctattatagctggtcacaatggggagaagatgctctggtttgcgatgcggcccgtaatgctttagggcaagcgcgttctggagcgacaatagtttccagcagcaaacagatacttgatgacgattatgatcctccgtgtattcgagctaaacgtgagtacgatgatattctggataatgttgatggttggttcagttgcacgggcgaccttaaagataaaactgttcttgagtttgaagtggcacgagatgggaaattgattcccgctattgttggtgcagtttctgctgcgacaagcgctgctacggcagccgcaccccgggcaggtgtaataaaccaatga

SEQ ID NO: 179513 - DNA, 861 bp, Klebsiella oxytoca; identical to SEQ ID NO: 140031

SEQ ID NO: 179514 - DNA, 519 bp, Klebsiella oxytoca; identical to SEQ ID NO: 140030

SEQ ID NO: 179515 - DNA, 2100 bp, Klebsiella oxytoca
ttgataaagctggctcagtatgttgttggacgtcataaacaaaactggtcgaactgtgtaagacaaaggctttctcgcctgataattccactcagagcagcattaaagtggatgaatgccgcatccacaacaaccaattctgcaattcatgacatcattctggaaatgcaccggctggaaaaaaactactggtcatggacccaggacgactggctcgaagtgctgtgcagcagtgaagaggtatttcgcaaaaaatatggcagctgtggtaattgtcgacagtatgtcctcgcgattgcttggttactgtgcggatttaatcgacttgaggcggctggctgcttttatcattatcggctttctgtcaaagtttttggccgcccggcgacagaggcggcggtaaacaagcttcaggagaacatgcagcgcctcggctttgtcgctgctgacaataacattcgtaatgcgctactgctgtctatgctttgtcagcggcaggttgatcctgaaaaattggaactggaaacacttaagcgagtaataacttacgggcctgtttatatgcgtcgctctgcggccaccttgtcaaggatatttgctgcgatggggctgttcccagcgggcattgaccatcgtattcttgagcgcagacggcctcacggggaatatcgtgcaaccagtaacgttccggaagaatggttgcgatggtgtgaacgctggcgtaaaaccgctattaaagcaccatcatctgaactcagtacatggtaccgcatcctgcagtgtgggcgctggctgaaagccactcaccctgatatacattctcctgcagactggagccgggacatcgcacttgaatacgtagctgcagtgtgtcaaatgaaaataggccagtggtctgaaccgcgccatatgtatcagaatcgaataggccagttaatgacagcctctgcacgggcggggattttacaggctatcagagttttttttcgagaccttcaggaatgggggcttattatcgtccgatttaatcctgtcagaacgttccgtttaccccgcgctatccgggccagtattggccctgcaccaagagtcgttgctgatgatatatggagtaaacttgtctgggcagggttgaacctgcaggagcaggatctgcattatggtgaacaactttactatcgctacccattttctatggttcgtgcattatgtgttctctggctgtttggtgggttgcgtcgtgatgaaattttgcggatgcgaacaggctgtatacgctggcaaaatgatgaacatcagggcggctctcggatatgtttgctggatgtccccgtgaacaaaaccagcacggccttcaccaaacctgttgatccaatcgtaggggaatacattgattgctgggaaaaagaacgaaatatacaaccagaccaacttgatttaaaaacgggtgaacttgtcagttatctttttatgcataaagctgctcggattagccagagttatattaataaatccttaattccgatgctttgtcggaaagctggtgttccaaacaaagatatcaggggaactatcactagccacagagcgcgggcaactatagccagccagctgtttaatgccagggaaccactaggattatttgagttacagcgctggctcggacattcctctcccagttcgacacagcattatatcgatatcacaccgacaaaactggcagggtctctgtctaaagcaggatactttgagcgaaaccgtcgtatggtttcggtgctgatcgatcaggatgcaatttcgtccggacaaatgcagaaaggagaaccatggcgatattatgaccttgggcacggattgtgtagttatgacttttttgaacagtgcccacaccgtatggcttgtgcaaaatgttcgttctacctgcctaaatcatcatcagaagcgcaatatatagaggggcgtcagaatttactcaaaatgatgcaggagatcccgttgacggatgatgaacaggcagcagtaaataatgatattggtgcgatagacaaattattagagaaattaaaaaacattgaaacaccagacaagcaaagaagataa

SEQ ID NO: 179516 - DNA, 279 bp, Klebsiella oxytoca
atgagcggtaagcgttatcccgaagagtttaaaactgaagcagtcaaacaggttgttgatcgcggttattctgttgccagcgttgcaacacgtctcgatatcaccacccacagcctttatgcctggataaaaaagtacggtccggattcttccactaataaagaacagtcagatgctcaggccgagatccgccgtctccagaaagagctgaaacgggttaccgacgaacgggacatattaaaaaaagccgcggcgtacttcgcaaagctgtccgactga

SEQ ID NO: 179517 - DNA, 543 bp, Klebsiella oxytoca; identical to SEQ ID NO: 128532

SEQ ID NO: 179518 - DNA, 1248 bp, Klebsiella oxytoca
atggttatcgccatgctggtcggcgtcctcgccgcgctcgcggttgccctgtttcgccatgcgatgaccggtctggaaagcctgtttctgagcaatgacagcggaagcctggtgaacgccgccgagttgttgccaccatggcgtcggttgctgacgcccgcgcttggcggccttgcggctggcgccctgctctggctctggcagcgccgcacccttgcgcggccccgtgcgccaaccgactatatggaagcgctcgagaccggcgacggcgtgtttgatacgccagccagcctggtaaaatcgctggcctctctgctggtggtgacgaccggcagcgccatcggtcgcgagggggcgatgatcctgctggcggcgctggccgcgtcgctgttcgcccgccgctttacgccaaaagaagagtggaagctatgggtagcctgcggcgccgccgccgggatggccagcgcttaccacgctccgctggccgggagcctgtttatcgccgagatcttattcggcaccctgatgctggcgtcgcttggcccggtggtgattgccgcggtggtggccctgctgctgaccaatctgctgaacggcgattcggctccgctgtatcacgttgaattccacgaaaccctgagcgcgacgcactatgcgctgatgctggcgacggcgctgctggccgggctttgcgggccgctgtttatctggctgatgagctatagccaccggtgctttgtccggctgcgcctgtcgcctccgtggcagctggcgctgggcggacttatcgtcggtctgctgtcgctgctcgcgccggccgtctggggaaatggctatagcgttgtgcaaagctatcttctttcgccgccgctcttcagcgccatgattgtggtgtttgtctgcaagctgctcgccgtgctggccagcagcggttccggcgcgccgggcggcgtttttaccccaacgctgtttgttgggctggggattggcatgctgttcgccagcctgaccggactatggctacctgattaccaggctatcgcgatagtggttggcttaaccggcatggcggcgtttctggcagccaccacccacgcgccgattatgtccacgctgatgatttgtgaaatgaccggacaatacgttttactgcccggtttactgattgccagcgtactggcgtcggtgctgtcgcggacgttacgccgggattctatctaccgccatcacctcgccgagtatcgataa

SEQ ID NO: 179519 - DNA, 609 bp, Klebsiella oxytoca
atgatgcaatcgcaagaccgcgatgccgtcgtactcagcgcccgtacgctgggggcgttgttctcttatgctccgggcagcgagcaggctgctccgctggttgccgccctgcgcgacggcagctggcaaagtcagtggccctggccggtctcgaacggtctggcggcgcagttcgctctcgaagacgatgaaccgctggcggacgcctggcagcggctgttcatcggcccgtgggcgctgcctgcgccgccgtggggctccgtctggctggataaagaaagcgtgctgtttggcgactctacgctggcgctgcgcgagtggatgcgtgctaacggcatcggtttgtctgagcaacgcgctgaaccggaagaccacttcggtacgctgctgctgctggcggcctggctttgtgaatccggtcaggatgaggcatttaaccagcttctggcctggcatcttctcccgtggtcgggccgttttctgagcgtgtttattgccggggcgggaaaccctttttatcaggctcttggtcatctggcgcaagaaacgctggcgcgatggcaggcgcggctgccctgcgcggtcgcggataagccgctctaccgctaa

SEQ ID NO: 179520 - DNA, 1215 bp, Klebsiella oxytoca
atgaagatcgttgccgctgaagttttcgtcacctgtccgggacgcaacttcgtcacccttaaagtcaccactgatgacgggatcgtcgggttaggtgacgcgacgctaaacggtcgcgagctgtccgttgcatcctatctgcgggatcatctctgtccgcagctgattggccgcgacgcgcatcgcatcgaagatatctggcagtttttctacaagggcgcctactggcgtcgtggtccggtcacgatgtcggcgatttccgctatcgatatggcgctctgggatatcaaggcgaaagccgcaggcatgccgctataccagctgctgggcggggcttcgcgcgaaggcgtgatggtctactgccacaccacgggtcactccatcgatgaagtgctggatgactacgcgcgccacaaagagatggggtttaaagcgattcgcgtgcagtgcggcgtgccggggatgaaaaccacctacgggatggcgaaaggtaaagggcaggcctacgaaccggcaaccaaaggccagtggccggaagagcagctgtggtctaccgagaagtatctcgattttacgccacagctgtttgccgccgtacgcgaaaaatttggctttaacgagcatctgttgcacgacatgcatcatcgcctgacgccgattgaagcggcgcgttttggtaagagtattgaagattaccgcctgttctggatggaggatccgaccccggcggagaatcaggcgtgtttccgtttaattcgtcagcataccgtcacgccgattgccgtcggagaggtgttcaacagcatctgggattgtaaacagctgattgaagagcagctgattgactatatccgcaccaccattacccacgcaggcgggattacggggatgcgtcggatcgccgattttgcctcgctttatcaggtacgcaccggttcacacgggccgtccgatctttctccggtctgcatggcggccgcgctgcacttcgacctgtgggtgccgaattttggcgtccaggaatatatgggctattccgaacagatgctggaagtcttcccgcacagctggacgtttgataacggctatatgcatccgggtgaaaaaccggggctgggaattgagttcgatgaaaaactggccgcgaaatacccctatgaaccggcctatttgcctgtagcgcgtctggaagacggcacgttgtggaactggtaa

SEQ ID NO: 179521 - DNA, 1281 bp, Klebsiella oxytoca
atgaaatacccaacaggagtggagaaccatggcggaacgctgcggatctggtttatctacaaggggttcagagtgcgtgaaagtctgggggtgcctgacacccccaaaaacagaaaaacagctggagagctgagaacatctatctgctatgcaattaaaaccggtaattttaattacgctgggcagttcccggactcattaaatctctccaagttcggggaggctacccagaatctcactctgaaagagctggccgatcgcttcctggcgctgaaagaaacggaggttgctggcacctccattaatacctatcggacaatcattaaaaacgtcctggcagtggctggaaacaacatactggcatcagcagtcaacaaagagaaattgctggaaatccgcaaagaactcctgaccgggcatcatttaccacggccacagtatgaggttaaagaaccaggacgatcggcggtaacagtcaacaactacatgacgaacctgttcgccatttttcagtttgggctggaaaatggctatatcgaagaaaacccctttaaaggtatatcgcctcttcgcgaggaacgagtaaaaccggacccgctatcaagagaagagtttcttcggcttattgatgcttgccggcacacgcagacgaaaaacatgatgtcagtagctgtttatacaggcatccgcccgggtgagctttgcgggctgtcatgggaggatatagacctgaaagccggtacgatgatgatcaggaggaattttgccaaaggcgagtttaccgtgccgaaaacccaggcgggaacaaaccgggtaatccacttaattgaaccggcgattcaggcgctaagaagccaggcagaattaacaaggcttggaagggagcattcagtaaaagtgaaactgcgtgagtatggccgtactgacacgcaaaaatgcacctttgtttttctgcccagcgttacagccaggacattacggcatggtgaacacttcactgtcgactcgataagacagacctgggataccgcgattaagagagctggaatccggcaccggaaatcttatcagacaaggcatacatatgcatgctggtccctgaccgccggggcgaacccgtcttttatcgcatcccaaatgggccacgctgatgctcagatgctttttcaggtttacggtaaatggatgagtgagaataacgacgcccagattgcaatactgaactcgaaactgagctcatttgccccactggtgccccatgaaattttaaagactggataa

SEQ ID NO: 179522 - DNA, 282 bp, Klebsiella oxytoca
atgaaccaagcaatgaataaaacttacatcatcgcagaccccggcgagtgggtttcggaagagcaaataatggcactgaaggggttgaaagaaggcactttaaaaaatgccaggaagaagagttttctggaggggcgcgaatacaagcatgtttccgctgacggggagccatttgataacagcccctgcttctacaacataaaggccattgatcgctggatcgccagccaacgaccagcaaaaccaagccggaagacttctgcgaaaccgaaagaaaactga

SEQ ID NO: 179523 - DNA, 240 bp, Klebsiella oxytoca
atgttcaaactgatacagcgcggccaggtttacgccgacagccacggatggccggttctgattcacagctgcgacaccagaacagtgcgttactggcgccagggtcggatcaacacggcaagcatcgaccgatttaataacgatttcgagccgctcacttgcgaagaagcgcaccagatacgcgccgaactggagcagagcgaacacattaagaagctgcgcgcccagcgggtggcgtaa

SEQ ID NO: 179524 - DNA, 219 bp, Klebsiella oxytoca
atgccagaaatcatcgaccaggccaacgagctggcagagcgccggctggatatgaccatccagaacatgcgcatcaaccataacgcagtttcagctactcactgccgcgactgcggggaagagatatccgagcggcgccgggaactggtggcgggctgtcagcgccgcgctgattgccaagaagaagaggaattacgtggtaagcatcggagggcgtga

SEQ ID NO: 179525 - DNA, 789 bp, Klebsiella oxytoca
atgaagatttatcattacactgacctgaacggcctgaagggcatcatcgaatcaggctcactgtgggcgacgcacttttcctttctcaatgacagtaatgagctgactcacggcatgaactgccttgagaatgccctgcagtacctgagggacgactttaacccgaaaacccttaagttcatcgaacaggcactgacgcacttcagaatgcaccgggcagctcacgtctataacctttcgttctgtctcgaacccgacctgttaagccagtggcggggttatgggagctctcagggcgtgtgcctggaatttgatgatgaagagctacttgcctcgctggaattaacttattatcagatgtttaaaaaccgtgtgctctataccaaagaggattccacggttgaagcccggaacgaaatcctcgccttctttcgtcagccacaggttcaggaggcaataaatgcagatgtaatgcatgagatgattcaggcaaccagactggcacacagcctgccgccttttttcaagaatgacggtttcaaagaggagcaggagttcaggatggtaatccttccggacagcccttttgagggtgtcaattttcgtgtcaatgacagcggtctgataccatatctgatcattaaagcaaaagataagctgccactgacaaacgtcagaattggtccccgcagtaacagagcaatgatgatggacgggatttcattcctgttgcagagcagggggtataccagtacacggatttcgtttactgagacgccgttccggtaa

SEQ ID NO: 179526 - DNA, 621 bp, Klebsiella oxytoca
atgagacaggaaagagtattacgcataaaggcatttcgacgggcactggagcttggtggcggtgaacgggctgacgggtgtcgtcattttccccgctggaaaacggaactgaggaatttcccgcacggcagctgcgatttagccagcaatactctggcgtactacctcaaggaacgagagagatgccatccgtgcatcatttttatggaagggaacgctggctttcatgaagcggaaaactcaacagttcacgggcatgtcatcgtattgctggacggagagtacatcgatttgacgctggatcaattcgacgaatatccggactacattccttacgaacctgtcgaatctgacgggcagattggtaagctgttgcgtaatatcatgaagcatgaggacccggtaaaaacccgccagattgatctcgatggtggcgaagagctgtatgcctggttacgcgataccgccgacgaagtgctggcagcagatccggaatggcaggcccgggaacggtcgatagaagaagcaagggaagccgctattacggtcttcccgtttctgtctgacgtgcaaaaaactgagtgcgaacagggcccggacagtcaggaggctgccagatga

SEQ ID NO: 179527 - DNA, 612 bp, Klebsiella oxytoca
atgacatccctctccccggacaccgtccgccgcattgaagacgccgccgccgccctgatcgccgccggcaccccgaacccgaccaacgagcaggtccgtcagcacctcggcggcggctccctgtcccacatctccccggtgatgcgcgcgttccgtgcccgccagcgcgagcaggccgctgagcaggccacgcccctgccgccggagctggcgcagctgctgaccggccagctggggctgctgtggcaggcggccgtgaaacaggctgaagccggggccctggcggcgcgcgagcaggccgacgacgacattgcccgggccgaccaggaacgggatgaggcgctggcaaacgtggccgcgctggaaagcgagctggcggtgctgcgcgaggtggtggccgaacgtgaccgcctgctgcaggaggtacgcgagctgcgcgcggaggcgctgccgctgcgcgagcaggtggcccgcctgaccgccaccggcgaacacctggcgacgcagctgcaggacacgaaagcggagctgaaggaagcccgggaggacggccgccagcttcagaccgaactgctggctctggcccgccaggacgggaaggtgaagaaatga

SEQ ID NO: 179528 - DNA, 783 bp, Klebsiella oxytoca
atgagcggcctcttatcatattctcacccgcagcagtcggcgcaaatgccggtggccattgactatcccgccgcgctggccctgcgccagatggcgctcgttcaggatgaactaccgaaatacctgctgtcgccggaagtgagcgccctgctccattacgtccccgatttgcaccgcaaaatgctgctggcgacgctgtggaacaccggggcgcgtattaacgaagcgttggcactgacccggggggatttttcgctggcaccgccgtatccgtttgtgcagttggccacactcaaacaacgcaccgagaaagccgccagaacggcaggccgtgctccggccggtagtcaggcacatcgcctggttccgctttccgatcaccagtacgtcaaccagctgcagacgatggtggccacgctgaaaatacctctcgagcgtcgcaacaagcggaccggccgaactgagaaggcccgcatctgggagattaccgaccgtaccgtccgcacctggttgaatgaagccgttgacgcagctaccgctgacggtgtgacgttctcagtaccagtgacaccacacacgttccgacacagttacgccatgcatatgctgtatgccggcattccgctgaaggttctgcagagtctcatgggacacaagtcgataagttcgacggaagtctatacgaaagtgtttgcgctcgatgtcgcggcgcgccaccgtgttcagtttgctatgccggaaaccgatgcagtcgcgttgatgaaacagctgagacggggataa

SEQ ID NO: 179529 - DNA, 708 bp, Klebsiella oxytoca
atggtgactgtaatgaccacggaaaccctcaaaaagccagtgaatatcagtcagtccaatgaactgacggaagcggcttactatctccccctgcaggctaaacgtgtactatggctgtgcctaatgcagtgttatccgatgaaggacgatcctgattctgtctcgccgatattcacagtaactgtcgcggactatcagaaatattttaaagtcagtgtggataccgcttctactgacgtcaaaaaaggggttacagccctggctgacagcagcgtggtcttttacccgaaagaaggggagtttgaagagatcaaacgtccctggctcgctgaagctgggttaaaaaaaggacgcggaaaatggcagatcgaattcaactacaaggtgatgccgtatctgatggggctgactagtcagttcaccacctactcattatatgactgcggaaaaattaacagcgtgcgggtcattcgcctttatgagagcttgtgccagtatcgttctagtggtgtatggattaccacccagaactggttatctgaacgcttcatgttacctgaatcgcaacgcaataacttcgcagagatgaagcggaccttcatcaacccagccctgaagaagattaacgctaacacaccacttaaagcggcaatgacgcagaatgacgacggtcgtctggtgttcactatcgtggatacgaaaaactaa

SEQ ID NO: 179530 - DNA, 930 bp, Klebsiella oxytoca
atgaagaagaaaaacagcacacccactccccacgatgccacgttcaggcagttcctgacgcaaccggatattgcccgggactttatggaaatccacctgccggcagaactgcgtgcagtctgcgacctcagcacgctgaaactggaatcgggctcgttcgtcgaggatgaccttcgccagtattttagcgatgttctctacagcctgaaaaccaccgccggcgacggatatattcatgtgctggtcgaacaccagtcaacgccggacaaacatatggcttttcgcctgatacgctatgcggtggccgccatgcagcgacacctggaggccgggcataaaaaactgccactagtgataccagtgctgttctatacgggtaaacgcagcccgtatccgtactccacccggtggctggatgagtttgacgatccggcgctggcaggcaaactctacagcggcgctttcccgctggtagacgttacggttattccggatgatgaaatcgctggccatcgcagcatggccgccctgactttactgcaaaagcatattcaccagcgggacctggcagaactggttgaccggctggcgcccatcttgctggcaggatacttgtcttcatcgcaggtggtatcgctggtacactatatagtgcaggcaggcgaaacatccgacgccgaagcctttgtacgcgaactggcacagcgtgtgccgcaacacggagacgcacttatgaccatcgcacaacagcttgaacaaaagggtattgagaaaggtatccagcttggaagacaggaaggtcgttcagaaggtgagcgcgaagctactctgaaaattgcccgtaccatgctccagaacggcattgaccgcaataccgtcatgaaaatgaccggtctgactgaagacgacctggcgcagatccgccactaa

SEQ ID NO: 179531 - DNA, 264 bp, Klebsiella oxytoca
atgaaaacaaaaacgatacccctggtaatttatacggtaatcattgcaggacttactcttctgggtacgcgactctacgacaccgtttcggacacaacagatcccgccattgcaaatggtcctttttgggctggattatgtgtgaaaacggacaataaagatggaatgaatgagttaatttgctcgaatatcaggattttcgttaaagccgaagattatgatcgctctgttcgcaaccgtgagttgtccggcataattgactga

SEQ ID NO: 179532 - DNA, 621 bp, Klebsiella oxytoca
atgttcgtttttggttacctccgggcatccacttcagagcaggatgccagacgggcaaaaaatgcactgaaggcgtttgcaaaccaacatggccaccgtattgctggctggtatatcgataatgtctccggtacgacaatgaaccgccctgaattgatcaggcttcttggtgatgcggaacctggtgatgtgattctcattgaacaggtcgacaggcttactcgcctggatgatgcaggctgggagacactcagaaagcaaattaccgacaagcaactggccatcgtcagtcttgatctaccgaccagccatctggcgctatccagcacagtaagtgatgcctttacccgaagcatgctgaaggcagtaaatggcatgatgctggatatgctggccgctattgcccgaaaagattacgaagaccgtcgacgtcgacagtcagagggtatcattaaggcgaaagctgaaggaaaataccggggcagggtggccgatgtgcagaaacacgaactgattcgcactctgcgcctggccaatggaaaatcgctgcgagaaacagctcgcctggcgggcgtttctaaaatgactgtgattcgggtctgctccagcactgataaataa

SEQ ID NO: 179533 - DNA, 1755 bp, Klebsiella oxytoca
atgaaagaaattgttttaaagttaagtgaggctgaaaatgtgttgagagaatggtttgaagctggaatagccttcaatttaatttttggacctttacattttagaaaagaatctggtttggttcacttaagaaaatgtcttgccaaaatccctttagccctcaggcctcagtactatgacatattagagaaagcatttagcccacgtcataacatattagatatactttttaggaataattatgattatgattatgattcattgatgttaagaggtcagttgtatgcatatgctgaatgccttactaaaaactaccccaaaatgccacttaaattattacttactgcagcagcaactcctcattccgtcttagaaccaaaaaaaattattcatgcttactataaagttcgtacagaattagaaaggaatagtcgccagaaactaaacattacaatcgtagatcctactctaattgcgttatgtaaattagttagtgaacggcaacttacatcaaacttggttgacatcgagtatggtaaccctcaaggaaaaatgactccatttaagattcactccttcgatttattcactaataaataccgcaggttaagtaatgaaaaatttagtcttgatcaggttcacgggcactttataagtatagctcacaagcttgctttaggtcgagaccctttaaacgaggtatcgcacccactactaaaagacaaaaaatatacgcagtgggcaccaatattacatgcattatgtcgaaagcatgaaaatagttcacaggtcgaatactacaaaaaatatagcaaaaaatttccgttgaaatacaaacatgagtttgacagcaatagtattaatcatcagattgaaaaattaaataagcgatattgttctctatttcgattcctaaaacctagccccgaaaacttctctcaaaaccaacgaaatgcactaaagaccacgcctcctgaagtgatgcagaaaatgatagtatatcatatgattatgttttatttttcacttataaaaaatgctgcttggtacattaaagtaagagattttatgataagtctaaaaatgagctatcctcaagactatgcatcaaaactcttcgccttttctagtggagatgaatgtatggatgatacattatacaatagttttaacgaaatattcagtgccaatccagtcggcctttttccctggatgttttcgggtctactaccagaaccgatggagttaatgacgcattatttcagcaataaaaaaaacaaagacattgagcatatagataaaaaaaacaagtcctttagaaatattgatttagcagcttctgcgctaacaatacctaaatttcttaacagtttagatcgtgcgaaagggataaatcctagtattatggttaaactaccctcaaacaattcagaaagttgtattttttacacagccacaggcataccaaaagaagaaggattatatcttgctgagctgtttagtaagggattgtatattcaaagaaatatagaagaaagtttaacgatggaactgagcgaaattgaagatctactactcggaatttgtttactttggcatgaaaactttgtaggtaaaatatcactgagcaagttcgttaatatcctacaacaaaatgaaattaatgatattagtgaaagaactttaaaagcaagaaaatataaagccaaatattggcttatgcaatggcctggtcagcttcccttaatctcctga

SEQ ID NO: 179534 - DNA, 129 bp, Klebsiella oxytoca
atgatatgcaatagaattcgcatgcgaattctattatgtgagaaaggtgatatggctgacgataaaagctgcaccaaagaaatggacgttaccgcagagagactggcgtatggcaatgagccgttttaa

SEQ ID NO: 179535 - DNA, 867 bp, Klebsiella oxytoca
atgacactgaaaattggacctatcggaaaactgatcgttgtatgtagtcagaagggcggaatcgttaaatcgcagtcatccagtgaaattgcacatgatcttcgtaaagctggtttccgcgtgcttgaaattgatatggactggacaactggtctgacggagagagctttccccgatgacttaccttatgagatagaacgcgaacctttaagtaacagttttacacccggcgaggcgaatacatatcagcttttctttccggaaacagaggttcgaccgattgaacttcctggcgggcgtttctttataggtgcaaccagtgaacttaatgaaattaactaccgcaacagcgactgcatgttcgacttcagggaccgtattgaagaactgaagaaacagtttgattttattattgctgattcagcaccatcatattcaaatgttatgatcgcagcgcatatgtcagctgattaccttcttatccctaccctgctggagaagcaggcccgtaatgcagttggtaaacagcttacttatatgcagaaaattaagcggaactataatccttcgctgcaattcatggggacttatgtgactcagacgcaggtaaagaattataaaaaaccccttaaagaaggatatcttgggcctattgatacactgaatctaaatctcctcatcgagattcttcaaggaaaaggctattccgaagaatacattctcgcctatatatcatttgtacctgctgctgcaaaagaagcgatcgaacttggtctctcctttgatgaatatgaccctaagtgtcttcctgcaattcagtataaagaacttacccagaaaattattatgctcgcaggaggtaagtaa

SEQ ID NO: 179536 - DNA, 1032 bp, Klebsiella oxytoca
atggccaagaaaccttttatgaagagactccaggcgcagcaggaaatgaaaaaaaatgctgctgttgtttctgatattgaacaggtcattgcaaataaacagccagatgaggagagccatgatatagctgcgcacaagattatggcggatattgcccgcccggatatcgaacctgatggacagataatccgcgtagatataaatctggtttatgctgaagaacaagtgcgacctgaagaagacttcgaggaagatatcatcgatggtatgtctgataccttcgaaacgatagggatgcttaccccgcctcgttgttatcctcgtgacagacgtggttaccagatatggttaggcgaaacgcgtgttcggactgctcgcaaacgtggtgatacccatattgatatttatgttggtaaaccaccacgggaaagaaaagaacgcatcatcggccagctcattgaaaacctgcagcagtctggtttgaaaccattagcgactgcaaaatcgttctatgagctcaagcatgagttcaatatgacgggtgagcaaatcgcaaaaacaatgggtaagcctacctcatttgtcagtaaacaccttcgtctccttgatgcaccagaaaatgttaccgcccttctccgggataaagtcacatccgatatcgatctggcatacacactgatacaggtaaatgaaaagtctcccgaagaggccgagaagcttgtcgcagctgcgcgagagtctggtatttcacgttcgcaggttaaagctgttcttgatgcagttaagaacaaaagcaaaggtgagatttcgcatgcgaaatctaaggctcagaacaaaaagccaaccaagcctttggacagcaattcagatgtgaaaacctggcaggttgttgtcgagatagacggtcagcaaggggtgataatgactgaccgcgcgccagacgaagcggggtatgtgtgggtgaaactggaacttggtgagatttcagtcgaggcttctgaactacgcgtcaaagggatgcgctctctgtga

SEQ ID NO: 179537 - DNA, 1380 bp, Klebsiella oxytoca
gtgccgggttcaaagagaatttgcaggcagtgtctgaacgatgaccgttatctgaacaacatcatcgcaagcgatcccgatgcctcagaatcatgcgattattgtgactccgatgagatgacgatgtcgatggaaacactggctgaaaaggtcgactggttgattgaaaattattatcggggcggagaatataaccattatctggaagagtatgaaggtgaacctctcttctctgttctggagcaagaggtcacagccaatgataatatcatcgatgacttatcggaactgctcgaggagttatggtttgactggagctcacatgatagaaaatatggtgatgagcctcattttgttgaagctgtaaccatctcaggaaacctgtccagaaaatggaattcaatggaaaggaaacttagagagagtaatcgattctttaatatggacgcgatggcaactttcgaagaggtttttacttaccttcacgaaaatcatccctcagcattcatcgattttgagcctaacaaaccaattttccgtggtcgtatttttcagtcagaggatgcacttgaaatcgcattacgtatgcccgagtcgagtttcggacctcctcctcctgagctgacaccttccggcagaatgaatgctagaggtatctctgtcttctatggcgctacgtccagaaaaaatgccatatctgaagtgcggccacctgtcggtagttatgttgctgttgctgagttcactttgttgcggacagtcaggttactcgacctctccagtctcaaagggctggctgttaacggatttagccgctttgatcctgagtatcttcttcgatatgaacgcagtagttttattcagaatctctccagaaaacttgttatgccggttgttcctgagcttgaagaaacaaattacctgctgacgcaagctatcgctgattatctctcaacatttgagcattgcgaactcgatgggatactgttcgcttccgcgcaaaagccaaaggaaagcacagacccttctgtcatgaatattatcctgtttcataaatcgtctggggtactgaatgcagaccgaaggttccgggaagctgaagtaaatatgtatcagcacgatgaggatatttcatactttgacccagagataaggacgactcccgatgatttccggcgtgaatttaaggtgctatcacgtaagaaaaatagggaagatttacttgagttaaaactcgatggcatagaagttcataaaatagagggtgttgattactccacatcagaaacaacagtcacgcactatttaacggaaggccgcacaaaagaagtgatttcgcatgcgaaatcctatcctacgatggatgataatgagttttga

SEQ ID NO: 179538 - DNA, 1125 bp, Klebsiella oxytoca
atgggcgtaccgtggttccagctgaaggacgcacagtttcccgagaagctgcacgtgttctccagcaactatgagctgtacgcctcgatgtccgccagggtgatgacacatctggaagagctggcgccgcgcgtggaacagtattccattgacgagatgttccttgatatccggggcatcaacagctgcattgactttgaagacttcggtcggcagctgcgtgtccatgttggtaacggtacgggactcaccatcggtgtcggtatgggccccaccaaaacgctggcgaagtcagcccagtgggcttcaaaagaatggccgcaatttggcggcgtgctggctctgactccgggcaatccccgccggacggagaaactgctgtcactgcagccggtggaagaaatctggggggtgggccggagaatttcgaagacgctggggacaatgggtatcaccactgcgctgcagctggcgcgcgcgaatccaaccttcatccggaaaaacttcaacgtggtactggagagaacggttcgtgaactgaacggagagccgtgcatttcgctggaagaagcccccccgccaaaacagcagattgtctgcagccgttctttcggagagcgcgtcaccacctacgaggcgatgcgtcaggccgtctgccggcatgcagaacgcgcagcggagaagctgcgcggagagcaccagtactgccggcatatctcggccttcattaaaacttcgccgttcgccatcaacgagccctgttatggcaatctggcaacagagaaactgatgacacccacgcgggacacccgggacattattactgctgcagtcagagcgctggacaggatctgggtctccggccaccgctatgccaaagccggcatcatgctgaacgatttctccccgaccggcgtctctcagctgaatctgtttgatgacgtacagcccagagcacacagtgatgagctgatgaaggtgctcgacggcatcaaccattccggcctgggcaaagtatggtttgcgggacgggggattgcccctgagtggcagatgaaacgagatatgctctcaccatcttataccacacgctggagtgacctcccggaggctacgatacgatga

SEQ ID NO: 179539 - DNA, 1008 bp, Klebsiella oxytoca; identical to SEQ ID NO: 121272

SEQ ID NO: 179540 - DNA, 195 bp, Klebsiella oxytoca
atgaacagaacagctcaagaagtacagactcgctggcttgagagccggcagcctgaagatcgtaccggtaatgaagcggaaaaattttcggatgaatgctggatgaacggtctgcggctggataaaagcccgtctgtgcactatcaacttctgatggaaactatccgcaggacgctgatcccgtggccaaaatga

SEQ ID NO: 179541 - DNA, 1209 bp, Klebsiella oxytoca
atgcgggaaaaatcccgacgtccgtcgccgctgcagcggcgggtgctgattgtgctggccgccctcgatgcgaaacgtcctggaccggtggccacgcgggatattgagcgggtgctggagcagggcggggacgccccggtatacgggccgaacctgcgtgcctcctgccggcgcatggaagccgcgggctggctgcgcaccctgcgcgcgccgaacctgcagctggccgtcgagctgacggatgccggccgtgcgctggccgccccgtttctcgctgacgaacaggcgcgcgtcctggcggagcagcgcgcgacggcgatccgggttctgcctctggtcccgcctgtccaggcagatgaggctgacgaccggccggtggagctggatggtcgatggcacctggcgttgcggggtgactacgtgatccgtcttgacggcaccacctgcctgcagctgtggaatgcggccgggcaggtgacacgcctggaaggcgatcccctgcaggtcgccacctggctgcagtcctgtcacgatgcggggattgcggtccgggtacagattaatgagagcgccacgccggaggcgggcacggtggacgttaccgcgccggcggaccagaccggcacctggtgccgtcagctggacgccgcgctgcaggcggaggggatcaccgggctgactgaggatattcaactggccgtggtcagtcctgaagcgtccctgcggatgctgccggcaccggcgcgcctgctgcacgttctgcgcgacgcggacccgctcactgctgccacatacgaggaagacacggtggccgcgctggctgacctgctggcccgcgcggggttcacggacgaccaggcgcaggagctgcagtggcaccgcatccgctggccgctgatgagtcaggaagaagctgaccggcgcgagctgaacagcctgctggatgaactggaacagcgacagctgtactgcaaccgcgggcagctgacggagattgtgttttcgccagttcgcaaacccggagagcgctggactgaacgtctgcagtggctcctgatgacggatggattcgggttccgcagtccgctgtcgcgtgaagcggcctcacgggcgctggctatcctggccggttacacgggacgggaggtggcggagcatctggccacggtgatggtgtggaacgacgctgaagcaggagagaggccctga

SEQ ID NO: 179542 - DNA, 249 bp, Klebsiella oxytoca
atgtatgaagatatgttgttttcgctcagctatgagcagatgacgcagatggcagaagaggaaataaagcaatgcgattttcgcagggatggcacccattatgtctgggaagtgaacaaggctcatgacatcctccgcttctggtatctcctggcgctgcgcggacacactggcctggccacaacacgggtcgaagcagactataaacggcttaaaacgctcatatccgagagggatgaggggcaatga

SEQ ID NO: 179543 - DNA, 351 bp, Klebsiella oxytoca
atgacccttacagcccttaagcttttcaaaaacctgtccgatgaaacccgtctgggtattgtcctgctgctcagggagatgggagaactgtgcgtctgcgatttctgcacggcgttggatgagtcccagcccaagatttcccgtcatctggcaatgctccgggaaagcggtctattgctggatcgcaagcaggggaaatgggttcattatcgcttatccccgcatattccttcctgggctgctcaggtgattgagcaggcctggttaagccaacaggacgacgtacaggccatcgcccgtaagctggcatcggcaaactgctctggtagcggtaaggctgtttgcatctaa

SEQ ID NO: 179544 - DNA, 363 bp, Klebsiella oxytoca
atgaagacgttaacggtgtttgacccggcaatgtgctgcagtaccggtgtatgtggttcagatgtcgatcaggttctggttgatttttctgctgatgtgcagtggctgaaagaacgtggtgtacaggttgaacgttacaacctggcgcagcagcccatgagctttgttcacaatgagaaagcgaaatccttcctcgacgcatccggcgcagaagggcttccgctgctgttgctggacggcgaaacggtgatggctgggcgatacccaaaacgcgctgagctggctcgctggttcggtattccgctggagaaggtagggttagctcccaccagttgctgtggtggtaatacttcctgttgctga

SEQ ID NO: 179545 - DNA, 1752 bp, Klebsiella oxytoca
atgaaattcttacagaatatcccgccttacctgttttttactggcaagggaggtgtaggaaaaacttccatttcctgcgcgacggctatccgccttgccgaacagggtaagcgggttttgctggtcagtaccgacccggcctccaatgtcggtcaggtattcgatcaggctatcggtaacacgattcgccctgtgacagcagttcctgcactttccgcactggagattgacccgcaggaagccgcccggcaatatcgtgccagaatcgttgatcctatcaaaggtcttttgcctgatgacgttgttaacagtatcagcgagcagctttcaggagcctgtacgactgagattgctgcgttcgatgaattcacgggcttactaacagacgcttccctgctgacccgctttgatcacatcatttttgatacagcgccgacgggccacacgattcgtctgctccagcttcccggtgcctggagtagcttcattgaaagtaatccagatggtgcttcctgtcttggcccaatggccgggctggaaaagcagcgtgagcagtatgctcatgcggtagaggctttgtccgatcctgaacgtacccgcctggttctggttgcacgactgcaaaattctacgctgcaggaagtcgcccgcactcatgaggaactggctgagattggcctgaaaaatcaatatctggtgattaatggtgtgctgcctgaagccgaagctgaacatgacgccctggccgcggcgatatggcaacgtgagcaggaggcactggcaaatcttcctgccggtttatctgagctaccgacagataccctgttactccagccagtcaatatggttggtgtttcagcattgaagggactgctggatacccgttctgaggcattaccgctcccggtaacgaatatcctgtacacgcctgaaaacttatctctctctggcctggtcgatgatatcgctcgcagtgaacacggcctgattatgctgatgggcaaaggtggtgtagggaaaaccacgatggctgctgccatcgccgtcaggctggcagacatgggatttgacgtgcatctcacgacctctgatcctgctgcgcacctgagtacaacgctgaacggcagcctcaaaaacctgcaggtcagccgcatcaaccctcacgatgaaaccgaacgctatcgccagcatgttcttgagacgaagggaagagatctggacgaagcagggaaacggttactggaagaggatttacgctctccttgtacagaagaaattgccgtgtttcaggccttctcccgtgtaattcgtgaagcgggtaagcgctttgttgtcatggataccgcccctaccggacacacgctgctgttgctggatgcgaccggggcttaccaccgagagattgccaaaaaaatggggagtaaaggtcattttactacccccatgatgcagcttcaggacccggatagaaccaaagttctgctggttacgcttcctgaaaccacaccggtcctggaagcggcaaacctgcaggctgaccttgaaagagcggggattcatccgtggggctggattatcaataacagcctttccattgcggatacgcgttctccgttgctttgtcagcgtgctcatcaggaattgcctcagattgaggctgttaaggatcagcatgctgaccgtatagcgcttgttccggtgctggcgtcagagcccgccggtattgaaaagctcagagagttgatgagctaa

SEQ ID NO: 179546 - DNA, 1290 bp, Klebsiella oxytoca
atgttactggcaggcgctatttttgtcctgaccattgttttggttatctggcaaccaaagggattagggatcggctggagtgcaatgctgggcgcgggactggctctgatatctggcgttgtgcatgtgggcgatattccggtggtgtggaatatcgtctggaacgcgacggcgacctttattgccgtaattattatcagcctgctgcttgatgagtccggctttttcgaatgggcggcattgcatgtttcgcgctggggtaacggtcgtggccgtttgctctttacgtatatcgttctgcttggtgcagcggtggcggcactgtttgccaacgatggtgcggcacttattctgacgccgatagtcatcgccatgctgctggcattagggttcagcaaaggcacgacactggcattcgtcatggctgccgggtttattgccgatacatccagcctgccgcttatcgtgtccaacctggttaacatcgtttctgcagacttctttggactgggcttcaccgagtatgcgtcggtaatggtgccggtggatattgcagccattgttgccacgctggttatgctgcatctgttcttccgcaaggatatcccaccgacttacgccctgtctcttctgaaagcaccggcaaaagcgattaaagatctggcaaccttcagaaccggctggatagttttaatacttctgctggttgggttctttgtccttgagccgctcggtattcccgttagcgcgattgcggctgttggcgctgtgatcctgtttgcagtagctaaacgaggccattccattaacactggcaaagtgctgcgcggcgcgccatggcagatcgtcatcttctcattggggatgtacctggtggtctacggtctgcgcaacgccgggctaaccgaatacctttcaggtgtgctgaatgtactggcggataaaggactctgggctgcgacgctgggtactggcttcctgacggccttcctgtcttccatcatgaacaacatgcctaccgtgctggttggcgctctttctatcgatggaagcaccgcaacaggcgttatcaaagaagcgatgatctacgccaacgtgattggctgcgatctgggacctaaaattacacctattggtagcctggcaacgctgctctggctgcatgtcctttcacagaagaatatgaccatcacctggggatactatttccgcaccgggatcgttatgactctgcctgtgctgtttgtaacgctggcagcgctggcgctacgtctctctttcactttgtaa

SEQ ID NO: 179547 - DNA, 426 bp, Klebsiella oxytoca
atgagcaacatcaccatttatcacaacccggcctgcggcacgtcgcgtaatacgctggagatgatccgcaacagtggtaatgaaccgaccgttattcattaccttgaaaatccaccgtcacgcgatgagctggtcaaactcattgcagatatgggcatttcagtccgggctttgctgcgcaaaaacgtcgagccttatgaagaactggggcttgcggaagataagtttactgacgatcagttaatcgattttatgcttcagcatccgatcctgattaaccgtccgattgtggtgacaccgttgggaacgcgtctgtgccgcccttccgaagtggtactggatattcttccggatgcgcaaaaaggcgcatttgctaaggaagacggcgagaaagtagtagatgaggcagggaaacggctgaaataa

SEQ ID NO: 179548 - DNA, 192 bp, Klebsiella oxytoca; identical to SEQ ID NO: 98248

SEQ ID NO: 179549 - DNA, 1758 bp, Klebsiella oxytoca; identical to SEQ ID NO: 98247

SEQ ID NO: 179550 - DNA, 363 bp, Klebsiella oxytoca
atgtcaaaaattgagatctttgaagccgcaggctgctgtgcgaccagcagcgtcgtggtcagcgatgaagccgtcaaatggaacgccagcgccgaatgggcgaaaaagcatggtgtgaatattcagcgttacagcctggcaaagaacccgcagcagttcctgaatacgcccgtcatcagggccttcctgaacacgtcaggaatggagtcccttcccgctaccctgcttgacggccagctggtgatggcgggcaagctcccgtcccgggaagatatcgcccgctgggccggtatttccctcacgcaggactggaatgaagacagcacgcagccgcgctgctgcagaattccccgtatgccttaa

SEQ ID NO: 179551 - DNA, 546 bp, Klebsiella oxytoca; identical to SEQ ID NO: 98246

SEQ ID NO: 179552 - DNA, 714 bp, Klebsiella oxytoca
atgattgctgaactgaaaaatgttgttcctgagctgtttgatacaggcctcaccggggtccgcctgggtgtaaagacagttgaccatcctccccggatccttatgttgtacggttccgttcgagagcggtcctacagccgtctggccaccgaagaggctgcccggcttcttaccgccatgggtgcggatgtccgcatctttaatccttccggtctccctctgccggatgatgcagcggatacgcaccccagggttatggaacttcgcgaaatggtgcgctggtctgaagggatggtatggtgctctcctgaacgtcatggtgcgatgaccggcataatgaaagcccagattgactggataccactatcagagggcgcagtacgcccttctcagggaaaaaccctggccgtcatgcaggtctgcggaggctcccagtctttcaatgcggtaaaccagatgcgtattcttggccgctggatgcgaatgatcactatacctaatcaatcctcggtagcgaaagcctggcaggagtttgatgaagacggacggatgaaaccatccccgtactacgaccgtattgtggatgtaatggaagagctgatgaagtttaccctgctgacccgggagtatgcagcgtatctcgtcgatcgctacagtgaacgtaaagagtcggcagaagcactttcccggcgggtgaatcagagcaaaatctga

SEQ ID NO: 179553 - DNA, 327 bp, Klebsiella oxytoca; identical to SEQ ID NO: 98245

SEQ ID NO: 179554 - DNA, 663 bp, Klebsiella oxytoca
atgaaaacattatgcaattgtaaatcccgtgatgttatttcggaattcctcggcacgttcatccttgtgatgattggtgtaggctccatttcggtcaatgaaattagtgaggtgattggaaattttggtatagcgctcagttttggtctggcggtttacttttgcatacatctgttttcagccagtagcggagcacaccttaaccccgtggtaagcctgattttttatcttatcggggcctgctctttcagggcaaccatgaattacatcgtggctcagttgttaggggccgccgctgctgcactgtgcctgaaggctgtctttggccactccctgctggccggggtgacccgggtccatatgggggtatcactgtacaatgcctttttcatcgaaggtgtcatgacttttattctgattatgagcatcctcacgaccagaaaccacgcgattatcagcattgctgtttttcttgatgcttttattggcgggccgctgacgggggcaagcatgaacccggcccgtagcttcgggccggcattggccatgggatactgggataatcagtggctgtactgggccgctccgctgtctggcgggcttgcagctgttgcgtgctgccagctgtttatgccgcaactgaagtcaccctcaccggaataa

SEQ ID NO: 179555 - DNA, 174 bp, Klebsiella oxytoca; identical to SEQ ID NO: 98242

SEQ ID NO: 179556 - DNA, 549 bp, Klebsiella oxytoca
gtgctgattggttatgccagggtatcaactggggaacaaaacctcgatttacagaaaaacgcgctgatccgcgcagaatgtgagctggttttcgaggatacggcgagcggaaagaacgccaggagaccgggattaaaacgcgcgctgcggcgactccggccgggggacgtgctagtggtctggaaactggacaggttagggcgcagcgtacgtgacctgatcactctggtatcggagctgcaggcgcgcggggttaatttccgaagcctgactgacagcatcgataccagtacgccagcaggacgttttttcttccacgtcatgagcgcgctggcagagatggaacgagagctgattgtggagaggacccgcgcaggcctggctgcagcgaaagagcaggggcgtgtcggcggccgccggcgggtgatgaccttggaggttgtcgagcgggcaggacgaatgctggataacggagctacacgccaacagatagctgatgtgatcggcgtaggggtgaagactatttataaatattttcctgccggctaa

SEQ ID NO: 179557 - DNA, 738 bp, Klebsiella oxytoca
atgggcaatacaaatcttaatagtttgttaaaaaaagagacattaatagttgcgctggctactgcactttgctacacgggggcatatatatatgaaagaggattttctgtttactttggcatccctacagaattaatatctgtaacaccgggtagtattatcactacagtttctcttttcattgcatttattatggctctatatatgatatcgaccattcctattgtgatatctaatagtaaaaaaataaaaaacaagtatatcataaccgcattaaatttcgctccagtgtggatactattcaatcttattttcttcttaatatccggattcaaaacacaaacttttactatagtaactattgcatacctttttttatgtattagtcttactataagctcatcgcaaaattcatcccccaacaaacccaccacaaatggaaaaacacagttaatacaaacatatatcgataatgttattgcctttacctttttcttttctttaacattttttgccattacaagtgggatgggtactttcatagctcgaaccactgacaatttcaatgcttttacatataaaaatgaagagtacaagttaattagaatttatggtgataatattattgccataaaaatgaaagacgcaagtaagacaaagggtgtttatatctttaagccagaagaactaagtggcattcgcatgaatcaagctaaaaaacatgcacaatccgaataa

SEQ ID NO: 179558 - DNA, 678 bp, Klebsiella oxytoca
atgtgcggacgatttgcccaatcacagacacgcgaagaatacctggcttatcttgcagaagaggccgagcggaatatcgcctatgaccccgaaccgatcggccgttacaacgtcgcacctggtaccaaagttctgttactgagcgaacgcaatgaagaactgcacctcgatccggttcattggggttacgcgccagggtggtggaataagccagcgctcattaacgctcgcgtagaaaccgcggcgacaagcagaatgtttaagccgctatggcaacatggacgggcgatctgttttgctgacggctggttcgaatggaaaaaggaaggagacaagaaacagccttacttcatccacagaaaagacggcaagcccatttttatggcggcgatcggcagcgtaccttttgaacgcggcgatgaagctgaaggatttttgatagtgactgcagctgccgaccaaggtctggtcgatattcatgaccgccggccgctggtactggcgcctgaagccgctcgtgaatggatgaggcaggatgttggaggtaaagaggcggaggagataattgcagatggtacggtaccagcagaccatttcacatggcaccccgtttcgcgcgcagtgggtaacgtgaagaatcagggggcagaacttattaaaattgttcaaaaaggttaa

SEQ ID NO: 179559 - DNA, 369 bp, Klebsiella oxytoca
atgtataatgataaaaccacaaaactagttgtttcattaaataaattaaccgtccaaaaatcaattaattggactgttattgatgcccctgaaaatcttgtaaatggcacacaggatatagtgcaagttgttttccatactaaacatatggaaaaagacttcgttatttataaccgtaaataccgttattacttcgatgaacatgaatggtcatgggcagaaggcattgttttagcaattgtaacacccagctataaaacaatttgggaaacacatgatcaaacacaagctctcagagatctttacagctcagtttctaagcaggcatcaggcttcaatgatatcgttgatgatctgctaaatatttag

SEQ ID NO: 179560 - DNA, 285 bp, Klebsiella oxytoca
atgataagcgaggccatcggtgagtgggacaatcggaaggacttcatccgaaaagaatttactgattgcgcagtctttgctgaaagtcttttggacaaactatcttcaaaagatagagcgaaaattgatatttttttggatgatgtaaaaccaaaaaaacttttccgaaggaaagaaatagtaatcaatattaatgatcaagaacaagcttggaagctctatgagaagctgagtatactcaactctagggttaatgagctggttaaagacatgcaattggactga

SEQ ID NO: 179561 - DNA, 1026 bp, Klebsiella oxytoca
atgaccatcagaaaacagccaaacgggaaatggttgtgcgagtgctacccaagcgggcgtgacggtaagcgcgtccgtaagcagtttgcgacgaaaggcgaggctatagcgtttgaaaacttcacaatggatgaagtgaacaaaaagccatggttaggtgaaaaggatgaccggcggcaattgtcagaagtaatcgagcagtggcattcgctatatggacagacccttgccgaccccaagcgactgatggcaaaacttagcattatttgtaatggcctgggcgatcccattgcctcggagctaactgccggagactttacaaaataccgtgaagcgcgcctaaagggtgaggtcaaaaatgaagatggcgtgcttatgtcgccagttaagccccgcacggtaaacctggaacaacgcaacctatcatcagtttttggcacgctgaaaaagctgggccactggtcagcacccaacccactcgccgggctaccaacattcaagatcgcagagggtgaactggcgttcctggcaccggaggaaattaaacgcctgctggatgcctgcgccgattctcaaagccccagcttgctgatgattgcaaaaatatgtttggctaccggtgcgcgctggagtgaagccgaaaacctgcagggccatcaattatcaaaataccgcatcacctacaccaaaaccaaaggcaagaaaaatagaaccgtcccgatttcacaggatctgtatgacgaactccccaagaaccgggggaagttattcacaccgtgtagaaaagcctttgagcgtgctgttaagcgggctggtatcgatttgccagagggccaatgtactcatgtgctgcgccacaccttcgccagccattttatgatgaacggcggaaacatactggtcctccgcgatattctgggccatgcagacattaaaatgacgatggtttacgcccactttgcgcccgatcacctggaagatgcagtgacgaaaaacccccttcacaatctcaactggaaccgctaa

SEQ ID NO: 179562 - DNA, 633 bp, Klebsiella oxytoca
atgatacaggtaaaggcgggcgagaatactgggggaagagaagctatccataggctaatggctgcctacgatttcaagtcaagacagcaactatgcgatcatcttggtgcgtctaaaagcaccatggcaaacagatacttaagagacagctttcctgcggaatgggtaattcagtgcgctcttgaaacaggggtatctttgctctggctaaccaccgggcaaggcgagccaggctcaaatgttgacacaaaaaaagatatcaatttcgtgaactccggcaaagttaaacatctttcggaccttgtttctcctgaaattgacaaagcggctcttactaatggctcgttagttgaggaaggcaaagcaatcattgacagcagcctgctacctcccagctccagtaacctacttttggttaataccagtggtgactcatatttggtcgatcgcagccaaacaccaccagttaacggagtatggctggttgatattgacggaataaaaagcattgtgaagttaactcgcctgccaggaaacaggttagttgtgcatcaggatgaatcatcttttgagtgcagcctggatgatatcgagatagtaggccatgccttaaaaataattaagagcctttga

SEQ ID NO: 179563 - DNA, 249 bp, Klebsiella oxytoca
atgagcactgatatttcaattcgtgtaccaaaagttatagcgactcctgctgagttcgctgaatgggaggggtactcccgtggctcggtttatcagatgatttataacggtaaactggccaactacattgaaaagaaagaaaaaaacaaagggcgcgtattcattctttacctcaaatacaaaaaggaccaagcgagcaaaaacatggacaagtctgcattcaattacaacgttgtagttggttgttaa

SEQ ID NO: 179564 - DNA, 510 bp, Klebsiella oxytoca
atgtttgattataagatttccaaacatccacatttcgacgatgcctgccgtgctttcgcgttgcgtcacaatatggcgaagttggcagaacgcgcaggaatgaacgtccagacgctgcgtaacaaactgaatccggatcagccgcatcagctcacagcaccggaaattcatctgcttaccgacctgactgaggaccccgcgcttgttgacggttttctggctcaaatccattgcctgccgtgcgtgccattgaatgaagtggcagaagagaacctgccacattacgtcatgagtgcaactgcggagattgggcgagtagctgcaggcgcagtatccggtgatgtaaaaaccagtgcgggccgccgcaatgttctcaacagcatcaactctgtcacgcgcttgatggcactcaccgcagtttcattacatgcgcgtttgcaggcgaatccggcgatggcaagcgcagtagataccgtgacgggcctcggcgcttcgttcggtctgatctga

SEQ ID NO: 179565 - DNA, 201 bp, Klebsiella oxytoca
atgctgactaatgaaccatctttcgcgtcacttctcgttaagcaaagtccggcaatgcattacggtcacggctggatcatggggaaggatggcaagcgctggcacccgtgccgttctcaggatgaactgctggctgacctgtccacaaccaaacaggggaaatcatggctattgaaggcgctacggcgactgttccattaa

SEQ ID NO: 179566 - DNA, 342 bp, Klebsiella oxytoca
atggctattgaaggcgctacggcgactgttccattaagccccggtgaacgcctggacggactgaaccatattgcggaattgagggctaaagtgtttggtctgaatattgagccggagcttgaaaggtttattaaagatatgcgcgacccacgcgacgtaaataataaacagaatgagcgagcactggcagccattttttatatggcaaaaattccggcagaacgtcacggcgtcaatattagtgatctgactactgacgaaaagcgggaactggtgaaagcaatgaatcattttcgtgcagtggtgagcttatttcccaaacggctaaccatgccgaattaa

SEQ ID NO: 179567 - DNA, 234 bp, Klebsiella oxytoca
atgcgaaatattgaaacccgtaccactaaaaccggaccagatgatgctggactcaacctgctgctgactgaggcacgcaaagaagaacgccgtggacgcgcagatgtgatggctgcgcgtctggattctttagctgctcgtatcgtgtcacgtcagcttaaccacacggaagcggctgagctactgcgtcaggaagctgtgaagattcagaacgaagcgcaggagatccactga

SEQ ID NO: 179568 - DNA, 228 bp, Klebsiella oxytoca
atggctgattcaatggacctcgtacagcagcgcgttgaagaagaacgccagcgccacatccacaccgcccgcaataaagcgccgggcgtttcccgtgttctctgcattgattgcgatgcgccgatcccgccagctcgccgccgcgccattccgggcgtgcaatgctgcgtcacctgtcaggaaatcgcagagctgaaaggcaaacactacaacggaggtgcggtatga

SEQ ID NO: 179569 - DNA, 858 bp, Klebsiella oxytoca
atgagcactatcctgaaatgggcgggaaataaaaccgccatcatgccggaactgattaagcaccttcctgctggtccgcgactggttgaacctttcgcgggttcatgcgctgtaatgatggcgacagactatcctcattatcttgtcgcggatattaacccagacctgataaatctttttaagcatattgcatttgactgcgagaaatttatttcaaatgctaaaggattcttttcaggcacaaatagctctgagtcttattacaacatccgtcaggattttaatcattcggctgaaaccaccgatttttggaaagctgtatttttcctttatcttaatcgccatggttatcgtggattgtgccgctataatttgagcggtcattttaatgtcccttacggtaattataaaaatccgtattttcctgaaagtgaaatacgcgcttttgcagaaaaagcaaaacgcgcatcgtttatctgcgccagctatgacgagacactggcactgctgcaaacgggtgatgttgtctattgcgatccaccatatgacggcacgtttagcggttatcacactgccggttttacagaggacgatcagtatcatctggcgtctattcttgagcgtcgttcatcagaaggtcatccggtcattgtgtccaacagtgatacatctttgacccgttctctttatcgcaatttctcccgctatcggctgacggcaaagcgcagcatgggtgtggctgccggtgatggtaagtccgccgtggaaatcatcgctacttctaaacctcatcactggattggttttgatcctgctggcggtcctgattgctgcgttaagtatgaggtgcgggcgtga

SEQ ID NO: 179570 - DNA, 828 bp, Klebsiella oxytoca
atgtcagacccgatgatttacgaggatttgctcaggtccatttctttgcaggggttggcatttggtcatatgccctgcgccgtgtgggctgggaagacagcagagaagtctggacaggttcctgcccatgccagcctttcagcgcggcaggcaaaggaaaagggtttgctgacgagcggcacttatggcccgccatgcattggttggtcgggcagcgtcgccctgtcgttgtctttggcgagcaatctgcaagtgctgacgcaaatgactggatcgaccttgtacagactgacgtggaagacttgggttatgccttcggggcgagtgcgtttccggctgcgagcgtcggtgccccgaacatccgggacagaacttattgggtggcccacaccaacagcgaatgcctggaagcatcccagcaacgcgggccgtcagggaggattgaacttgcagacagctgcgcagctttcgggctggacaactccgagtgccagcgacagcaggcggggagggcgagggattaccgagggcatgtccggcagcagccttgcgcaacaggtaaaaatggctggctggcccacgccaacagccagcgaccacaaggggggatatcctggggggaggattcgcaaagggaaaatatcgacagatcgtctggatgtggtggcacagattgcaggcccggtccggttaacggcttctggaaagatgctgactggctcaaatgcacagatggaaaatggaggccagttaaatccggccttgagcctttggttaatggggctgcctccagagtgggacgaattcgaacctacggaaatgccttaa

SEQ ID NO: 179571 - DNA, 2391 bp, Klebsiella oxytoca
gtgaagttgaccagcttcgaaatggcggcgaccggcggctcgaatgaggccgccgcagcctttccatggaataccccaaaaaaagcggttaatccgtatctggaaccggcggacgttgcgccggagtctgcgctttcaaacctcatcactctgtatgctgcggataacgagcaggagcatctgcgccgtgaggcgctgagtgatgaggtttgggaactctatttctttaatgaatcccgcgatcctgtccagcgtgaaatggagcaggatcggctgattagccatgccaaaatggcccgcgaacagcagcgcgttaatcccgatttggtgattattgccgatgttagcgccatgcctgcccatatcagcaagcctttgctggagcggattaaatacttccatagcctgggcagggctaaagcttattcccgctatctgcgcgaaacaatcaggccttgtctggagcggctggagcgcgcgcgtgacagccaggtgtctgcgtctttccggttcatggcgagccaggacgggctggaggggttgctggtactgcctgaaatgaatcaggagcaggtaaagcgcctttccacgctggttgcggcacatatgagcatgtgtcttgatacggcctgcagtgatctgtttgtcagtgacgatgttaaaccagaagaaatccgccaggcatgggaaagggttgcagcagaagccatgcgccttgaggtcatcccgcctgcctttgagcagttgcgccgcaaaaagcgccgccgcaagtcggtgccttatgaactgatcccaccgtcgctggcgcgcatgctgtgcgcggactggtggtatcgcaaattgtggcagatgcgctgcgagtggcgggaggagcagctgcgcgccgtctgcctggtcaacaagaaagcgtccccgtatgtcagctatgaagccgtgatccacaaacgcgagcagcgccgcaaatcgctggagttcttccgctcgcatgaactggtcaacgaagacggtgacacgctggatatggaagatgtggtgaacgccagcaacagcaacccggcgcaccgccgtaatgaaatgatggcctgtgttaaagggctggagctgatcgcggaaatgcgcggagactgcgccgtgttctataccatcacctgcccgtcacgcttccacgcaaccctcaacaacggcagacctaatccgaaatggaccagcgccacggtccggcagagcagtgactatctggttgatacattcgccgctttccgcaaggccatgcacaaagccgggctgcgctggtacggcgtccgcgttgcagagccgcaccatgacggcactgtgcactggcatcttctgtgctttatgcgcaaaaaagaccgtcgttccatcaccgcgctgctgcgaaagtttgccatccgtgaagaccgcgaggagctgggcaccaataccggaccgcgcttcaagtccgagctaatcaacccgcgcaagggcacaccgacaagctacatcgccaaatacatcagtaagaacatcgacgggcgcgggctggctaaagaaatcagcaaagaaaccggcagatcactgcgtgacagcgccgagcatgtcagcgcctgggcgtcactgcaccgtgtccagcaatttcgtttctttggtattccggggcgccaggcataccgcgagctgcgcttgctagctggtcaggcggcgagagtacagggcgaacgcaaagcgggtgcgcctgtactggataatccacgtctggatgcggtactggcggctgcagatgcgggttgctttgccacctacatcatgaagcagggcggtgtactggttccccgcaaacatcaccttgtccgcacggcttatgagcttaacgacgaaccgagcgcctacggcgatcacggtatccgtatctatggcatctggtccccgattgcagagggcaagatttgcacgcacgcgatgaagtggaaaaaggttcgtaaggccgttgacgttcaggaggcggcagccgaccagggcgcttgcgccccttggactcgtggcaataactgtccccctgtggaaaaaatgaactattttgagccagattcgccaggtaatgatcagccggaaccgctgccagacttccagaacatgagcaggaaggagcggcgcgaactgacggcgaggctacggcaggtaaaaccgaagcggcggaagggttacaaacaagaaattaacgatcagctgcgcctgcagctggaggttgagctgaagtccaggggctttgacggaagcgagaccgagatcgatctactgctgcgtggtggcagtatcccatcgggtgccgggctgcggcttttttaccgcaatcagcgcctgcaggaagatgataaatggcggcagtggtactga

SEQ ID NO: 179572 - DNA, 189 bp, Klebsiella oxytoca
atgcaggattatcttttggagtcgctgaaactccagcgtattgatttttttatcaagcttgtagcggctagtgagtgcagcgatgaagagaagcggcttgctatccagtgggtttcagagttgaccgatgagctaatggcgaaactgcgtaaccatgaatacggccggtcaatggacatttccagttaa

SEQ ID NO: 179573 - DNA, 234 bp, Klebsiella oxytoca
atgcgtgtcgaaataatgattgataaagaacagaaaattagccctgcgacactggtagccctcgaaaatgagctttaccgcaacctgtgccctctgtatcccaaaaccacgatccgcattcgaaaaggcagtgccaatggcatcgagttaagcgggttaaaactggatgaagataaaaagcgtgtaatggaaattatgcagcaggtctgggaggacgatagctgggcgcattaa

SEQ ID NO: 179574 - DNA, 258 bp, Klebsiella oxytoca
atggggaaacgtgactgcgagtatcagattgtttaccgggatgaggcgttggagtatttcatctcaggcggttgggtattttttcagaggccaaaggccagcggcggtggatactggcttggccgaacatttgacggtgtgtttctgctggagcttgaatacccggtttcgctccatgatgggatcgtgttcctcaatcagctaaccgaggttgcggataaattcatggattttgatgatgatttccagctgacctga

SEQ ID NO: 179575 - DNA, 501 bp, Klebsiella oxytoca
atgatggtattcgcactggaggcgaaatttcaagatttcctcggcgccattttcatggagcttgagctgggcgatagctttcgcgggcagtactttaccccttattcggtccagtgcctgatggcccggatgcagatgccgggcgtcagggacactatccgccgggaagggatagccacggtcagcgatccggcctgtggtgccgccgggatgctgattgcatatgccgaatgcctgctcgaagcggatatcaatccttccatgcacatgttcggcagctgcatcgatatcgatccggtggcggcagatatggctttcatccagctgtctctgctggggattgccgccgaagtggtcacgggtaacaccctgacaatgcagttcaggcgggtaagatacactcccgtgtactacctcaatgactttgaaaaacggctggctgacctgacccggttcagggcgatgcgggactttatgcgcgggatacaggaggctgcgtaa

SEQ ID NO: 179576 - DNA, 543 bp, Klebsiella oxytoca
atgcacacaataaacgtcaaccccaacgtcaacaccgccactcgtgaatcagacgaacaatttaaaacagacaaatatctgcgttatgccgttaccgatggcgatgagcgtctggattttatcccggccctcttttttacgccgtcagccgataatatggcggcgagctggttacgccagcattcggattacgatggcggattctggtcttactggattatttcgcagggtgtcggcgggaatattaccccgaaccgtattcagttcatcaccacgcagaccgggtacattgcgccggaaggaaaacagtcttacaggatgcgcatccccggcaattattttgacggtgacgtcagcgccgatgcagcaggaattattgccacgctgacgataatgaactggctgtcatggcaggtggcggatatggggccggaatatgcccgcgtctgtaaacatctggtttcccgtcaggatgcactgaaagattatatcagcattattcatcatcccgaacggcatttaatctggcgggcgatagactaa

SEQ ID NO: 179577 - DNA, 495 bp, Klebsiella oxytoca
ttgagaaaaaaaatggcgtttgctgccctgttattaatatccacgcctgcatgggccacggattgttttgatatggcgggacgggattaccggattgatccggatctgctccgggctatttcatggcaggaatcaaactgggtggtggatgccattggaaaaaatccgggaacgggatacggtgccgggctgatgcaaatcgattcgcagcaccatgcccagctggcggagttcggtattaaaccggagcatcttctgacggatacctgcctgaatatttataccggcgcgtattatctggcgctggcttttaagaagtggggcgtcagctgggaggcagtcggtgcctacaacgcgggattccgcagatcggacaggcagaacatgcgacgactggcatatgcgagaaagattgaggctatctaccgggctatcaaggcaaataaaaatgccggacaatcccgggctgttaaaaacgaaagacctcatgaatga

SEQ ID NO: 179578 - DNA, 393 bp, Klebsiella oxytoca; identical to SEQ ID NO: 136881

SEQ ID NO: 179579 - DNA, 693 bp, Klebsiella oxytoca; identical to SEQ ID NO: 136880

SEQ ID NO: 179580 - DNA, 369 bp, Klebsiella oxytoca
atgaatgctgtattaagtgttcaggacaccgttgtctctgaagaaactaagccgtcttttctgtcccgtgttttcaacaaaaagaaagctctgaaagtcgttaaggccgtgctgccagtggctgctcttgcggcattcttcccggatgcagcgatggccaccaccactgcaacggacctgatgaagtccggtgataccacggtcaagggtaccttcggtaagtcttccagcgtggtcaaatgggtggtgctggctgaagttatcgcaggtggcatcatgtacatgatgaccaagaacgtgaaattcctgttcggcttcgccattatttccacctttatcaccatcggtatgtcggtcgccggttactga

SEQ ID NO: 179581 - DNA, 306 bp, Klebsiella oxytoca
atgacgggagacgaattaaagaaataccgtttcccggaaacactgactaaccagtcccgctggtttggtttatatctcgatgaacttatcccggccgtgatttgtctcggctggggtttctggaccagcaagttcatatttggtatggctgcagcggcactggttttctggggtatcaagaaactgaaaaaagggcggggcagctcctggctacgcgacctgatttactggtatctgccaacctcccttcttaaaggtttctttcatgatgttccggactcctgtttccggcagtggattaaataa

SEQ ID NO: 179582 - DNA, 567 bp, Klebsiella oxytoca
atggaacatggtgccaggcaaagtaccacgcgtgttatcgccgtgggatttatctgtctggggacgctttttaccctcagccttgcgacaaatatcattcagggcattaataactaccgccttcagacagaacagaaagtggcggtgacaccgatgttattcagtgccccgtttgcggtttcacagaatcagtcggacgcctcttatattgaacaactggggctgagttttatcgcgcttcgccttaacgtcacaccggaaacggttgatgcccagcatcagcagctgctccggtatgtattaccggcctcgcagaacagtcttaaggtccagctggctgaggatgcgaaacgaataaaagaaaataatgttaacgccaccttctatatgacatcggtccgcgcctggcctgcggagaaccgcgttgatatccggggcgaactgaaaacatggattggtgactcgaagccctacagcgaaattaaaagttatgtcattcagttcagtcgtgtcgacggtgtcagctggctggcacgctttggagaaataaataatgaaaatgattaa

SEQ ID NO: 179583 - DNA, 741 bp, Klebsiella oxytoca
atgaaaatgattaatccgttatttatttcaggttgcctgttatttacggtgcctgcgatgtcggccaccctcagcggtacgttggccccgaccgtggttcccctgaccaacggcgggcaggctaatatcgcggtgagtaacaccgacccgaacctttttactgtacccggggatcgtatcaccgcgattaacagtctggatggcggactgaccaaccaggagcagaccgacagcggtggcgccattctggccaccgtcagtaaaaagccgttcacctttatcgtggaaactgagcgcggcctgaacttctccatccgtgccgtgccgcgcgcaggcgtcgggagaaccattcagctggtcagcgaactgtcgggcacgccgggaccagcaaaagcctgggaagagtcaaacccgtatgagtctgtgctggtctctctgaaccgtgccgttcgccagggcagtgttcccggtgactatcaggcggtccctgtcacctcagaaacgctggcggtgccagccggtctgcgtgccacggcagagaaagtctggacagggcatcacctgaaggtcgtccgttacagtctggataatgtctcgctgtcgcctcgtatggtgcgtgagagcgatttctggcagcccggcacgcgcgccgtcatgctcagtacgcctgcaggaccgctgaccgccggtggccggatgcaggtctgggtgaccacctctgatgctggagggaaccgctga

SEQ ID NO: 179584 - DNA, 1416 bp, Klebsiella oxytoca
atggcgaacttcaacacgctgattaagcgcaagcagtacctctggctggggctcattctggtgggcggcgcagctgccgttggcggcggtctgtatctgtcagagctgaacctgagctctgatgaagaggcccctgctcagggcgaacccgcaccggacatgaccggggtggtcgacagcagcttcaacagcaaagtggagcagcatgccaccaccgagatgcaggccacggcggcagacctgaacaagcgatttgcctccctgcagggggaagtggacctgctcagtaaagcgcggaatgcagaccaggtccgtatcgacaaactcagcaatgagaatgcggccatgcaggaacagctgaaggcgctgggcgttaagccggctgtctctggcggcgaacctgcgccaacaccgccgtctccgcctcctggcccggaaggcgagccgcagcctgccagttatccgccgcagtccggcgcagcggtaccgcctccgacggcattttatccgggcaatggtgtgacactaccgccacaggtcagctaccagtctgtgccggttccgaaccagatacagcgtaaaacgttcaactacaacaggggcaaaaaagggcgggagctgccctacattccatccggcagctttgcaaagagcatcctgattgaaggggccgatgcgaatgcttctgtcacgggtaacgaatccacggtgccgatgcagctgcgtgtggtgggccgtgtcgagatgccgaacagcaaaacgtatgacctgaccggctgctttgtcggtcttgaagcctggggggatgtttccagtgagcgcgccatcgttcgtacccggaacatcagctgcatcaaaggcgacaaaaccattgaccagccgatagccgggcacgtctctttcatgggcaaaaacggtatcaaaggggaagtagtcatgcgcaacggcaaaatcctcggctgggcatggggcgcggggtttgttgacgggattggtcagggaatagagcgcgcttctcagccggctgtcgggctgggggccacggcgacgctcggtgccggtgatgtactcaaaatggggtttggaggcggtgcgtcaaaaggaagttcaacactgagcgagtactacattaaacgttcagagcagtaccaccctgttatcccgattggtgccggcaatgaggtgacggtggtctttcaggatgggttccagctgaaaaccatcgaagagctggaagcggaaaagaacgggcaacagcaggcacagaatcaggagccggtcgcgcagcctgaatcgcaacagtcaggcagcaacctgaacgggtttaacactgacgaaatgctgaaaaagctgggcaagctggaccctcgccagttctcaccaggcggagaagtgcagggagaaaatcatggttaa

SEQ ID NO: 179585 - DNA, 597 bp, Klebsiella oxytoca
atggttaagtcccgcgccgctctcgttctgtcctcgctgcgctggttccgctggctgattcagcatgcggtagtgtatccgctggccacgatgatgctgctgattgtaacagtgctgtggcgtggtcatatcacgcccggtcagatgctggtgaataccatcgaatcggtgcagcgggaaggatatgtcattcacgactgcacgggacccgcttcgcgcgaagcactcaatggtgatgcggtgaagccattactgcctcctgttttacaggaggactgctcctctttcagtacggatgcggcagggtatgcagcacatattgaccagggctacacgaaaaacatcctctggctctggtttctgatggcggttgtgtttacgggtgtcgcggtggttttcggtcgcacccctgccagcagaacaggtatcacgtgggtgagagatgcgcgggggaatgttttccccggatgcagacccggcaaaggcgcgatatcaccgttactggccggatatcagaaacgcggtgagaccatcgtgatttatgaccattccgccagattcagcgaggaagataaaaatgaaatcaacgagaaataa

SEQ ID NO: 179586 - DNA, 237 bp, Klebsiella oxytoca
atgaaatcaacgagaaataatccgttttccagtctgtttcctggtgaaaccggccatacggttccggccggagagccaggggcaggaaaaacggcgttttcatcaaaactgatttttgcccgatcggatgtcactcagcttaagcgggtttacggtgcgatgagtccgggagagcggaataaattactccgaacaattaaagcaaacaccctgttcaggatgaacctgaaaaaataa

SEQ ID NO: 179587 - DNA, 582 bp, Klebsiella oxytoca
atgaaggaattaatgctgttaattcctctgggcagcgctttgctcttaaccgggtgcgcgggcacagagactgaattcgaatgtaatgccacgacatcggatacctgtatgacgatggagcaggcgaatgagaaagcgaaggcccgggaggaaagtgccgcaaagccggctgcggccgggttgccacgactggctgacggcaacttcagaacgccgtcgcaggtatcttacccgctgccgccgcaacccgatctgactctggccagagtggttgaggataaatctcgagcacgtgcagtagcccttactaatccaactgcaaaaaatttagccgcatattttgaaaccgagaaaaggatgcagtcgttgccggtagtgaaaatgtctttaccggtcagtcaggcgacattccgctctccggcgacgctgccgggcaattatccccggccactcaggaagggagaacagacggcctccctctggatagcgccgtatatcgatgctgaagacgtctatcaccagcccaccacggtgttatttgtggtgacgccatcggcatggggtcagccccgaattaactaa

SEQ ID NO: 179588 - DNA, 204 bp, Klebsiella oxytoca
atgattaagtttcaggattttaaaaaagataaaaaaacatctggcgatggggagattgactgcgtccgtaaaatgaatgaatggattgaaaacaagaatattcaggtaatttcagttgaaaccctgaccgaagttactggcgacggtttctctaccgacacctgttttataatgctcaggctctggtataaggaagtctgttaa

SEQ ID NO: 179589 - DNA, 414 bp, Klebsiella oxytoca
atgactgaggtttttaaatatacctggctgcttctgaaagaagagccggtatacatagcattgattttcatgattacgggtaccggggttatttttgcttattttttaaagaatatattcagatctcaaaagagcaggataatctggatgatagcttcattcttaatgtctgtaatggtaagtgttattgcagttgaaccagaggttacatatgtaaaaatccagaaaaaaaagaacgaaatcacttttattcttgagaactgcaaggtctccgcatttgaagcacaacaggcaggattgttcgggacaacaaaagatgcctggtcctgtcctgatgggataacccgctaccttcctgttaagtacaggccagaggctggttcgtctgaaaaaatgcagagtgaattgcactga

SEQ ID NO: 179590 - DNA, 300 bp, Klebsiella oxytoca
atgagtgaattattcaaatggggtctcgcgctggtatttactgtggtcgggtatgctttgttgttatcttctgacagccacgctgtacccgaggcgcaggctcatcactggattaatgactgccggttactggagtcgaatattgacagggggtttctctcttccgcgcaaaaccggcttcagtgtggtgacgttattgaaaatgtcagcaaggctgattatgacagggcgataaatggcgataagcaaataaaaaccatcgcagaattaattgaagaactgttcggcgttaattcataa

SEQ ID NO: 179591 - DNA, 225 bp, Klebsiella oxytoca
atgcataccttcatttttctggtgctgatgaccccggctagtgccggtagtatctggagtatcacacccatgcccaatacggatgtgtgcctcaaaatgctgcgggcagtcgaagcgcgtggaggcaacagaaggttcggaagtaatacgggtgagtgtattgaagttaaaacgcgagaacccctgaacagtacgatggaaacgctgaacggaggcagtcaatga

SEQ ID NO: 179592 - DNA, 405 bp, Klebsiella oxytoca
atgagagcctactaccttgaaggcgataatattgagtggcttattggtgtgtgcctgatcctttttgttatcggtgttgtcggtgctctggccatgtttgttatccctgaaaagattaatctgcgagtctgcagggctaatgtatttttctttagtgcgcttatggcagtggttgcgtttgtcacacttatcgtctttaccagtcggtcattcacgatggatgagctggaagccgggagacactggaaaaatgactgtaaactccttgaggcaaacattccgacgggcgcatttaccgaacctgttaataaactggattgtgccggcgtcatcattaatataccgacggttcagtatgatgagtatatccgccagtgggggttatataagcgtgcaggtaaatag

SEQ ID NO: 179593 - DNA, 660 bp, Klebsiella oxytoca
atggtagcgggccgggataagctggaaaccgcccttacggtagctgttgagcacctgctgttcggtagcgagagaggcctctgcgttgtcggcggtatacgtggtgatgttaaagaagtaggacaccagagaggtctggttggtcgccagacgctggcggatatcgccccactcctgcacttcttttattacgttcggaaaatacttcgcataggaagttttgcttttcttctccacgtccatgaatttcaggttggcttcgttctgggttttcacctggtcctcgaccatcagcgtcagcgtgatgacaaaggggcaggagatggagagctcagggttcagcaggttggcgtagttgtccgccgcggtccagagaaaggcgatttccgggtcacactccaggtggtagttcgtcacccgggtcacgcactctttcccgtcgcgccccaggcggccgattttcaggtgaccggcggtgacctgcatgtcgaagctgtcatccacgcactggtagttcaggtcctgatacgggtccagcttgtacggcacccggtacatctcgtgcgggtccgggttaatcagctcccgcatcagttcgaccagcccggctgcatcgagaatacgcgtcgggatgtaagccccgccgagcgatgcccgtaa

SEQ ID NO: 179594 - DNA, 432 bp, Klebsiella oxytoca
atgtacaaaaaaattttgctgcccgtagacgtttttgaaatggatttaagtgacaaagcggttcgccatgctgagtttttagcatcagcggatgaaggggagattacgctgctcaacgttctgccgaacagcagcagctcaattttacgcggttttgcggccgatatacgtaagtttgaggcctatatgcgtgaggaatcggagaaaaagatgaagacaatatcccgtctgttctccattcccgccgagcggattcattccagagtggtctttggcaacgtgcgcgatgaaattctggcggtgagcggcaatgaggattttgacgttatcgttattggttcccgcaagccgggtatatccactcatcttcttggttcaaacgctgagtcgattttacgtcacgctaaaataccggttctggttgtcaggtaa

SEQ ID NO: 179595 - DNA, 1059 bp, Klebsiella oxytoca
atggcgctaaaactattggcaaataacaatgctaaaagcgtcctcgcgtcaggaattagcgcatctgcgactgttattacagtgagtagcgggacaggtgccttattccctcagcccgtatcaggtcaaagctatttcaaattaaccattgttgatgccgcgactaaattaattacggaaatcatgcatgttacctcagtgtctggtgatgtgatgactgtacagcgaggacaggaaggtaccgcggcaagagtctggtcaacgaatgatattgtggcaaacatgttgactgcaggatcatttctttcctgcctgcaaacctctaataatttttctgaaattacagccgaaggaagtgaggcggtaagacaggccctattaaatctcgggtcatcagatggcacgatcaatggtcgccttatgggcgttccgcgcgttgttacgagcagcggcatgttcacaaaaacacatggcgctaaaaagtggaaaataagaattcttggcggtggcggggggagttcagcggcagcagcaacggcagaaggacaaacatctatgagtaatggtggtggtgccggcgcctacgcagagggaatgtatgatgtatccgcattgacgtcagtaatgatcactattggtcagggcggaaaaggtggcactgcatcatcgctttatggggaggatggagggactagctccgtcggagatcttatcattgcacccggcggaaaagccggattaccggcaggtccggctaaccctccatttcaaccagtggcgaactctaacagtaatgcaccgttgggatggaatatcgttggtgtttctgggcccggagcagaggctgggactgctgtctcaaccgactacacaatcggctcaaggggtgccaatagtcagcttggagttggagcagccgtgcaagccataaacaaccccggcgtaacaggtggcggatatggctcaggtgcatctggctgctcaaatgggccatcacgaccagtgaacccgggggctgcaggttgtggtgggatcgttataatcgaggaatatgcttaa

SEQ ID NO: 179596 - DNA, 603 bp, Klebsiella oxytoca
atgaagagcaatacaggcaatacgaaaaggaatttcttaacgcaaaacgaaattgaggcactgttagccgcagcgaacacaggagctcacgccacacgtaactactgtttgacgttgctgtgctttattcacgggctacgcgccagtgagatctgccgtctgcgggtctcagatatcgatcttcagtcaaaatgtatctacgtccaccggctgaaaagaggattctcgacctcccacccattaattaataaagaaattcaggcattaaaaagctggctgactgttcgggaaacctatccgcaggcagacagcgaatggttatttttgtcacgtaaaggaaatcctttatcgcggcagcagttttatcatgttatctcagtcgcaggtggcaatgccggcctgccaattgaaatccatccgcatatgcttcgccactcatgtggttttgctctggccaacatgggcattgatacccgtctgattcaggactatctcggacatcgaaatattcgccataccgtctggtataccgccagcaatgccggtcgtttctatggtatctgggatagcgcccgcgataaaaaaaggcgagttattttataa

SEQ ID NO: 179597 - DNA, 591 bp, Klebsiella oxytoca
atgaatcgacgtcgttttcttacagctaaagaagttcaggcaatgatgttagctgtacgtcatggccctaccggcgaacgcgattattgccttatcttgctagcgtttcgccatggtatgcgcatcagtgaacttcttgatttgcattatcgggattttgatctcaatgaaggacgcatcaatatccgtcggctgaagaacggcttctccacggtgcatcccttgcgttttgatgaacgtgacgcgcttgaatgctggagccagattcgcgccagttggtatagggcagataaaagcgatgcggtgttcatctcgcgccgcggcacccgactttcccgtcaacaggcttaccgcatcattaaaagcgcaggtatcgctgccggcaccgctacgcctacccatccgcatatgttacgccatgcctgtggttacgaactggcagagagaggagcggatacccgcctgatacaggattatctcggtcatcgtaacattcgccacacagtacgatataccgccagtaacgctgctcgattcgctggattatgggagagaaaaaacttattagctgaaaatttatacaatcaataa

SEQ ID NO: 179598 - DNA, 165 bp, Klebsiella oxytoca
atggtggagggtaatttatttataaatcaggtggttatatttattttgccaaaaaagaacatatttgagttgcagaatgtttcaaaacttttttatcatacggacagtttggtcctaattgacccattcgtttttcaaaaaaaaagaaaaaaatcaataaattag

SEQ ID NO: 179599 - DNA, 549 bp, Klebsiella oxytoca
atgaaaatcaaaacactggctatcgttgctctgtcagctctttccctgagttctaccgttgctctggccgcaaccaccaccgtaaacggcggcaccgtgcattttaaaggggaagtggtcaacgcagcctgtgcggtagatgccggttctctcgatcaaaccgttatgttaggtcaggtgcgttcagcaaaactggctaccgctggcagcaccagctcttccgttggtttcaatatccagctggatgaatgtgacaccaccgttgcaactaaagcgtctgttgcgttctctggtactgcggttaataacaccaatacaaacgtactggcactgcagaactccgctgcgggcagcgcaaccaacgttggcgtacagatcctcgacagcaccggtaccccgctggcactggatggcgcaaccttcagcaaggcgtctaccctgaacgacggcactaacgtcattccgttccaggctcgctactacgcaaccggtgcagccactgccggtatcgctaacgctgacgcgacctttaaagtccagtacgaataa

SEQ ID NO: 179600 - DNA, 540 bp, Klebsiella oxytoca
atgcataaaatgagattaggtttgttcatttttctgctaccgccactcgccctggcgggtaatcggtggaacgtcactttacccggtggaaatatgcgttttcagggagaaattatcgctgaatcctgccgggtagaagccggggataggcagatgatcgtcaatatgggacagatctccagtaaccgatttcactcagccggcgaggataccgcccctgtgtctttcgatattcatctgcaggactgtaataccaccgttagccggcatgttggcgtagcgttcagaggggtcgcagacggtaagaatccagacgtactttcgattggtgaaggaccggggattgctacaggtataggtatcgcgctattcgacaaagataacagcctcataccgctcaatcaccctcccagaaggtggatgcaaatttattccgggcctaccactctccatttcgttgcaaagtatcgggccacaggaaaacaggtgactggtggcgtcgcaaatgcgcaggcctcattttctttaacctatcaataa

SEQ ID NO: 179601 - DNA, 705 bp, Klebsiella oxytoca
gtgaaaaataagctgaaaatgacacgtggcctgctggcaggcatgatgatgactgtcctggcaagttttacttcctccgctgaagcgggcgtggctttaggggcaacccgagttatttatccagctgaactcaaacaggtccagctagccgtcactaataatgacgagaaaagcacctatttgattcagtcatggatcgagaataatgacgggagtaaagatggtcattttgtcatcaccccaccgttattttctatgcaggggaaaaaagaaaatactctgcgaattatcgatgccactaacaatcaattaccgcaggatcgggaaacgcttttctggatcaatgttaaagctattccttcaatggataaatcaaagcttaatgataataccctgcagttggcaattatcagccgtatcaagctctattatcgcccggcaaacctggcgctctcgccagatcaggctgcagaaaaactaacatttcgtcgtaatggaaatgttctcacgcttagcaatccaacgccgtactaccagacggtcaccgagcttaatgctggaaaacgggtactggaaaatgcgctggtgccgcctttaggagagacctccgtcaaattaccgtccgattcaggtagcgaaattacctaccggacaattaatgattatggcgcgctgaccccgaaaatgacgggtaaaacacaataa

SEQ ID NO: 179602 - DNA, 1137 bp, Klebsiella oxytoca
gtgagaccgctacctgactttcctgattatcgcaccgcaaaaccgccagcggcaaaacgctggctgggggccggagcattactggtcctggctgtcggcgctgcgagcgcattattacggggaacagatgcaggctccgggatcgtctttgccgcgatgcttttcacgttaatcttcatggggcttttctggcttctttctctgctttattaccggttttcaattcaccactcgtccacctggaaagcggaggtggcacaggtgcaaagtcactggtggtatcagcatcgtcggcagttttccctggaggatgtggtgctgattggtccagccggggcggagatgatggactggttgcgtttgcttaagcgtgaacaaaaagcgccagcagaacgccaggaggctaacggtaaagcgctgcgtgtggcgcgttctttttcttccgatgcgacggaacgtgaaaatcaactggctcgtatgctggtactacagtggaaaaggcagcgcgaaggcaaaacattgtcctcgccgcagcgctgttattggcagggtagtgagagcgcatggcaggcgtttgttgcacagatgaatgattcttttccgggtattatgttgccagtcgctccgcagaggtggatgggggaaagaacgctctcagatatagccgcgtttctgagttcagataaaaatagcgctcagattctggtcgctggatgccagtctgtgcccgcctcggctgaaagtttattgcctgccggagaagccactgttttatggcttgctggttgtaagggagcggtattcctttcccgcggagaaattttttccccatcagcaacggaatcgctgaaagatgtttgcgaacgtgctcaggagcaaagtgaacttagtgtggccccggacgcctgcattcttttttctcatctgcaacagtctgagcttgctggcagcggctggaacattacccatcatctacaggataaattttggggaaatatgggtcagcttgaagcacttgtcgtgatcgctctggccgctatttttgcacaaactcagtcgcaaccctgtggctggatggcggctgatccttcacatcccctcgctttgggaattattcaccctcatgaagaccaataa

SEQ ID NO: 179603 - DNA, 576 bp, Klebsiella oxytoca
atgctcagggcaaagattccggtcacgaaaataaaagggaaaaatatgagaatttaccttcttgctcttatggcagcggcgacgctgctgacaggctgcgaccggccagcgaaagcggagagtgtcagcggcggtagcggtactatcgaagcgattaaccatacccactgggcgattaatcatttcagcgttgacgggcagtcggggctggacattatcggcccctggcagggcggcggcggcggttgctgctacggcgtaccgacgcaatggcaaccggggatgacggtgaaagtagactggcaaacgggtgttggtgatatggaaggatttccagggtttggagatgataccaaattgtttgcatgggacaaaaaaatgaaggctcagaaccgggaacacagccaaattgtgcctgttcccgattataccggtcaaaagacctgcggaataaaggtccactttttaccctgcgctcaaataaaagtcaccaccagttgctatgactacggcaatcccaattatccgattaaagatccgattaaaatggaggaacccaaagtatgtccacaatga

SEQ ID NO: 179604 - DNA, 2376 bp, Klebsiella oxytoca
atgaaacctgatttagtttggtatcctccgcagtttcctggtaacggacgattacccatacaagcggcgctagtcggtcaaaactggaaacagcaggacagccatgaactggcttaccgtaatgaactttgccaggcggcgggtcggctggtggaaccgccgtgctgtaagacgctgcatatcagcctgtttttcgacggaaccggtaataaccttaacaacgatctttatatcgccgatcctaaacgtcccaccaatattgcccgtctttttcgcgcaaccattggccagggttacgccggtggcgtccagggacatgccggggaactggtggatatggaagggacatcaggtaataaatattacaagtactacatccccggcgtcggcacccccttcccggaagtgtcggatctgaattacagcacgcccggcctggcctttgccacctatggcgaagagcgaattaactgggcgcttattcgcattattgatgccttaagacgcacgctgggcaaacccgcactatccgataatgaaagctggaaagcggtgaaagagatgtccttcggggctttagatcaataccgaccaatcgtattccggcagcttttaaaagatctggaacccgacctgaagctggtgctgaatcagcctgaacccggtaaaccgaaactgctgggaattaagctgtatgtgtacggtttttcacgcggagcggcggcggcaagggcctttgtcaactggctggttgaactgctgcccggcgttttcagaaaaggagcgaagccggatctctgcctgacgctggaaggcgctgactggaaggtgccgctgagcgtcgaatttctgggactgttggatacggtggcctctgttggcgtggcgcatatcgccccccttgcggaaggacatatgggctgggccgataatgcaatggagctgcccgataacggcctgattaaaagttgcgtgcatctggtttctgcccatgaacagcggctctgttttcctctggattcgatttgccgccatgacggaacctatccgtcctatgccaaagagatggtgtatcccggtatgcattcggatattggtggtggttatccgcctggtgatcagggaaaagcagtggcaaataacgacggttatttattatcgcagattgcattgcatgatattcatgctgctgctttttttgccggagcaccacttaaagttttgaaggatacactgcccgatgacctgaaaaaagatacctggcgcatcatgcccgttgaactcagccacgaatttgatattgcaccggatatgatccagcgcttcaacgcctggcgtgaattaacattaaaccttccctcatcttcggaaaacataagtgatgagaatgctgccagatacgaacctgtacgtgcatcagtcaacgttattaccgcgctggaagatcaaatagcctggataaccgcctggcgtatcggtcgctatgcgagcggcaactatacaaaacagcggttttatattgatgcagccgcaaacggcatggataaagatagcgatcccaaaacaagggaaaaatccaaacaggcgcgcgataaaaaacagcaagaagtagagaaaacgcgttgggaaatgcagaagtcctccgaaaaagaatcctatattccctatccgccagggccgaaagattttgatcccgcgctggggcagacgcaactgcgacaggctgcggaagagtttcgcgaggattatcagcacaaaccacgcgccgtaaccggaaactggaaatataagttcacggagaaactgagtaatctggtttatgtcttcagcaacgacgatgcggacggtgaatataaaaagataaagaaagaggccgatggcagagtagcgaagctctttcctccacagggagaaagcagtaacgcacagcagcccggagggctggttagggcgctattcgacgatcagatccatgattccagagcctggtttatgcaggcgacgtttgatgccagagaaccgtggggaagttactttttataccggatgatctatttcggtgaactggtgagtaaaaatattacgcctcttgtcagatatagacgattgaaagatacgcttcctggtgttgattttattgtcgagagatttgagagggttgaaactatttttggtgaaaactccccacctgaaataaaacaaaaaatatccgtagttaacagttcttcggatattccccttaccatgtcgtccgatcttccccttcagcctgcgctgacaaacgaaccagcagaattaatcgcctggcagcaacaatcgcgggaagcggaaaaactggctggtacgaaagccgcaatagcctcactgtggtcatag

SEQ ID NO: 179605 - DNA, 333 bp, Klebsiella oxytoca
atgtattttgatagtgatacaaaacttgttatctctggagtagtaatactgctggctggtctgctctttagtattttatttatcatgatttttctaatactgctggtggtaggcttagtgttatatttaggacgccctccagttattttttattatgtttttcttgtttttattatatgtattgccgggtctttttctgctaagattaaattaaaaaataccagtcaggaattcaaatgcttattatgcaaaaatgttgttaactataaaaacgataagtgcccacattgtggcgctgacatgacttcagaaaagatttggaaaaaagactaa

SEQ ID NO: 179606 - DNA, 2643 bp, Klebsiella oxytoca
atggaaaatcccgccattttgttacgccgacttaacccttactgcgcccgtgcgatggaaggcgctgccaccctgtgccagacccgggcgcacgcggaaatcctgcccgagcactggctgctgaaactgctggagcagggcgagggcgacctgacggtgctggcgcggcgctacgaatgggatatggacgcgatatggcaggatttgctgacctttatggataagctcccccgttcggtgcgcggccgcccgcagctttcagacgctattcagactctgatgcaggaggcctggctgagcgcttcgctggccggggaggagcatatccgtagtatccacctgctgatggcgctggtggataaacagagtctggtgcgctgcgacggcctgtggccgctgctgaccctggcgcagagccagctggcgcgcctgcgtccgctgctggacgcgcagtccgaggaacgcccggaggtgcagcaggaagcagagctggcgcagggcgacgaggtggcgtttgtcggccgtccggttaatgcgggcgtaaaagaaggggatctgaatccggctctgcagaatgcgctggataagttcaccctcgacgtgaccgcccgcgcccgggacggcaaaatcgacccggtgttcggccgtgataatgaaatccgccagatggtggacattctttcccgacgccgcaagaacaacccgatactggtgggcgagccgggtgtcggcaagaccgcgctggtggaaggtctggcgatcagaatcgccgagggcaacgtcccggatgcgctgaaaccggtaagcgtgcgcacccttgacctcggcctgctgcaggccggagcgggggtgaagggagaattcgagcagcggctgaaaaacattatcgacgcggtgcagcagtcgccgctgcctgtgcttctgtttattgatgaggcccacacccttatcggcgcgggtaaccaggcgggcggcgccgatgcggctaacctgctgaaaccggcccttgcccggggcgaactcagaactatcgccgccacaacctggagcgagtacaaacagtattttgagcgcgatgcggcgctggagcggcgcttccagatgatcaaagtcgatgagccggacgacgacaccgcctgcctgatgctcaggggcctgaagtcccgctacgcggagcatcacggggtgcacatcaccgatgaggcggtgcgcgccgccgtcaccctctccagacgctatctgaccggacgccagctgccggacaaggcggtggatttactcgacaccgcctccgcccgcatccgcatgagcctggatacggtgccggcgccgctgactcgactgaaggcgcagctcaccggcctggcgatggaaaagcaggcgctgctggaagatatcgcggcgggcaaccacacccacggcgaacgcctggcggccatcgaacaggacgaagtccgtattatcctgcagctcgacgagctggaaacgcagtatggccaggagctgaagctcacggaaaacctgctcgcctgccgcgccgatctctcccgccacgcggaaatcgcggacctgcaaaaccagcttagtgccgtgcagcaggggaacccgctgctggggctggacgtggacgcgcgcaccgttgccacggtcatcgccgactggacaggcgtgccgctctcgtctctgatgaaggatgagcagacggagctgctgagcctggaacagcagctcggtagacgcgtggtgggccaggacgcggcgctgaacgccatcgcgcagcgtctccgtgccagcaaaaccgggctgacgtcggagaacggcccgcagggcgtgttcctgctgaccgggccgagcggcaccggcaagactgaaaccgcgcttgcccttgctgacgcgctgttcggcggtgagaaatccttaatcactatcaacctctccgaataccaggagccgcacaccgtcagccagctcaagggctccccgccggggtacgtcggctacggccagggcggtatcctcaccgaagcggtcagaaagcgtccgtacagcgtggtgctgctggacgaagtggagaaggcccatcgggacgtgatgaacctgttctaccaggtgtttgaccggggttttatgcgcgacggcgaggggcgggagatcgactttcgcaacacggttattctgatgacctctaacctcggcagcgaccacatcatgcagatgctgggcgaacggccggaggccacggagtccgacctgcatgaactgctgcgtccgctgctgcgcgaccacttccagcccgcgctgctggcgcgcttccagacggtgatctaccgcccgctcacgcgggacgcgatgcgcacgattgtcggtatgaagctcagccaggtgagcaaacgcctcagtcgccactacggcatgaccactatcatcagcgacagcctgtacgacgctctgacggatgcctgcctgctgccggataccggggcgcgcaacgtggacagcctgctcaatcagcagatactgccggcgctgagcctgcagctgttaagccatcaggcggcggggcagaagccgcagcacctgatgatgggccgtgatgaagaggggggaattgtgatggagtttggcgcaggggcgggcgtatga

SEQ ID NO: 179607 - DNA, 492 bp, Klebsiella oxytoca
atggcaattccagtctatctgtggctgaaggacgacggcggcgcggacatcaaaggttccgtggacgtgaaggaccgtgagggcagcatcgaggtggtggcgcaggagcataacctgtacatcccgaccgacaacaacaccgggaagctgaccggcacgcgaatccacacgccgttcctgttcactaaggaaatcgacgcctccagcccgtacctgtacaaggcggtaacaaccggccagacgctgaagtcggcggagttccgctggtacaaaatcaacgacgccggtcaggaagtggagtacttcaacacgaagcttgagaacgtgaaggtggtgaaggtcaacccgctgatgcacgacgtcaaggacccgtcctacgagaagcataaccacctcgagcagattgagctgcgttacgaaaaaatcacctggacctacaaggacggcaacatcattcattccgacagctggaacgaacgcgccaccgcctga

SEQ ID NO: 179608 - DNA, 1689 bp, Klebsiella oxytoca
atgaacgtgcgctatttgcgcctgttatggctctggggcgggatcctggcgctgctgctctgcctgctgtttctgccgctggcctccggcgggcgaattctggccgctgcgctgatactggccgccgttatcgccgggctgattttcgccgggcgcaggcgggaagatccgctggtggataacgcctggctggatgagataccggacgcgccgtatcgcctgccggtggtgctggtctgcggcgatatcgccgggtggccggagagcgggccagtttaccgcacggcacagggctgctggttaaacgtcccgacggctgaactgcagcagacggtacgtattcttctgtggaaacgcccggacctcgtatcgcagctggcggtgatggtcagcgtctgtccgcagctgcaccgtgatgaggcggcgctggcggtcgggctttatgagctgcgctggcagctgagccaggtgcggagcgattgccgccgggcggtgcctttactgttgaacagtaaggtggcgggggcgtctgttccacaaccgctgtggcagacagcgcaggccggggaggccatgcaggtatggctggcggacgatgtgccgtgcagcaccgggacatggctggcgcaaaaggacgggacggaccgcctggctgcgcaggtgaggatgaatacgctggttcgcctgactgaacaaacaatgatggccgcgctgacggcggcgtcggacgatatgtctccggcggacccggcgatggtggtatatcacatgacgccttcgggggcgccggttctggctgatagcctgtggcagcgctggttgtctcaacataccgccctgaattcgctgcccggctggcagcccaatccctcatcagcggatgtcacgctgccgaattttattctgccgctgttgccactgggcgccagcgtgacgccgctcagcagaactttacggcgggcattctgcctgttcacccttgccgccatcatcgcactgtgcgccagcgcgtggaacaaccgccagctgctgcagcgggtggggttcgatattcagcattacgcgcagattgcgatggatgactacgccccgaaagcccgcgccgtgcagatcctgcgcggggatgcgctgcagctggatcggtgggcgcgccacggtgaaccgctggaaatggggctcggcctgtatcacggggagcatttgcgcatgccggtgctggacgccattcgttcctatgtcccggcgcctccgccactgaagcctgccgagaaaaccgcgccgaaaatcatccgcctcgacagcatgtcgctgttcgacaccggcaggtgggcgctgaagcccggctcgacaaagctgctggtgaactcactggtgggcatcaaagcgaagcccggctggctgattgtggtggcgggccataccgacagcaccggcgacgataaatccaaccagatactttcgcttaagcgtgccgaatcggtgcgcgactggatgcgcgacaccggcgacgtgccggagagctgttttgcggtgcagggctacggcgagagccgacccgttgcccccaacgacacggccgaaggccgggcgcttaaccgccgtgtcgaaatcagtctggtgccgcaggcgaatgcctgccagccaccgggcatgacccccgcgccatcgcaggatgatggcgctttttaa

SEQ ID NO: 179609 - DNA, 666 bp, Klebsiella oxytoca
atgaaacaggacataaatatcgacgccctgatggcggacgcgtggctgacggtgacggaactgcggttcggggccagactggccgacggggagggcgaccgcctgtggcgacattgtgtagatcatattgaacaggtgatggcgaagcttgaggctgcggacgtcagcgaggcgagccgtcggcatattctctacgcctggtgtgcgctgctggatgagaccgccaaaggacgcgaaggcgaggatgatgcctgcatcgtctggtatgaccgtccgctgcaggcgaaatactttggtgctctggacgccggagacgcgttgtatgaacggatgcgtcaggttctgcgcgagcccgcgccggatatggcggtgctgacctgtttccaccgggtgctgatgcttggctttaaagggtgttatgccctgaatgagccggcacgtgaccagcttgttcgggtactgaccgagcgcgtgccgccgtttgaaacggaccagagccgtcccgtactggcgggtatctccgggcgcagcggcctggcggacgggttacgtcgctggccggtttgcatcgggctgtcgctggtagcgatcgccgcgctgtggtgggggctgaaccactggcttgattccctgattgcaaccctgctgccgggggccgggaaatga

SEQ ID NO: 179610 - DNA, 1434 bp, Klebsiella oxytoca
atgggctggtcattacccgaggttcccgcgaggccagatatgcaaccctggtcaccctgggtatgcctatcaattactttcgccggtgtatttatcgcgttagttcgggtggtactgcattcaccctccggtagtttaccaacgcttgcaagcggctactggctaccactgaccggatatactttggtgggtgttacaattaccataaccttttatttgttatgctgggaaatacagactttccgcgtccgtaactggaataactggcgacgaaatatgcacctggcctggcaacgtcaagcacacctgcatttatgcgtgaccaggcatgtggtattaaccgcagacccacaattgctttctcgactagcgggtgttgcgtctgaaagcagcgacgaaacatctttattaacattgcttcccgaagaagcttttattcctggtatttcacgctttgaacaactttgtcgtttattaataaaccagattaaaacaatactttctcaggcctatccttcaggtccgttaacggtgataatacagacatctgcttctgataaaaaacaggaaattcagtatttttcccttctctgggaagatgaaaaattgccatggatgccagatattcatgccttatccaattcgtcaatttttaataattggaataaattcctgtctactgctcgttatccattgcttgtactggcgctgcattaccgccagccggaggaagccttagcggaatttgcctgtgcgttgttgctgttgcctgaagcgatgcttaaatcgtcagaacagcgcgatgcggtgcgagtatttcgcgccatgccgctgaatactggtgcattgccccgcgagctggctgaattgcgcgatatggcgcagcagccttctggtgtaaaacatctggtctggcacagcgggttatctacgtcgtccgcacaggcgctggggcgggtggttaatgagttacctctgcccctgcatactgatattgcagccggtggcattatcgattttgcgaaagtcagcgcagactacgggcatctggcgggatggctgatggtagctgcagcagcagagatggtcaattacggtccgggaagccactggctgctacaggctgatgacaaacgggccggcgcaatggtcgtcggcaataatctgccggttatctgtgatgaagatgtgaacatactcccgttgccttatccggcgggttcactctgccttgccgtattgctcaacgtggcggcttttgggggcgttgcccgtttttttccggactggctgttctcctggtgcggcgtgctcagtatgttactgtcgctggcagtcactctacccggtgctgttttcctgctgcgccgcgccctcactgctctgcaacgcccccactttattcaggctgccggacttgcccgcaaggaataa

SEQ ID NO: 179611 - DNA, 261 bp, Klebsiella oxytoca
atgggaaagaaaatagttgttcttggcgatgctacctcgcatggaggaaaagtagtctctgtatcatctacttttgaaattgaaggtaaaaatgttgcactgctgaatgattcggtgtcctgtccggaacacggttctaatccgatagtggaatgcgatatgagttatgaggaaaacggtaggggaattgtggcgcatggttgtaagagcgcctgtggttccgtgatctacgctagtttgccggatgtggagataggttga

SEQ ID NO: 179612 - DNA, 1968 bp, Klebsiella oxytoca
atggtacataagactgagccagttagagagttagagattaaatatgatgataatggccatccttcttggtgttcttttccatcgcataagaatgttcaggttcgtggagcttgcgatgtgccacctcatctgcctgggcttataatacttgtccatggtgttaactccacaggtgaatggtatcaaaaagcagagtctgcattatgtgcaggattgaataaacgccttggacttgaaggcactaattttgagttaaaggctaacatatatagtggggatgacaagatagaattagatgagaaaggcgtcgaaaaaagaactccaatgtctccattagtagaaaggaaattagtcactgacactggccggtcacctgtaattcgattttattggggctattcatcaccattaggtgacgaagataagtttgttattcctttggtaagtattaagggtgatgactatcatcagatgaagcgagatggcatcccattgtatgatattttgaaaaaaggtccttatatatggggcggcggtccctttcaaaatggcacgaataatcttcattcactttggagtaaaaaaggattcaatgaagatttagccaatatacctggtgcaaaagttcaatatggtaatgaagacaaagatcgcttactaaccacagcaccaccacgaaactattatgctcatgccgcgaagcggttagctgatttattggatcttattcgagagaaatatcctaaggatacagtcaccataatttcacatagccaaggaactatggtttcaatggctgctactgcactggcaaataaagcacctgatgctctatttataatgaattcaccttatgcccttcataatagtcaattgaatgccttttcaatgcctcctgaagaatgtatttctccatctggtcgagaaagtactctgtcagcaataattgataaagttgcacttcaatcaacacatttatcttcgttaggctatgaggggttgtgtgtaggtcaatcacaggataataaaaactggaagcccgatataactcttgtagcttctgacaaaaatgaaacgagaaatatcccggaaagagataatcacgggaggacttatgtttatttcaatccacatgacagagttatgggttccctccctctgcattcggtagggtggcaaggtttcccaaatgatgaaaaagggaatcctcatccacttatcacccagcataaggggtatttattccagcgaatgcttgccagaaatacaccttgtggtatagctcccgagtcaaaaactccatttggtcgattgccagatggtaaacccttttgggatgatgaaggagatgaataccagagcagtggttttgtgtacccagatccacctcactggcaaactgtatttattaatgccgaggaagtccctgagccaattaaggaaaatgaactaagtgatttcgataaaacaagagttggtgctgagcatggcccacaggaaaaaaacggttggggagagcgtgatcctaaaactggttataagaatgacgatacttacgataatttcattaatttgtatcccgatcaggatatcgttattggtgtcaaaaaacaatcggaatatggtacttacggtagcgtaactccagtaacccgtaaggagacgtttgacgaaaaagatcgcaggatacgttcatatgtcgcacaacctacagatcatagtaccttacccagtaatttaaattttatggcacgagtcgttgcttatgatttacccattggttactgtgaatcgggttgggatagggcttttatcactgatctacgccgtcgagcagactggactcagggactggatacatatttaaaaaccggaattccaaacaatgttactgagccagaaataatcagcacagaaacagcattggaagaaatgattcgtgtgaagaccaaagaatacggatattga

SEQ ID NO: 179613 - DNA, 1557 bp, Klebsiella oxytoca
atgagaattaaaaagcctcaccttcgtccgatagtcataaccttgtccgttggtgggattttgttaacttctatttttctgattgccgttattatggtttttcagcgcgaaaatatagaaaaagatttgcttgatgctaattcatcgtacgctatgaaaatgtcagatgtaatgagtggttatattgaaatggctcaaggtgaattagcatatggagcaaaaaaaataaaatcaactaatgatattgactcacttaaagatgaggcggataggttaagattgcagtctggtatgtttaattcagtttttgttgttagtaatgatgctgttgttctggcgacttcgccagaatctcttgatttagttggtacccgcttgaattcaagtgccagcaaattggcgattgaggaaaagaaaccattcatatcttcaccgttcaaatcagttactgggaatttgattattttgttgtcacatcctatttatgataagaatggcaattacatagggcatgtcggtgggtctatagatctaaaaaaacatagtttatttagcgatgttttgagcaggcattttttcaagagcgacactgaaattagcattgttagtgatgatggaactgtgatctttaataacgataacagtgctgttggtcggcccatggttatgtctgatgatttgaaatcaaagttaacggagtctgatagaggtgagggggaattttttttttcggggaatagatatcttctgggttatgctcatatgaaaaatactgcttggaatgtgttggtttatagccatgctgacagcgcgactactattcttattacttatgctaaaagtgtacttgttctgctaattgtaataattattacattttcacttctttcatatttcattgcctcccgtatttcacttcctttagaaaagcttgctatatctaccaatgctaaagatataggggcttcgttagtttatattaaagctatcaatgcttggtatgccgaagctgatcgacttaaaaaggcactttttacgcatgttaaggtaatgatggaaagggttgattctttaaatgaggtggcgcttaaagatccccttaccggcgtgaacaatagattggggttttcaactaaaatacagaataacaagtatggggcaggagcttcagttattgctattgatgttgatttttttaaaaaaataaatgatagtttcgggcatggggtcggagatgaggtgcttgtttctttggctcagattattaagtcttgttgccgtagtgaagatattatttgtcggtttggtggagaagagtttgttgtttttctgccgaatacatctgtggtaacagcggagtgtgttgcggagcgtattaggagtgttattgaacgtactgttttccctaataacttgcgtgtcaccgtatctgctggtgtggcaacacaagatgatcctcttggtgggatcgattttttgctgaaaaatgctgacgatgctctttatcaagctaagagagaggggcgtaataaagtgattgtatatagcgctatttga

SEQ ID NO: 179614 - DNA, 216 bp, Klebsiella oxytoca
atgacggaactggaaaaacaattgctgagcgcgttagagcagctacagcaggactactcgagaaggctggacgagtgggagagcgccttcgaggaatggcggaagatgtctggtcttatgcaacgggagaacgcggcgctgagcgagcgcgtgtcgggcttgagcaggcaggtgcagagtttgagcgagcagctgcgccggttatcgacaggctga

SEQ ID NO: 179615 - DNA, 498 bp, Klebsiella oxytoca
atgagcagtcttttaacggcctcgagggacttcgaggagaaatcgaaagcacagcagcagcttaccgaagagaggctgaaagccgcattcagcaagcacgagaacgttgtcaaatcggaactgaacgcaagcgcgaagagaatcaacgacgccatcagcgcccacgaacaggggatgaacgcggcgatgcagtcgaaccggctgagcgtgctgcgaatggtcgggcggacgtggctgaccatcaccatggtgtcagggctgctgttcgccagcctgagcggggtgctgtggtaccaggggaaccggatagcggcgaacctggcggaaatcaggcagcagagagatacgctgtcgaaactgcagatgcagacgtggggcgtgacctatctggagaaccgcaacggacggtttctggtgctgccggaggggatgaaagccgaaacgggccggacggtggacaacaagacgcggaacgcggtgaagctggtacgggagtag

SEQ ID NO: 179616 - DNA, 321 bp, Klebsiella oxytoca
atgctcacgatgtgggtgacggaagacgaacaccggcggttgcttgagcggtgcgacggaaaacaactggcggcgtggatgcgccagacctgccttgatgagaaaccgacacgcgccggcaggctcccctcgatttcgccggcgctgctgcgtcagcttgctggcatgggcaataacctgaaccagatcgcccggaaagtgaacgccggtggtgccggtcatgaccgggtgcagatcgtggcagcgctgatggcgatcgatgccggtctagaacggttgcggcatgccgtactggaaaaagggccggacgatgattgttaa

SEQ ID NO: 179617 - DNA, 1404 bp, Klebsiella oxytoca; identical to SEQ ID NO: 101449

SEQ ID NO: 179618 - DNA, 867 bp, Klebsiella oxytoca
atggcaatgaggcggacttactcacaggttaaatttgttaactgggtagtgttttttcttagtgtcgtaatatctgtcgctattgtaatatttactacagtgataaagaaaatggggctattccctcatttgactatagctccttatctcggttattacggtataatcgtgttggtcatcacaattattttttccacaatgatttcctcaatgaaaaaatgtgcagccactattcaggaaatgtttgactgtgatgtcttacacattccatggagtgaattaaaagtagggaagccggttggcagagaaaatgtctttaaggcttcaaggtattacaaaaaaagaaacaaaaatgatgaatttattaactggtatctaaataaagattacgatgctaatgaaaacgtattggcattattatgccatgcgaaaaattttggctgggataaggcacagcgcgatgtaatgagcaaaatatattttatcactatgttactttcctttttggtacttctagcatatggtttatggtctaaatcctcgctggaagattttttgttttatattgttttcatgctcccgttttttagacatgtgataatgttatacgttgaaaacaacaaatctattaatcgaattatgcgtgttaaagattttattgagaaaaaaatacagaatataaagataagtggcattataaacgatgacatcttatctcatgatttaagatcgattcaggatgaggtttatgcccatcgatcgacctcgaatcctgtgcccaattgtctccacagattcatgcggaagaataatgaggctatttatgatgattattttgaagagaacttgaaaattttaccccgatag

SEQ ID NO: 179619 - DNA, 999 bp, Klebsiella oxytoca; identical to SEQ ID NO: 101451

SEQ ID NO: 179620 - DNA, 567 bp, Klebsiella oxytoca
atggcgagagccagcaagcgcctcgaagtgcttgaagccattgtgagcatcatcgagcgtgacggcctcaccgccgtcaccctcgacgccgtagcgctcgaaaccggcatgacacgcgccggccttctgtatcatttcccgtcgcgcgaagccctgatcctcgccacccatgagcatctgactcgctcatgggaacaggagctggaagcgagcgccggcaacacctcggacagggcgacagacgccgaacgacacgccgcctacatcaacacctgcgcaagagctgcccggcgggtcgaactgctgctcatgctggaaagctccgacaatcggcagcttggcgatctgtggcaacaggtcatcgaccgctgggcacctcctgcgccgattggaaacgacgctgccgagttggacaggttcatttcgcgccttgccgccgatgggctgtggattcacgaggcgctgtcgtcgcgcccgctccccgagcaactgcgcaagcgtatcgcggcgcgcctcgtcgcgatggccgccggacctgttgaggcggaagaaaacctcccgaaataa

SEQ ID NO: 179621 - DNA, 1512 bp, Klebsiella oxytoca
atgcctgccgcccactcgaaccgctgggttcttctggtgaccgtcgccgccggtctcctgcttatcgttctggacaattcggccctctacacggccctgcctaccctgacgcgcgagcttggcgcgacggcaacgcaagggttgtggatcatcaacgcataccccctcgtcatggccggcctgctgctcggcaccgggacgctgggtgacaggatcggtcaccggcgcatgttcctcatcggcctcgtgctgttcggtgtcgcgtcgattgtggcggcctattcgcctacagcggaaatcctgatcggggcgcgggcctttctggcggtcggcgcggcggcgatgatgcccgcgacactcgccctcatccgcgtcaccttcgaggatgaccgggaacgcaacatcgccattgcgatctgggggtcgttgtcggtcgtcggcgctgcgctcggaccgatcatcggcggttttctgctcggccatttctggtgggggtcggtgttcctcatcaatgtgccggtagtggtcgctgccttcatttcggcgctgatcgttgcgccgaaggtggccggcgatgcgaccaagccttgggacgtggtgtcgtcgtttcaggcattggtggcgctgtcggcttttgtgatcgcgatcaaggaatctgcccatgccgggcagtcgtgggccgtccccgctatttcgctgctggttgccatcctcgccggagcgctgttcgtccgccggcaactgcgcctgccgttcccgctgctcgacttctcgatcttccgcaatgccgcgttcacatcgggcgttctagcggccgcgttctccctgttcgccatcggcggtgttgagcttgctacgacgcaacgcttccagctcgttgcgggcttcacgccgctggaagccgggatgctggtttcggcggcggcgctcggatcattgccgactgcgctgctcggtggtgcattcctgcatcgtattggcctacgtatccttatagctggcgggcttgcggcgggatcgctggcggtcctgcttgcgacatggggcatcactcatggccttggctggctgatcgccggtctggcgctgaccggtgccggcgtaggtgcaacaatgtcggtggcatcaacggctattgtgggcaatgtgcctgtgcatcgcgccggcatggcgtcgtcggtcgaggaagtgtcctacgagtttggcagtctgttcgctgtcacaattctcggaagtcttttggcctacctctatacggtcaacgtcgtgttccccgccggaacctcggaagcggcccgcgacagcatggcgtcggcgctggtctttgccaacgaggcgggggccgatggtgttgtcgtgcgtcaagcggcaggaatcgcattcgaccacgcctatacggtcgtcatgtacgtggcggcgggtgttctggccgtgggtgccctgatcaccggcatcctgttgcggcgctacggtcccggctcgcaatcgtcagcctatcccacacaacactaa

SEQ ID NO: 179622 - DNA, 660 bp, Klebsiella oxytoca
ttgagcatcaccccggcagcaatcgccgagccaatcacccccgccacgttcgggcccatcgcgtgcatcagcaggaagttctgcgcgtccgactccagacccaccttgtttgacaccctggccgccatcggcaccgccgacaccccggccgagccaatcagcgggttgattttgttccggctgcacaggttcagcagcttcgccatcagcacccccgccgccgtccccacgcagaacgcaatcacccccagcaccagaatgcccagggtctgcggctgcaggaacttgtccgccaccagcttggcccccaccgacagcccgaggaaaatggtcacgatatttatcagcccgttctgcaccgtgtcgctcaggcgctccaccaccccgctctcgcgcatcaggttgccgaagcagaacatccccagcagcggcgccgcgtccggcagcagcagcgccaccagcagcagcagcaccgccggaaagaggattttttcccgcttactcaccgtgcgcagctgcaccatgcggattttccgctccttctcgctggtcagcgccttcataatcggcggctggattaacggcaccagcgccatatacgagtacgccgccaccgcgatggccccgagtaattccggcgccagcttgcccgacagataa

SEQ ID NO: 179623 - DNA, 1476 bp, Klebsiella oxytoca
atgcttagaaaaataatcaggggtagcggattcactcagtcagaagaaaaactgatagagttcgctgatgatgctttttttggtctttggtcttatcctaatgtttatagcgatgagggttactctaaaaataaaattgggaaagaagttagtgacttattagttatttttgataaagatataataattttttccgataaagctattacatacaataaaaacaaagatcctaaggttgcatggcagagatggtttaaaaaatcagtcatacagtcttgcacacagttatttggcgcagagaagtttataaaagatcatcccgaaagactttttgttgacaaagaatgctcagttaacctccccattaaaatagataattcatttaattttcatttggtggccgtcactaataatatttcagatccggcgatctcgtactttgacaaaatagaaaaaggcagctctgctactttagttaacatatttcctttaaacgcccatcagtgtctagaaaatccattttgtgtcggagacgtttatcctgataagacttttgtccatatacttgatgagactgccctaaaactactgttaaccgagttaaacacagcaactgatttcattggctaccttaacgaaaaagagagggttgtaagagaaagaacattattggtcagcgctggggaagaagagactcttgctgcttacattatgggtgataaaaccataatatcaaaagaaattattggaaacgatcaagggatgaccataccggaaggtgaatggaaaaactataaaaccactttcaattatcaatatcagctctcaatgaaaaagggtagcgttttctgggataacctaatccacaacttctcgacaagtatattgtcagctaacgttggtttttttagtgaaattgaattttctacacatgaattaggtgttagagaattagccaaagaaagtaggcaatctagatattacatttcaaagaactttaaagagaaattaaaaacaactcagcctcatctaagaacgtcaagaatggtcgaatcaatcgatgagcctggaaagttttacttattccttttttttcctaacgatagcaagttgagttactctgattacagaattcaacgtatatcttatataaatgcttatgctgaggttgcctttaataaatacagacatattaaaaaattaattactattgcaacagagccgcaaaatacagaaggaagatctgaagacctaatatatagcatatccccagagaaatttaccaaagagcaaaatgaaaaagccaaaagattatcaagagaatacaaaatactaagtgattttttacctactaaaacgacaaagagcgataactttaaatcagttatatcaaaaggtgaaaaaatagggcggaatacaccttgtccatgtggctccggtgttaaatttaaaaagtgccatggtgcgaataattag

SEQ ID NO: 179624 - DNA, 396 bp, Klebsiella oxytoca
gtgcagatctgcctgcacgcctggctgaacgaacgcggccatattgccaaccaggaagatgaaggcgtgctggcgcagatcaagcggttcatcaccgcgcaccagtacagccgctttgcctcgtgggatggcccggaccgcccgctgaatatggtgggctttcgccgggtggaaaaagatccgctgacgggtgaagagcacacactgtttcacatcctgccggagggctggcgggaaatgtgccggggattcagtcccgccagagcggcgagattatgccaggaagcagaatgcctgctacccggcagcgacgggaaataccagtcgcaggttcgcctgccggagatcggcaaagccagggtctaccggctcacctcccgcattctcaatatctga

SEQ ID NO: 179625 - DNA, 237 bp, Klebsiella oxytoca
atgattttttcgccctttaagggcaggcccgttccccttattctcccttcctttcagcctttgccgtttcagccccttttcgccattttcagttcttctgtttttgaggtggtacaggtgggacaagtggtacaaccgcgccagccgtggctttgcgctgtaccacctgaaaaatgccagtcggaaaagtgggacagcttcagcaacggctgtcccatcctgtaccactttttttaa

SEQ ID NO: 179626 - DNA, 258 bp, Klebsiella oxytoca
atgatccccaagagactaaaagaagctcgtttgcgagcaaagctgacccaggaaaagcttggtgtactcgctggcatagaagaggctacagcttactcacgtttgtcacactatgagaatggtacgcataaaccgacgtttgagttagtgtgtgaatttgcgcgagtgctggatgtaccagaatgctatttttatacggttgatgataggtttgcagaagcagtgcttaatctatatgtacactacaaaaaaagctga

SEQ ID NO: 179627 - DNA, 273 bp, Klebsiella oxytoca
atggttccgaagcgtcttaggattgcgagagagttagccgatatgtcacaagaggaattggctattgcagcaggcgtttcagaagaaacgggctattcgcgaatgtcccattacgaaaatggtaggcataaacctaaattcgaactggtttgtcgatttgctgaagttctcaatttacctgaaggttacttctacacgctggatgacagctttgctgatgcaatgctgaagctacataggggaaaacgggtgcagtggaaaaggtgtatataa

SEQ ID NO: 179628 - DNA, 276 bp, Klebsiella oxytoca
atggctaaaaaagactggcaccccgccgacatcgttgccgccttacacaagcgcggtaccagtctggcgaaactatcgcgggaagcgggactggcctcgtcaacgctgtcgaataccctgacgcgcccgtggccgaaaggcgagtggctgattgccatcgcgctcgacgtgcatccgtcagcgatctggccggagcgttacctcaacgccaataacaaacgtgagccccgtaaaccgcttcaccccatgacaacaaccgataactccgggacataa

SEQ ID NO: 179629 - DNA, 213 bp, Klebsiella oxytoca
atggaggcctcctgtactcagtgcgaggatgttgggttgtggttcggtgtgcataaacaactctcctgtcaggtgtcgttggttaatgcgtcctgccactcacagcgcgggtcgttatgtcccggagttatcggttgttgtcatggggtgaagcggtttacggggctcacgtttgttattggcgttgaggtaacgctccggccagatcgctga

SEQ ID NO: 179630 - DNA, 1875 bp, Klebsiella oxytoca
atggactcactggcggcaggggtctctaaaaaatacaacatccgggtttacacggtgcgccagcgatacagcatctattcccgcgcagtacgggagtcctctacctccctgcgtgtcagtgcagatgatggcaccacactgacattcgacagctatcgcaactggctaccgtacaagctggggtcaggaggaaaagactacacctcgatcgcggaatttgttctgacgcgacgcgcgggggctggcggggctgcgaccgatttctcggcgatggccactaacgacccgaccgcatcctatcgcatcgtttctgatggcccggtgtttaccgaggttgaaactatcagctacagccagatttcagcaacgtacccggagttttccagccagtttctcaaattcacgacgaggacaaaggttttccagaacggcatgattaaaactgaaaacgttatggcggtggataaagcgatcccggcagatgtgcttttcggtgttcgtatgcgtatgaacctgatttccaccgcagccaaaacgacaaaagcgaaccacaatgttttgtggtccgacaactcagcaaaacagagcctgtcgctgatttacgctaacggtaacgcccgtcgcgatacgacagaaaccatgcctgtttacaacgttgcgtccgccactaccggtaacacctcctatgcaaggcaggatggcggagcggtatcgcctttcaccacgaccggggcagtcccgcagggctgggcgtggagtaacggcttcctgattaacgtcaaagagcaggcagctaataacgacgaccttgctaatcgcgttcagaatccgccggtgggatttgtggctcgtaatacaaccacgcagtacgcccgcacccgtgcactgatgaaccacatcggggatattgtcgagggatacaccgactggtgggacaatgaggccactgccacggatacgggcaacggcgtcatcaacaccctgggcggtaaaattgtcgccatggtgagaagcggcaagggggattttaactccgtatacgctctctttgaggcgcacgctgatgcgcattacggtggcgtgacgaatatcaacatcggggaagcggttgacctgaaagggctacagtttatttcccgcactatcacgccggtggtgtggtggctgtataaactggcggtgaaaaacggcgatacggcaaaacaggcagcgctgaaaacggcaatcggcaatctggcgaatacggcaaaaatccagtacggcggcacacagaacggcaacagcaacttttatgcggctgctttccgtttgtgggcgatggccttcgcggttggtctggatacagacggcagctacaagaccaacatggaccgcatcgacacgctgtacaccgatgctaccgcgaccggatttgccaacgtgaaaaacatcatcacggacaacaaaaacgagtcggtatcggctgcgcggtatctggcctaccagtcctacgcgatgaacaactatgtgctgggttgccgggcggccgggcgcacaccagtagtcgatatgacaacgacctggctgaacgcgatttcagccgccggcggtctgtcagagtttgactattgcatcgcagagtcaagacgcgggacgcctaccacagtggcgtttttcccgtctctgctggcgttcagcggtgacctttctacagttgaggcatgccatcgactgctggacgggttcgatgaatacgccagcggatggaacgggattgagtacaggctgtgggatctggaataccaggtggttcgtcagacctctttttcagagttcggattcatggtgaacgttttcactgatgcgtacatggaatggtggtttctgaataactga

SEQ ID NO: 179631 - DNA, 492 bp, Klebsiella oxytoca
atggctgatacgttccagaatgaggtgcccaaggcacgcattaatttaaagctggctctgcacacaggaggcgcgcagaagaaagtcgagctgccgctgaaactcctcaccatcggtgatttcagtaatggcaaagaagaccggccattatcggaaagagcaaaaatcaacgtcaataaaaataacttcaacagcgtactttcggaattcagcccggaaatcagcctcacggtacagaacacgctggccggcgatagcgccgaagaaaatattcagctccgcttcgccgatatgaaagatttcgaaccggagcaggtggcccgccagatcccccagctccgcgccatgctggcgatgcgtaatttattacgcgacctcaaatccaacctgcttgataacgccactttcagaaaagagcttgagaaaatcctgaaagatccggcgctgacgcaggaattacgcgacgaaatgagcgcgctggccccgaaataa

SEQ ID NO: 179632 - DNA, 888 bp, Klebsiella oxytoca
gtggtccgggcctttcacctgctcgacgtagttgaagctgcgcaccggcacggtgtccggtccatacggcaggcggcccagcacgcgcggcatcaccaggccgatatagcgcgcgtcgtcggtgtcgcggaaggatttccatttgatgtactcggcgcggtcgaagtagttgccgatatccttgatggcggcaacctcttccatggactctttcagaaagaaggccgggcccacggcgccgataaacggcatatgggccgcggcggagacgccggagatgctgcgcagcagcgccacgtcctgcgggctggcgtcgaactcatacgcggagatcaccgagccaatcggctcgccgcccggggtgtcgtactcggcggtgtaggtgtgccagtagaggccgctctgaatcagctccggcgcgtcttcgaagtcctggcgcagatcgtctttggagacgtccagaatttcggttttgacgttctggcggtagtcggtgctgtccaccagctgcttcaggccgcgccacagggattccaccttctggaactcaggatggtgcatcaccgcgtccagctggcggctgatttgataatccagctcagcgatatggtggtcaatcagggtcttgtcgagcttctccacggtctttccggactgacggatgcagtccataaatacctgcatcgccgccgtcagtcgttcgcccgccggggcgtcggacagcgcggcatcatccagaaagtcgttaatatcgcccaggcgggacgccggggtcaggttgattttgtcaaacagggaggcgtaaacgctctctttttccagtacagcggtctgcccctgcgcgggggcggtttcagtatttacagacatcagcatattcccggttaa

SEQ ID NO: 179633 - DNA, 1044 bp, Klebsiella oxytoca
atgcacgtaatcggaactaaacctttcgctctgtacaacgaaatagacccattcgcggcgcagtggctgcgtaacctcatagccgccgggcatatcgccccgggcgaagttgacgaacggagtattgaagatgtcagacctgacgacctcagaggatttacccagtgtcattttttcgccgggatcggcgtctggtctcattccctccgcctcgccggatggcctgacgatcgcccggtctggactggttcctgcccgtgccagcctttcagcgcggcaggcaaaggagatgggtttgctgacgagcggcacctttggccccactttttccatctcatcagcgagtgcagacctcagcatgtctttggcgaacaggttgcaagcggtaacgcaagcacatggttcgaccttgtacaagcagacctggaaggagtgggatacgccttcgggcttgtgccgtttacgtcagcgggcgtcggtgcgccgcacatcagagagcgggcctactgggtggccaacgccaacagcgtcatcagtgaccggcgcgggaacgtccgggcgccagggcgggatgaatattcaaacggcggcgatgatgtccggctggccgacgccggtggcgaatacaaaggatcagccagaaacaaagagggggctggagaatcttgccgggctggtaaagatggcgggctgggtaacgccaatgtcgcgcgactggaaggactcggcgggaatgactgcgcagcggaacgggaaagagcgactggaccaactgcctcggcaggcttacacggcaggccccttgaggttaacggtttttggcgagatgcggactggctcttatgtcgagatggcaaatggcgtccagttgaacccggcacattcccgctggttgatggggctgccgcacgcatgggacgagtcgagcccggggtggcaagagtggcaagcagcaaccgcgtcggccgactcaaaggctacggaaacgctataaacgcccaggctgcggcgactttcattcgcgcttatatgggggtcgcatga

SEQ ID NO: 179634 - DNA, 306 bp, Klebsiella oxytoca
atgaacggtggcaaccacacccgcgccaataccgaagacgtgctgatcgccacccgcggcgccggactggaacgcatgagcgccggtatcaagcaggtagtttacagcccgctcggcgcgcatagcgagaagccgtgggaagttcgccaccgcctggagctgctatacggcgacgtgccgcggattgagttattcagtcgcagcgcagcgccaggctggagccactggggcaaccagtgcggcaccgcttcggttgagctgatccctggatgcgccattgacgttgtgaagacggaggcagcatga

SEQ ID NO: 179635 - DNA, 339 bp, Klebsiella oxytoca
atgaatacccgcatcgtccattccatatcgtccgttctgcgtactgacggctttgtgcgcaacattcactcccgtaacccgtttgatgtcattcgcgcggatgtggtgctggcacgcatggaaaaacaggctaatcgcgcgtgtggtctgcactacgagatttatgagtcccgtctgttggggatggccatgcattacctgacagatctgccactgaaagaccgtccggtattcatcggcgctgcggctcaacggggttacatgctgacggtagcagaagaagaacgcgctcatggtgaatgtgccgacctgatgaacgaactggcggcagattactga

SEQ ID NO: 179636 - DNA, 348 bp, Klebsiella oxytoca
atgcacttacacctcaccgaatcctcagcacgtccgggaatgcaggtcacagcagaggcggagcgtgaatactggctgagccgccagaaagcggcagtgaaagcgcccgctgaaatcgacgttcacgctttccatgatgcgctgggcctgatgtacccgctcaactggtcaacgagtgagagcggtggctgggagacgttcatgctgcaggagatggtctgcggtgacgtgacagagatttatgcccgctgcggagccagatatttccggctgcgggatgtgtgcaacctgagccatgcgcagattaaaacgcgcattaaggaggaatttaacctgacgcagaaatga

SEQ ID NO: 179637 - DNA, 231 bp, Klebsiella oxytoca
atgaacctttctattctttcaccttccactgaggctgtaaagccccgccgtcaccagcgcattttgcgggctgacatcgccgcgcgggagattgacccggcgctcaaagccttcggacggcatattgcccggagcattcgcaaggggcgtggcgtccatatcccggcgatgaacaacaccgctttcgggcaggtactccgcacgcttgaactcaaacgcgcatgtaactga

SEQ ID NO: 179638 - DNA, 408 bp, Klebsiella oxytoca
atggacaaaacagaaagcaagaatcgcgaagaagatcacaaaatccagtttggcagacgcctggcgcaggccatgctgctgacaaagcatactaatgcctcattggcccaaaagattggggtcagtgaaccaatggttaagaagtatgtggatgggcaaaatcttcctaaggctgatgtgttgcttaagatcgcccgtgcgacaggtatcagtacggcatggttacttgaagagcaggaagatactcaagcaccggaagactctgctgaaaaagatcttgaatttctaaacgacatgttcaaattcttatcggctatgcaacgtaaaatagtcctgaaacaagtatctgaaacggtaacgaagttgcttgaacaggaagaaaaatacctcgcgaagaagcaggattga

SEQ ID NO: 179639 - DNA, 225 bp, Klebsiella oxytoca
atgacaggcgtaagcgtctggggctccggtaatggcgataaacagctatggctcatactgctttctttgttatccccgcttgtggcgtgtttttgtgaactgagcggttttcagggcgagcggatgcgtggcaattcagccctgagtatgcgatgctcagcagttgggtttgcagagggtgatagtctgcaatttgtacagattactataacacaagaaagttaa

SEQ ID NO: 179640 - DNA, 522 bp, Klebsiella oxytoca
atgagtaagtattctctcagctttaagcttaaggttgtgcagcactatctttccggtctggaagggcagcaaacgactgcaaagcgttttggtatcgatcatagtgccgttcgtaagtggactgctgcctggaagcttcatggcgaagccggactgacagcccggcatttcacttattctcctgcctttaaagagtccgttatcttgcatatgcgtgaacaccggctgtctgttcgcgaagtctgtgcaaaatttactatccctgccttttccactgtttgtcagtgggaacgactgtatgatgaaggaggattagaagctcttacagacagccgacgcaggaaaaaaatgatgccagaacgccctgaaaatcatccagtccctcctttgcagactcctcttgacccggatgaacgagaggagcttgaacaactgcgtgctgaagtggcatatctaaaaaagcttcaggccttactcagggaaagaagcacgtcaaaacgcgggataaagcgcaggtcgtga

SEQ ID NO: 179641 - DNA, 840 bp, Klebsiella oxytoca
gtgaatgagttaaggcaggagttccctcttgcgcgcttgttgaaagcggcagggctggcaaaaagcacgttctactggcaactggccagcggtaaaaaaccagacaaatatgccggtgataagcagcggatttcaacgctgtttcataaacataaaggacgttatggatacaggcggatcacgctggcgggccgtcgggaaggtagcttactgaaccataaaacggttcagaggctaatgaaggagttagatttaaccagctgtatcagaaggaagaaatacaactcttacagaggccggtacggaaaagttgcgggtaatgtgctgaaccggcagttcagagcggataagcccaaccagaagtgggtaacagatgtcacagaatttaaaatcaacggagaaaagctgtatctgtctccggttctggatctgtataacggagaaatagtggcgtatcagatggagtgccgtcctcttctgtcgctggtggatgacatgctgtcgaaggctgtatctgtactgggtaaaggcgaatatccgctgctccactcagatcagggctggcaatatcagatggtgcattatcagaaccggcttaaggaggctggtctgaaacagagcatgtcaaggaaggggaactgtcatgacaacgcagtgatggaaagcttcttcggcacgctgaaatctgagtgtttttacctcacggaacacaagaatatcagcgagttacgcatggctatcgatgaatacatccactattacaaccatgaaagaataaaacagaaactgaaaggcctgagtccggtagaataccgaactcaggccctgatagccgcttga

SEQ ID NO: 179642 - DNA, 954 bp, Klebsiella oxytoca
gtggccgggctcatcgccgcggccgtttcagggctactgtaccaggtgtcgctctggctggtcggcatgccggtactgtcagtgggtgtactgcttgccgggcgcgcgatccttggcggggcggaaagcttcatcattaccggcgccgtggcatggggtctggccctcgtggataaagagcacgcaggtaaggttatcgcctgggtgggcaccgcaatgtttgctgctatggcactcggcgggccggtgggcacgatgttgtttgatgccttcggctttgaggcgatcgcactactgacgctcctgcttccgctgctggtactggcatatctcgcccgcatgcccgcggtagcgccccatccccatgccgcacaggcaacctttggctcagtcatgcacgccgtctggttaccggggctgggcgcggcactggccagcacagggtactgcaccattctggccttcagctcactgtattacagcgccatgaactggcagcccgtctggatggcattcactgcctttggcgttgcgctgattgctgcccgaaccgttgcgggccatctgccagatcgctttggtggcgcgcgtattgcgctgatttttgtgctcgtacaggccgccgggctgttcctgatatggcttgccggtacgtccctgattgcgacgacaggtgctgccttagccggttttggctactcactggtttacccgggcctcggtattgaagccatcagtggttcaacaccccagaaccgcggcatggtgatgggcatctacacagcatttcttgacgtagcgatggcgatcggcagtcctgcgctcggctggatagggagccacctgggactgaacgcgatattcctggccggcgcgctgacagtgctgtccaccgctgtggtggcgttcttgctgttaaaacgcccgggccagagtcaacaaaatccggcctga

SEQ ID NO: 179643 - DNA, 1029 bp, Klebsiella oxytoca
atggaccggctttcaccggtaacccgtatttgcaaggttggtttcactatggaaaatgaactccacttcatcggtattgatgtcgccaaagctaaactggatgtcgatattcttcgccctgatggccggcatcgttgtaaaaaatttgataataccctctccggacacgaagcgctggtccgctggcttcgcggccatgacgtgaaccgtgcccatgtctgcatggagtccaccagcacctacatggaagacgcggccgcgcatctgagtgatgccgggtataccgtgtccatcatcaaccccgccctcagtaaagctttcgcacagagtgaggggttgcgcagtaaaactgacaaagtggacgcccgtatgctggctcacttctgccgggaaaaacgcccgtcagcctgggaggcccctcatccgacagagcgggcactgaaagccctggtgttaaggcatcaggcgctgacagagatgcagacgcaggagaaaaaccggcgggaaaccgcgccggaggttcagctggccagcattgacatcctgctgggatgtctgagcgcggagctggcacgtatcgaaaaacagataaaagacctgacggataacgacccggatatgaaacgacggcggaagctgctgaacagtatcccgggcatcggggagaaaacagcggctgttctgctggcgtatacgggcctgaggctgaagttcggtacagcgcggcagttcgcggcgtatgcaggactgacgccggtgcagcatgagtcgggaagcagcgtgatgcgggcgagccggatgagcaaagcggggccggttcaactgcgcaaggcgttatacatgccagcgttatcggcgctgtaccatacggcgtggggaaaagcgttcaggaaaaggctggaagagagcggaaagcgggcaaaagtcatcataggggcgatgatgcgaaagctggcgcaggtggcttatggagtactgaagtcaggaaaggcgttcgatgcgtcacagcatgagctgttgatagcgtaa

SEQ ID NO: 179644 - DNA, 981 bp, Klebsiella oxytoca
atgagccatcaactcaccttcgccgatagtgaattcagcactaagcgccgtcagacccgaaaagagattttcctctcccgcatggagcatattctgccatggcagaatatgaccgctgtcatcgagccgttttatcccaaggcgggcaatggccgacggccctatccgctggagaccatgctgcgtattcactgcatgcagcattggtacaacctgagcgacggtgccatggaagatgccctgtacgaaatcgcctccatgcgcctgtttgcccgattatccctggatagcgccctgccggatcgcaccaccatcatgaatttccgccacctgctcgagcagcatcaactggcccgtcaattgttcaagaccatcaatcgctggctggccgaagcaggcgtcatgatgacccaaggcactttggtggatgccaccatcattgaggcacccagctctaccaagaacaaagagcagcaacgcgatccggagatgcatcagaccaagaaaggcaatcagtggcactttggcatgaaggcccacattggtgtcgatgccaagagtggcctgacccacagcctagtcaccaccgcggccaacgagcatgacctcaatcagctgggtaatctgcttcatggagaggagcaatttgtctcagccgatgccggctaccaaggagcgccacagcgcgaggagctggccgaggtggatgtggactggctgatcgccgagcgtcccggcagggtaaaaaccttgaagcagcatccgcgcaagaacaaaacggccatcaacatcgaatacatgaaagccagcatccgtgccagggtggagcacccgtttcgcatcatcaagcggcagttcggcttcgtgaaagccagatacaaggggctgctgaaaaacgataaccaactggcgatgttattcaccctggccaacctgtttcgggtggaccaaatgatacgtcagtgggagagatctcagtaa

SEQ ID NO: 179645 - DNA, 618 bp, Klebsiella oxytoca
atggagaagcttgagcaacttgccggcgaactgggactggatgccagagccatactccgcaccgacgtgacggaccgtgcacaggtccagtcccttgttgaccgggcggtagagttgcacggccgtattgacgttatcattaataacgccggcttaatgccgagttccatgcttgacaagctgaaggtggatgaatgggaccggatgatcgacgtgaacattaagggcgtactttacggtattgccgccgcgctgccgtatatgaaagcgcagaagtccggacagtttatcaacgtgtcatcagtagccggacacaaagttggacccggcggtgccgtatatgcggggacgaaatgggccgtccgggctgtttcagaaggcctgcgtcaggaagtgaagccctggaatatccgcacaactattgtttctcccggcgcggtagataccgaactgactaaaaccatcaccaacgaagatattgcgaaaggtatgtcgaaaacctacgagaatgcgatcccggcagaggcttttgcgcgggtcgttgcatttgctatcagccagcctgacgacgtggatgttaacgaaatacttttccggccgaccgtgcaggtttattaa

SEQ ID NO: 179646 - DNA, 429 bp, Klebsiella oxytoca
atgttcaaaccagtcatgcttgctctggcctccctgacggcggtgtcattttcatctttgggggctgaggccgaaggtatccgggtcaagatcaccgcaggtgaccaggtgatgacggcaacgttttatgacaatgccaccacccgggcgctggtctctcgctttccgctgacgctgcccatggaagatctttacggacgcgaaatgtgctaccggttcccggatgccctgcctgcaaacgaaacgcagaccagcggttatgaagtgggcgatgttgtttactgggctccccgccacagtttcgtgatcatgtacgaacagaacaatgaacggataggtaaccttcagaaagtgggtcgtatccactctggagttgggattttcaggcatacgggtaatattgatgtgacatttgagatggcacattga

SEQ ID NO: 179647 - DNA, 429 bp, Klebsiella oxytoca
atgaaacgcactccattttaccgcaggcccggcaaagcaggaaaattctccggccttcgcgagcgtgtgatctggatgatccagacgcgcggccgccctgttaccggcagcgaaatagcggagaagttcggcgtaacgcttgttgaatttaaccgcgttgcgaacggcataaccaagggagaaggccgcattgcgcagctgatcgcatcggaaacctggctcaacgatgacggcatctgcgatcgcacctttgacctgatcacaaggccaaaggtcattaccccgcagggtaaaactcgcctgttcactaagcgttcgatagctcaggccgcctctggcaaccgccagaaatgtattgataaagcggcccggcgccgccggcttatcgcatctggcctctatatcgatgaaatggagtcagtcctatga

SEQ ID NO: 179648 - DNA, 198 bp, Klebsiella oxytoca
atgcgcagttcggccagctggttcaacttcacccaggtgaatcccttcatagtgcgcaccgtaaatccccaggcctcgaccagctcgatcgcctcctggttgtgggtgccggtgtaccacatcgccagcacagcgttatccgcggcgagctcccacaccgggagccgcttcatatcgagcaggctcatggtggggtag

SEQ ID NO: 179649 - DNA, 732 bp, Klebsiella oxytoca
atgtacggggataaatacatcgatgcggtctcttcccgggttgcgctgcgcttacccgggctacgggtcctgacgagtgatagccagccccggagcaatccggggctttttattatcgctcttttcggttttcccggtggcgctaccgggcaactgcaggtcggtagcctgggttgctccgggatgaatgcatcggtgcggcttcttcccgggtcgcgctgcgcttacccgggctacgggtccaccgccgtctgcaggccggtagcccgggtcaggcgtttacgccgcaacccgggaatgtacggggataaatacatcgatgcggtctcttcccgggttgcgctgcgcttacccgggctacgggtcctgacgagtgatagccagccccggagcaatccggggctttttattatcgctcttttcggttttcccggtggcgctaccgggcaactgcagatcggtagcctgggttgctccgggatgaatgcatcggtgcggcttcttcccgggtcgcgctgcgcttacccgggctacgggtccaccgccgtctgcgggccggtagcccgggtcaggcgtttacgccgcaacccgggaatgcgtcgggataaatacatcggtgcggcttcttcccgggtcgcgctgcgcttacccgggctacgggtccaccgccgtctgcgggccggtagcccgggtcaggcgtttacgccgcaacccgggaatgcgtcgggataa

SEQ ID NO: 179650 - DNA, 336 bp, Klebsiella oxytoca
ttgcgccctggcgaaaagcttaagccaatgatcctgaatgccaccaacagcaagatgctgaaaagcattaccggatcgccattccttgaggattgggtaggcgtgaaagtcactgtttacgtcgataaaaatgtcaggttcggaaaggaatcggttgaaggtctccgcttaagcccagcgcgcgtttcaaaacctgtgctttcgccggaaaaaacgcaggcatggaataacgctaaggccgccttcaagcgcgatggcaacctggatgcagtgctggcgagaatggacatttctccagagcatcgccgccaactggaacaggagtgctcagcatga

SEQ ID NO: 179651 - DNA, 231 bp, Klebsiella oxytoca
gtgagtggcggcaattaccgacttaatctcaaccaacccgtcccggcccacgagtccgtctggactatccccatacgtttcgtgatcaaagaaaccgccgttatccacgtcgacgaagttcatctcttcgtacagcatgcgagcgattggctcctgttcgtgtccgcgctccatgtggtcgtttgtgaatccaaactcagacttgcaccctttaatctgctcaagagctaa

SEQ ID NO: 179652 - DNA, 705 bp, Klebsiella oxytoca; identical to SEQ ID NO: 8686

SEQ ID NO: 179653 - DNA, 786 bp, Klebsiella oxytoca
gtggtgattaactgcgccgggtccctgcgctgcggcctgtatccgcagaagggtattccgaccatcaacgtgctccccacctggcgcgccgggccgctggcgcagtttattagcgaggataactacgtttccggcgtgacgatggaacaactggttctggtggatactgccgaagccccggaaggtaaacctgagataacacggaagcctgcgccacgggtcatcaccacacctccaccaccgcgcggcgcggagaaactggtacgcatggtggagcagaccggcaccgccaccggacacgttatcgccttgctgttcgccgccagccgtgaagcggtggacgtgtcgctgcgcaatgtcatcccgtttatggcctttgtctcactgctgatagccctggtgcaggagaccgcactcggcagcctgattgcccatgccctgacgccgctggcgaactcgctgtgggggctggtgctgctctcactcatctgcggtattccgttcctctccccggtgctcgggccgggcgcagccatctcgcaggtgattggcgtgatgattggcacccagattggcgcgggtgcgatatctccggccttcgccctgcccgcgctgtttgccatcaacgtgcaggtcggctgcgactttgtcccggtgggcctttccatgcaggaggcaaagccggagaccatcgccaaaggtgtacccgcctttctgctctcacgtcagttaacggggccgctggcggtcatcatcggctggctgttttccctgggcttattctga

SEQ ID NO: 179654 - DNA, 384 bp, Klebsiella oxytoca
atggaaaccgttactcatgctccagccaccgatgctcatggacagcaccaggtcgtggccctgctgcttcgctttggcctgcagatcgcgcaggccgccgagcaggcctttagtattactctgggtcacggtcttcggatcgacatcccagccgctgacggtgtggccaacgttaacgtaagactggaagtcgccccacgggtcgaggaaggtcggctcatatttgactttcccgcactgatcggcaccttcggcaaccacatcgcggtacaggttgtctactttgtggaagccggtcacgccgacgaaaccgacgatgattttgtcgtaggcggtaggggagacgttggccaggtcgtagccgcgaccgcggttatcttttga

SEQ ID NO: 179655 - DNA, 618 bp, Klebsiella oxytoca
atggaaaagctggagcaacttgccggcgaactggggctggatgccagagccatactgcgtaccgacgtgacggatcgcacacaggttcaggcccttgttgaccgggcggtagagctgcacggtcgtattgacgtgatgattaataacgccggtctcatgccgagctccatgctcgacaagctgaaggtggatgaatgggaccgaatgatcgacgtgaatattaagggtgtactttacggtattgccgccgcgctgacgtatatgaaagcgcagaagtgcgggcagtttattaacgtatcgtccgtagctggacacaaggtgggacctggcggcgctgtatatgccggtactaagtgggccgtccgggctatttcagaaggtctgcgtcaggaagtgaagccctggaatatccgcacaactattgtttctcccggcgcggtagataccgaactgactaaaaccatcaccaacgaagatattgcgaaaggtatgtcgaaaacctacgagaatgcgatcccggcagaggcttttgcgcgggtcgttgcatttgccatcagccagcctgacgacgtggatgttaacgaaatacttttccggccgaccgtacaggtttattga

SEQ ID NO: 179656 - DNA, 309 bp, Klebsiella oxytoca
atgcccgcgcaggatgtgcccggtctccggcttttccagttcggctttgatgcgcatcactgccgggtcccagcgtttgtggaaatcgacgccgaccagcaggccgcgctgctgtgccagctcgacgatgagctcacactcgcgtaccgaggtagcgaggggcttttccgccagtacatgcttgccgtggcgcagggcggtgaggatggattcggtgtggtacgggtccggcgtcgccaccgagaccacgtcgatggcttcctcctgcagaagaacgtccagccgtgtatagcccatgatgccgtatga

SEQ ID NO: 179657 - DNA, 399 bp, Klebsiella oxytoca
atggttcagaccggtacggaaatattcacccatgtcgtacatgctgacggtggcgagcgccttgatgcggggatccatttttgtcgcggcgatggcaaagccgccgctaccgcagatacctatcacgccaattttttcacgatccacaaatgcgcgcgttccgaggaaatcaactgcagcgctgaagttttctgcatagacatcaggcagcacggccccgcgcggcgtacccgcactctcaccccagaaagactggtcgaaggacagtgcaacaaaaccggcctccgccatttttgttgcgtagaggttagcagcctgctgtcttactgcagcaaaaggatggccgacaataagggcgtcatattttttaccggcttccatattgcggggagtaaataa

SEQ ID NO: 179658 - DNA, 159 bp, Klebsiella oxytoca
atgaaacattaccgcgacgccataaccgtaggaaaagtgaagtgcatgtactccgtccttcatcgtggctggctaatgccatctggtgaagtggtaagaaacccgttaaaggctcagcggctggctgaagagctgcacacgaaaagaggtgcgcaatga

SEQ ID NO: 179659 - DNA, 519 bp, Klebsiella oxytoca
atggtggagcagaccggcaccgccaccggacacgttatcgccctgctgttcgccgccagccgtgaagcggtggacgtgtcgctgcgcaacgttatcccgtttatggcctttgtctcactgctgatagccctggtgcaggaaacggcgctcggcagcctgattgcccatgccctgacgccgctggcgaactcgctgtggggactggtgctgctgtcgctcatctgcggcattccgttcctctccccggtgctcgggccgggcgcggccatctcgcaggttattggcgtgatgattggcacccagattggcgcaggggccatctctccggccttcgccctgcccgccctgtttgccatcaacgtacaggtcggctgcgacttcgtgccggtaggcctttccatgcaggaggcaaagccggagaccatcgcaaaaggtgtacccgcctttctgctgtcgagacaactgaccggaccgctggccgtcatcatcggctggctgttttccctgggcttattctga

SEQ ID NO: 179660 - DNA, 375 bp, Klebsiella oxytoca
atgatgatttactgcgcacgtattactgctatcgggctgtttgtcgctgacggcctgaccgacaagatgctcatcaccttcgacagcaacgggccgaaagactgcctcgattactccctgtcgctggagccgtcgtttcgggaagagagcctgatgatactccccggcgaccgcctgctgctggcgggccatgattatctggtaaccagtgttggcaaaggtgcacagcaggcactgtttgaactcggccatctgacactggtgttcaacggcgacctgaatccctgccatgtcggcgcggttcatctctccggcccggtgccgaaactccatgacctccacggcaatctggtgattgaggagggacgcccatga

SEQ ID NO: 179661 - DNA, 375 bp, Klebsiella oxytoca
atgatgatttactgcgcacgtattactgccatcgggctgtttgtcgccgatggcctgaccgacaagatgctcatcaccttcgacagcaacgggccgaaagactgcatcgattactccctgtcgctggagccgtcgttccgggaagagagcctgatgatactccccggcgaccgcctgatgctggcgggccatgattatctggtgaccagtgttggcaagggcgctcagcaggcgctgtttgaactcggccacctgacgctggtgttcaatggtgatctgaatccctgccacgtcggcgcggttcatctctccggcccggtgccgaacctgcgtgacctgcacggcaatctggtgatagaggagggacggccatga

SEQ ID NO: 179662 - DNA, 195 bp, Klebsiella oxytoca
atgctgtcggcaacgccaacaaagccgaccttcaccgaggtgaccgcgctgccgcagggcgacagcacaatgcgaaacggcaccaaaggcgttgtggctccaaccctatgcagctgcttcgtggcgttatccatcagatcgacggtaaaatctttcgactcacccgccacggcgcaggcgttatcgcgaacgtag

SEQ ID NO: 179663 - DNA, 246 bp, Klebsiella oxytoca
atggtgggctttcgccgggtggaaaaagatccgctgacgggcgaggaacacacgctgttcttcatcctgccggagggctggcgggaaatgtgccggggcttcagtcccgccagagcggccaggttatgtctggaagcggaatgcctgctgcccggcagcgacgggaaataccagccgcaggttcgcctgccggagatcggtaaagccagggtgtatcggcttacctcccgcattctcagtatctga

SEQ ID NO: 179664 - DNA, 678 bp, Klebsiella oxytoca
atgcatcgtttcaaattatctgacttgctgaataatagtatcgatccgtgggcagttgttgatgtaagtggaaagactacattaagttcttataatgaagcttttaaaggactctttaacattgagcatataaacattaccaaacatgatatattttcatatcttaatgaatcaaatggcatcaatttattaagttcggtatctcaggctattgaactaaagaaaagaattgtcaaagcagaagcttatatcgtggaggggaactggaatatatctctttttcatttccacccattatcagtggaaacagacaaagtaaatctggttttactacaaataacaccggcatttataaacgatgttcattcacatgtgtttagcaacaacgaattgtcactcaacgagttgatggttacatcatcctcacctacatcattatttagcgatgttgaatggagaactatatttttactcagttgtaataagacgcaaaaagaaatcgccagcatagaaaatgtgtcactaaaggcaattgaaaaaagaatatcacgatgtctggaaaaaaccgattgtctaaacaccagacaacttaaaaaatttatacaatgtaatggttgggactcatatataccatcgtgtatattagaaaatagatctaaatataataataccgattaa

SEQ ID NO: 179665 - DNA, 768 bp, Klebsiella oxytoca
gtgtttataattaactcgtcattaatttacaatccagaagatgcttcattggaacatgcttgcgatttaattgaaaaaatgtctctttcaccagtacaaaatcgcactttgttttttttagtgaaaaacaaaaatattctagtacccaaggagttgattctggatgaagtctggggcaaacacgggctgacaccgtcgatgcataacttaaacaatgtcatttcatttttgaggaaatctttctttaactatggcattgagagcatcattgaaactaaagtcagagaaggcattatcttcaatgctgatgtaacggaaataaataaagcaaactcattaagcaatagcgctacatcagatataaaattagaaaaaaaaccgtctacatcattaatttttttgttttcttctggttttcttttgctatgttcaatcatatcttccgtatatttttataagaacaattattatcttaacaataccaacacaaccactattggattagttggaagttgcaaaattgagtttattagctcatactatgaagtcgatgaggatgatatcgatgtatcatacctcttaagcattagtaaaattaaccttcataaaacttgtactactccacacattatttattattatgataattatgctttaagccccgttgtacaatggggaaccagaacatctttttattatatttgtaataaaaaccacactaaacatccaacaacaaattgcaataatttctatgttcaaaaaaattag

SEQ ID NO: 179666 - DNA, 549 bp, Klebsiella oxytoca
atgaaattcaaatcactggcattagttatgacttctgcactggctctgacttctgcagcagcattcgcggcgaccaccaccgtgaacggcggcacagtacacttcaaaggtgaactggtcaacgccgcctgcgcggttgatgcgggttctgtggatcagactgttcaactgggtcagtaccgtactgccaaacttgctgctgccggtgacgttagccagaacgtcggcttcaacatccaactgaatgactgtgacactaccgtagcgacaactgcaaaagtggcatttgctggtgtagcggctaacgcagctaacccaaccgtgctttctgttgcttcttctgcagcaggcggcgccactaacgtgggtatccagatcctggattccaaaagcgtaccgctgggtcttgatggcgcaaccttcagcaccgctgtgactctgaaagacggtgtgaatattctgccgttccaggcgcgttactacgctctgggggcaaccactgcgggtgtcgctaacgccgatgcgacttttgccgttcagtacgaataa

SEQ ID NO: 179667 - DNA, 537 bp, Klebsiella oxytoca
atgcgtctgctaatagtgagtctgctgtttcttctgcccccagcgctggaagctggcgagtactgggagaccatgctacccggaggggccatgagatttcagggggagctgctcgcagaagcctgcagcgtggaaatttctgaccgttcccttaccgtgaatatggggcaaatccggacaaatatgctgcatgctccgggtgaagatgccgacccggttgagtttgatattcatcttcgggactgtaaccgaaacgtcagccaatatgtcggggtgactttcaatggtgttgctgacggtaaaaatcctgatgttatttcggtcggcgaaggtcctggcattgcacaggatattggtgtggccatttttgatgcctccaatacgcttattccgctcaacagcccgccaaggcgagttgcgtctgttgtgaacggagaaaccatattgcattttgtcgcgaagtatcgggcaacaggacatcatgttatgggaggaaaggcggatgcacaggcgtggttttctctgacatatgaataa

SEQ ID NO: 179668 - DNA, 705 bp, Klebsiella oxytoca
gtgaagaagaaaactggaatatcccgcaggttactggctggagtgatgctgctgacttgtgcagccctctcattgcaagcaaaagcggctgtggcactcggtgccactcgggtcgtttatcctgcaggtcagaaacaggttcagctcgcggtaaccaataatgatgaaaagagcacattcctgattcagtcctgggtggaaaattcggcgggtcagaaagatggccgttttgttattacgccacctcttttttccatgcagggaaaaaaagaaaataccctccggattatcgatgcaacaaataatcagcttccacgtgatagggaaagtttgttctggctgagtgtgaaagctatcccggcaatggataaatcaaagacgaatgataatgtcctgcagctggctattatcagtcggataaaactttattaccgtccctccgggctctcagtcgcgccagaaaaagtggcggagtccctgcgcttcaaacgccaggcaggaaagttgaccatcagtaaccccacgccttattacgccacagtgacggagttgaatgccggtgcgcgcaaactgaataacgcactggttccacctctgggcgaggcttcagtggatctgcctgccgatgccggtagtcagattacttacaggacgattaatgattacggtgcgcttacgcccaaaatgactagccagaaccagtaa

SEQ ID NO: 179669 - DNA, 2628 bp, Klebsiella oxytoca
atgtcacatctgatatctgaaaaagggctaaaaaccccgagaaaaaggacgctctccggatataaatctggctgccgttttaccttaattccacttgccttactgattgcggcaaatattccgtcagcccggggcgagctttattttaatccccggtttctggctgatgacccggctgcagtggcggatctttcagcttttgaaaaaggccaggaagctcctgcaggaacctaccgggtagatatctatctcaatgatggttatatgactacgcgtgatatccggtttatggccagtgagaaggaccacagtttgtctccctgtctgacccgtgggcaacttagtggaatgggggtcaataccctgtccattcccggtatgtctgtgttggcagcagatgcctgtacaccgctttctattttgatacctgaagctaccgttcgctttgatgttgggctgcagcgtctgtatatgactattccgcaggtatacatggatagccgggctcgcggctatatatcacctgaattatgggatccgggcattaatgccgggatactgaattatagcctgacgggaaataatgctcgcagcaaaaacggcgtcaccagtaattatacttatctgaatctgcagagcggtctgaatctgggggcctggcgcctgcgagataacaccacatggagctacagttctggcacggttcatgagaatcgttgggagcatgttaatacttatgcagagcgtgacattgtggcgttacgttcacgccttacgctcggcgaccggtatactgacggtgatatctttgacagcataaacttccgcggcgcaaggattgcctcggacgataatatgttgccggacagccagaaaggttttgcccctgttatccggggtatcgcacgcggcacggcgtcagtgtcaatcaaacagaacgggtatgaaatttaccggagtaacgttccacccggtccctttgtgattaatgacctgtatgcgaatggcagtagcggtgacttgcaggtcaccgtgaaagaagctgacggcaccacacaagtattcactgtgccttactcttcagtgccattgctccagcgtgaaggccatacccgttatgcgctgaccgcaggggattatcgctcaggtaaccgactacaggagcatccgggttttttccagggaaccgtgatgcggggcctggccggtggatggaccgtgtatggcggaacgcaactggctgcccgttaccgggcatttaatgccggtgtcgggaaaaatatgggggtcctgggggccgtatcgctcgacatcactcaggcaaattcgcaacttcctgatgatactgaccaccaggggcaatctctgcgttttttgtataacaagtcgctgaatgaattggggacaaatattcaactggtgggatatcggtattccactgaaggattttttacccttgcagatacggcatacaaacggatgtccggctataacgttgtcacgcaggacggaattattcagatcaaacccaaatttactgactactacaacctgtcctataacaagcgagggaaagtccagctaagcgtgacccagcagttgggaagacagtccactctttatattaacggtagtcatcagacgtattgggatacgaataaatcagaccagcaattacagattggtctgaataccgtggtgcaggatatcacatgggggctcagctacagcctgaataaaaatgcctggcaggataacaatgatcagatgctggcgctgaatgtcaacattcctttcagtcactggatgcgttccgatagtcaatcagtctggcgacacgccagcgccagttataacgcgtcacatgatctgcgtgggcgggcaaccaatacagccggactctacggtacgttattggaagataataatctgagctacagcgttcagactggctacgctgggggcgggcagggagcatcttccggcacgggttatgccgcgctgaactatcgcggtgcctatggcaatacaaatgtgggctatagccataccgatggttatcgccagctttattacggcctcagcggtggtgtcctggctcatgctaacggactcacgctcagccagccaatgaacgataccgttgttctggtcaaagcgccgggggccggtaatgtgaacattcagaaccagaccggggtaaaaacggactggcgtggttacgccgtactgccctatgcctcagattatcgtgaaaaccgtgttgcgctggataccaacacgcttgccgataatgttgatttagatgaagccgtggtgagcgttgttccgacgcacggggcagttgtgcgcgccagttttgagcccagagtggggctgaaggtactgatgactttgttgtttaaaggtaaaccggtcccctttggtgcggttgtgacatccgaaaacaataacagcggaagtatcgttgctgatggtggtcaggtttatctcaccggtttaccgcttaccggccgactcctggcaagctggggggatacaccggatgcacagtgtcgcgtggattatacattgcctgaggaaagccggaacaaggcgctcagtgaatatcgtgcggaatgccgctga

SEQ ID NO: 179670 - DNA, 543 bp, Klebsiella oxytoca
atgactggtaaatttaaccggtggtctgccgttgtgctgatattaatgacgatgatcccgggtactcttctggcggcagacagcactataactatcaagggtaatataaaagataatacctgtgccgttgctccttcatcccagtatataactgttgacttaatgaataatgcggtaaagcaactttatgctgtcggaaaagtcactacacctgaaattccgttcagcattgaactggccccatgtggcgcatccgttattgccgttaaggtcggttttgtcgggatagctaatgcatataataccaatttgctggcgatagatgccggaggtacggcggcttcaggagttggaattcaaatcctggacagtgataaaaatcagattgcaataaatgcggatagcagcgccctgagctggaccccgctgacggcaaatacatcgaacacgcttaatttttatgcgcgattaatggcatcaaatatgcctgtcgttgcaggattaacgaacagtacagcaacatttactctggaataccagtaa

SEQ ID NO: 179671 - DNA, 507 bp, Klebsiella oxytoca
atgcagagtgtgaaaataaacaatagtcttttagttgcatttctttttgcatttgttagccctgtattttctgctgatgtaactattacggtcaacggtagcgttgtggctaaaccctgcacggtgtcaacatcggatgtcactgtctatttaggggacttgtatacgtttaatttattatcagcaggttcgtcttcagcgtggcatgaagtttcactcaatctgacaaattgtcccgttggaacatccgcagtaaccgcaactttttccggtaatgctgacgctacgggatattataaaaatttgggaaccgcgaccaatatccagctgcagctgcaagattcttcaggtaatgatttgaataatggtacgaaaacacaagtgtcagttgatgattcaactttatctgccaactttcctctacaggtgagggctctatccgtgaatggtggagctacgcagggaagtattgaatctgtaattagtgtgacttatacatatcagtga

SEQ ID NO: 179672 - DNA, 954 bp, Klebsiella oxytoca
atgcatttaatatatttcatgagagtttttattattgcatcagtagcccagctgacatggattaattgtgccagcgcatttacctgttatgatgctacaggaaatacacttaacagtggtgcagtgacggctacagcgaatgtgtatgtaaaccttcagccgagtgtagcggtagggcaaaacttggttgtcgacctttcgtcttctattttttgtcgtaatgataatccgaatacacgaaatgataatgtcagcatgctgaagggatcggcatatggtggagtattaacaaactttaccggtacaatgagatattatggttcgagctatccttttcctctaaattcagctaccggtacacataattttacatcgggaagttatactccgtggaacactcagctttacttgacacctctgacctcagctgcctcggctgccggagggatagcgatcgaaagcgggacgatgtttgcctctcttgtcatgtatcaagtaggctctgataaaaccaatggtggcaatgtcagaacagcaacttttacctggaatctgtacgccaataatagcgttgtagttccaacgggtggctgcgatgtatcagcacgcaacgttgcagtgactctccctgagtatcctggaagtgcggttgctgtacctctgacagttcactgtggttctaaccagagtctttctttttatctatctggcaataccgcaaccagcaacgatatatttctcaatacctattctggaaccagtactgcttctggggttggtatacaattgctccgcaatggaaacgccataccagcaaaccagaatgtttctttggggactgttggcacctcatcggtaagtttgggactgacggcaaattatgctcgtacatctggtcaggttacagccggtggtgttcaatcaattattggcgtaaattttgtttatgattaa

SEQ ID NO: 179673 - DNA, 1461 bp, Klebsiella oxytoca
atgattaagcaaacaaaagtagaatattctgttgcttatattgtttccccttgcgctatggcggcggcaggcctgaaggaattgataagtaatcaaggggttgcgactaaagttatattacttaacgatgcgagtgttgatactacccattctgaggatgatgacgtaattgatacttctggtttgtatgtattttatatacctaaggaatctttttatttccttttgatgttgatctacatagctgagagaataaaaaaagttcatccagatactgatttcgttttcattagtggtgtgtcgtgttcctggcttcatcaaaatatactgcaaatggctggtggggaaaaatttgtttttagtgcgaagattatctcctcaaaattgagtgtaaaacggctggaacaatattttactcgagtgagagagaacctacctttcacctcaagagatcgtttcactgttaacagaagaggaatgagtaatgaaggactaaccccacgcgaaactgaagtccttcttgacctgttcagcggtactgataccgcgcttgttgaaagaaacagaaatgtagcatctaaaactttatacaatcagagaaaatcagggcttaggaaaatggttgagaattctgctgaacttgccgggaaacttccgggggcatcaaaaagatggaaggcaagattggctcaaacggaaatgtcttcttatgaaaaagacttcgtgaccggtatagagatgcaggaagtttatcaggtttatcagccaataataaatatatcacgggaaatttgtggcttcgaaatactcactcgctggcgtcaaaaagggtatgtaatccccccgaatgaattcattcctgatcttaaatctgaaagcgtcctgttgctacttaccgctatgagcctcaaaaatgccatcgatggaataaataggtatgagggggattattttttttctattaatatacatccagatttgattggctgccctggtctggttaacatgtgtatagaagcttgtcgtcagttgaaagatactcgatggaaaagtcagcttgtacttgaattttctgaaaaatcagatttttatacatcacgtgatgtagagaataatcttaatatgctaagtggaatgggcatgattctttttttggatgactgtttttctgaaggaagtgttttttttcctgtcagaaaattttcttttaatgggtataaactggataaaagcatcattgatgatgttttaacaagtaaagatgatatagcgttaattacgtctctatcaggatattgctcgctgacaggaaggcgatgtattgctgaaggtgtggaagatgtttttactttcgaaaagttgaagcggcttggtatcgaactttttcagggttatttctttcatcaaccagcgagcgaagaggaattggctgctctggtattgaaatctaaaccaatttaa

SEQ ID NO: 179674 - DNA, 141 bp, Klebsiella oxytoca
atggttcagagccatggcgacaaatcacttgtttttataaaagacattcatgagcctataaaagttaatcatagacttgaagagattgaaggattgattcagacgcagaattcaataatgaatctggatgataaattctga

SEQ ID NO: 179675 - DNA, 393 bp, Klebsiella oxytoca
atgaaaaaactaagaacagtactaacctgcctgacattcatcggcgctttttcgtctttcagcacgtatgctgcaagtgaattaaaaggttgtgtagctaaagaacagcaaatccaacagcaaattgactatgcaactcagcacggtaataaacaccggatatcgggtctggaaaaagccctgagcgaattacgtcaaaactgtactgatgaaaaattgacccaggaacgaaaaaataaaatttctgaaaaagagagaaaagttaccgaaagaatgactgaacttaatcaagctaaagaaactggtaacgctgataagataaataaaaaagagaaaaaacttcaggaggctaaaagtgagctcattgaagcacaaagcgaactgaataaataa

SEQ ID NO: 179676 - DNA, 213 bp, Klebsiella oxytoca
atgcaagcattgctttcatcgtgtgcgctagtcgcaatatctttctcggtacttatcttcttttatgctttctggttattttttacagaaggggatatgccttttgtaaatatactcgttgctcttgccttgatcattattgctttttattgtcttgtctggtatacgctcattatactcaagagtgatggtattgatttatcaattttttag

SEQ ID NO: 179677 - DNA, 732 bp, Klebsiella oxytoca
atgggtaaaacaatattaataatactgttcctgcttacgccaattagccatgcggggatgttgattgaaaaaaccagagtgatttaccatgaaggcgatagcactcaaagcgttaatatcatgaatattaatccatatccaacatttgtccagacatgggtggattcaggcgaggttaacaatttcaagcagagcgcttcatcaccatttgttctgattcctccaatatttaatttacgccctaatgaaataaaatcagttagagttatatttaatggccaaaaattaccaacagatagagaaagcctctattggataaatatttatgaagttccagccatcaaagaaatacctggaattgataaatacttactaatgtcaatgaaaacacaactaaagcttatttatcgcccaaaaaatcttactggtagcgttaatgatgcaggaaattcagtatcatgctcactcaagcaggatactcatttatccttgatttgccttaataatagcggttatgtcttatcttataatggaattattgttaacacccagggaagaaattataaagcaactgccgatttggatctgatgataaagccattttcggagagttttttttcacttacgccgattacagctgaaccaataaaaaacaccaataccattgtattcaaaattattaatgatgaaggtgaggtggaaaaaataacaaaaagcatgtctactttatag

SEQ ID NO: 179678 - DNA, 1347 bp, Klebsiella oxytoca
atgattcgctcaaaatcatttatattgacattattgatgctgctcgggttactttcattcactcaggctcatgcaacctgtacgcgaaagtcatctatcgatgctggctgcgatagttgtggtgtggggattggcctcggcaacgtcaacattaccagcagctaccttcaacccgttggcacgccattagcgagtacggtattcagtattactactgcagttaggtatagcagtagtggagctggagatcttgttttatatgaatgcgacgcaactgacgcaggaaatatctatgaagttttcgcaacaaacggtgacgatcgtgtcggtggatacttcgatctgggtaaggatgattcccatgagaactattttgccacctatttcccctacgtaggtataaaattaacacatattaattcaggacttccatttactcgctactggcagcaatatcctattactagctacgcaacagtgggtaacaaaatacaaattcgtgttaaagattttagcgctattcgcgcagatcttatcagaataagcaaactgccagggcaggggaaaagtaactactgcggtggttatgttgccagctccccttattcaggaatggcgtcaccaacaggcacgtctagctatacctgcatacaaccaaatggctatgtcactttcaaaggaccgggtattgctagcgatcctatcggttccgattctgccgataactacaccacatgggggacaggacgttggatcgcaatgggaatgggaacgtcacctatatctactctgacccatacatctacctgcgtggcccgcaatgtaacgcctttagtactgctgcctacaattagcattcaatcactcaataacggtggaacatcacaggcaaatttcactgtgtctattgagtgtgataatgccgcggtctccggaatttcctccggtagtacagcattaggactgcaagtgccctatgaaagttatttaacggcaaaggaacttgggctggtaaacgcatcaggcggtgtcagttatttactttcagatggctatgggactaattctacaattgcaactggcgtgggtattgccctaagcaatacctcaaccggcacagcgatgaatttcttaggatggggagtgtgtacttcactcggttgcccaagcggtaatgatgtgggttggtattctgttttaaacggtgcatcatctattggtagtgcggcgtcagggtacaccagttataattctgtattcactgctacattgaagaaaatacctggccaaacggtgactgcgggaaaagtcagcgctaaagcttacatctgggtgagggttcagtga

SEQ ID NO: 179679 - DNA, 2532 bp, Klebsiella oxytoca
atgccgggtaaaacagcatcaatattggtatttttaatattgccaatctttgcctatgctgattcaagtagggcaaattctaatgataatagcagtggctatgtattcgatacgacccttctgaaaggaagtggcctgcctgttgatgacgttatcaactacgtatctactgataaaatcaaacccggtaattattcggtagatgtgcagctaaatggtctttttttatttcatgataatattgtttttaagatacacaatggttcaacgcaaccctgtttttcaagaaaacagatacagctcattccattgaaaaacaagataaaacaagaactcggtgaatgtaactttttacctgacattgttcccaacgtatctatcaacactgatatgcgaaaaatgttggtcgagatcggtctgccagaaattgttctggcaaaagagcccaggggctacgtttcacctgatgatttagatgacggtgaaactatgctgctatctaactacagcatcaatcaatattattctcgtttcactgaagcgggttccggtagttacaaatctacttgggtaggcttaaataacgctataaactttggtagatggcagctacatcaacaaggaacatggtcacacagcgatcccggtacaacgcagtggtcaacaaaccgcgcatatctgcagcgggcaattttacccataaaaagtaatttgattgtcggtgataactacaccagcggtagttttttctcaggctttgcctttaggggaatatctctatcctccgatgaccgcatgctgccacagtcacaacaaggctatgcaccgattatcaggggagttgccaaaagtaatgccaaagtcactattagtcaggggaaggctgtaatctatgaaagcaccgtaccacctggtaacttcgagattaatgatctttatcccgtgtcatactcaggcgatctatccgtcacgataaaggaagctgatggttcagtgaatgtatttacggtcccctatgcagcaggaccagaatctgtgcgagaaggaatgtataaatattccgccatagccggtcattctcgctacgttggcgatagcgatccatttgctgaattaaccgtacagtacggtcttagcaacaatattacgacgaattttggtagtcgtatcgctgaaggttatctctccggggtgatgggaggtgtgtactcctctgaattaggtgcattcgggcttgataccaccttttcgcaagcaaacttgccagatggcgatcaaacaggctggatgttccatgcaagttacagcaaacggattgtgccaaccaatacaacaattgctattgccggttaccgctactcaacagcaggctatcgagatctgtccgatgttttaggcctgcgtaaagcctggaccgagaataatctcaactggacatcaacaactttaaaccaatcctcccgatttgaaatctccgtaactcaggatatggatatattgggaagtctatgggtatcaggctcgacacaagcgtatcgggatggccgaagcaatgacagacaataccagtttggatacaacaaacaattcgccaatggtatttctttcaatgcttctattgcacgaacccgctacagtgaagcccgaaataattacattgatggtggcattggctacgataactatatcaataactattattcatccactcagcaaacgttaagttcagtctctatttccatcccccttggacgaaatcaacaaaatactcttagtagtacttacacccagcaaaacggagtaggatctacgctacaatccactttgtcaggtttaatgagcacaaaccaaccaattaactatggtctgacctatgcacatgattacgctaataatcaatccgttggcgggacattacaaacctcgacttccttcggttcggttcagggaacgctttcccacgcgaaaagttattctcaaggctcagcaggactgcaaggagcaatcgttcttcacaaagatggagtgactcttggcccatacctgggagatacatttgccttaattgaagcaaaaggtgctcagggcgcgaaggttgtcggtagccaaaatacgaccgtcgacagatttggctttgcattgagtccttctattgcgccttatcagtataataacgttgcccttgattcgtctgaaatcaataaaaacgcagagattgtttcaggaagccagcgtatcgcaccgatggtcggagcaatggtaagagtcaagttcagcatcttgcatggttacccgatgttaataaatatcaactataataaaccgctgccgttaggcgccaccgtttataataataaggacaatcctgtcggaaccgtcggacaaaataatcaagcatgggtacgtaatgataaacttgaagacaatttaatcgtgaaatgggggaataactattcctgcaatttacattaccgtatttcagatgcagataaagacgatccaataataaaaacacagggagaatgtaaataa

SEQ ID NO: 179680 - DNA, 708 bp, Klebsiella oxytoca
atgataaaatacctgcttccattcatatgtaccttttgcttctcagttgaagcaagtgttgtcatgcaaggaaaccgtgtcatctatgatgcatcaaaatctcaaaaaccggtaacctttaccaacaacgatagctttccatatattgttcagacgtgggtatccgcggccgaaaatactacggcatcagaagctggagagagtccttttgctatttccccggcagtattcaaaataaaccctcatcaagatcaaatcattagtcttatctacacaaacgcacagaagaaactgtcgaaagaacaaattttctacctgcattttacccaagtaccttctatacttgaagatgaacgtaacaagaataaactggtacttattgttaacagtgttgtcaagattttcttgcgtcccgacaacttgccaatctcctatgagcagatgttcgattttgttaattataaaatcacgaacgactctcacggatgtagtctgattattagcaaccagtctccatattatttaaatagtatctcgctaactacaacctttggctcggcaaataaagagataccgatgcaaatgattgcaccaaactcaacattttcgttgccgactaactgtaataatacccaggtacagaaaagcatcagcgttagttatatcaatgactacggcgttgttcaaaaacataaacttaaagaataa

SEQ ID NO: 179681 - DNA, 537 bp, Klebsiella oxytoca
atgaaagtcaaactgttagctatcccactagcgatattaaccacatcagctttagctgcatccaataacaccgttcagtttcagggcgaagttaatgcgcagacctgtacggttaatataaatggcaactcaacggcacctatcgtgttgttaccaacggtatcaaccgcagatcttgacactgcggcaaaaacagctggtgatacaaaatttacggtgaacgtgacggattgtgcctcaagtgcggccaccatcaaaaccgtctttgctggcaataacgtgacagcagctggaaatttaggtaacacagcaacttcacctgccgcaaacaatgtatccatccaaattgtcgacagtgatggttccaccccgctttcatttgtcaacggttctacggtaacgacaactgcgtttaccaaagcggaaagtagtacgacgggttctcaggaactgacggccagatactacgccgaatcaacgggtgttactgctggtaaagttgttgcatctgcgcagtactccatttcataccaataa

SEQ ID NO: 179682 - DNA, 123 bp, Klebsiella oxytoca
atgaaaattacactcattcgtgacgcgatgaatatctttgtattccagagaggtaatccccacctaggcagggatggatcttttttttgtattttgatggctggcctggatttctataattaa

SEQ ID NO: 179683 - DNA, 1482 bp, Klebsiella oxytoca
atgtgtgctaaagatataaaatatgtccggaatagacattttgattatattttatccccttgtgtaatgactacctgcgggttgcttggtatgcttgataatccgagggatgttactatattagatgtagaaaaccagaatgatgcacaattattagaaattggtaaggatgagcgcatagtcgtatttattcctgatgaaccctatttgatgctatcaactttaaaatatttagtgtctctaatgaataactccaggtatatgttttgggttctgattcttagccggattccatcattctggatttggaatgtgatcaaatcgcaagtggtgaaaagtaaaatatcacattcttctatccatattgcaccatcggatctctcatgtgaaaagctctctgagattttactgcccgaaaggactctgtgtccactcatacaagatgttgccgttttcgaagacctttttcttggaaaagatgaggggatattaaatcaaagtaagaaagatggattatctaaaaaagagttacaagttatgtctagtgcttttaatggagatagcgttacctcacaggctgatctgcttggagtaagtaaaaaaacagtctataaccagagattatctgggataaagaaaatggtggggatagtcccctttctgttttggagttttcgtgaaaaatctgagatgcagatcgagggtatcaaaatgttgaacgcactgacgccatttgagcgagagtttgcgcatgcattatattgcaatgagttatttgttgtattacagcctataactaagggcacggatgaattagagggatttgaggttctgataagatggtatagtaacggtcaggttctgatgccagtcgattttctcccaaaattgcactctacttatgtttggataatactcacggcttttttaatacaaaaaacggtgagctatattaacttttataaagggaaatattttttctccattaatgttgcatccagtaccatcgataatgaggggctcgtacgcatgctggaaaaggcaaaaaagaagttgctctctccagactggacagaaaaattcgtattggaaattaatgaaaagaacgatctataccaaaatgaacaagctattaaaaacctgtcttatttacaaaaactaggatttttcattatccttgatgattgtttttcatctaatagcgttattttcccagttcggaaatttcaatttaatggttacaaactggatatgagtgttgttgacgctatgagtcaggatgtggaagctattgctttagtgaaaagcctctcatattactgcaagttgaccaaccggtattgtgttgctgaaggggtcgacgaggcggggaaggttacgattttgagtgatgccggtatatcctgctatcagggaaacctgatatctgaacctattaatgaaaacgatttacaggatttcattagcagatttaatcgataa

SEQ ID NO: 179684 - DNA, 333 bp, Klebsiella oxytoca
atgaaagaattaactattggcgaaatggaatctatttctggcggttttaatctggtcgattttgcgaccagcattaccagcctggttgtcaacgccggtagcggctttagcgattttatcaccaccgctggtaccaccatcgccaacgccatcattaacggtaccgttgagctcggcaaattcctgaccggcgcatctgactggagcgaatatctctccgcaagccatgcaggcttgaatgatgccctcagcgccctttccaacagctggtcctctttcgccggtgagatggcagcagactggggtgccttctctaagaacctgaccgcttaa

SEQ ID NO: 179685 - DNA, 483 bp, Klebsiella oxytoca
atgaagataactgaagataatctcaatgaaataattgatttgctgaatgatttaatttgcgatgaaaatttgttaacacgcacggaacgccttgatttggtccgggctgttgccgccatcggggcgatgaaagcacgtgttgctatagtgtcttcacaaaaatcttcgtcgataaaaaagagtggagaaaagaaagaaaaggttattgatccacggtttccaaacgttggcataccctggaatgacaatgatgagtccatgctacgggaagtattagagcctattccggaggaggagataggagagcatctcttctggctggctgaaaagcttgggcgcactccttatagtgtagcttgtaagatagctcagataaaaaaattacctgcagaatggaaagatagcttccgtaaaatttccgatcggattcgcgattcgaaaatgacgattggcgaatatattcaagctaaaggccatgaatag

SEQ ID NO: 179686 - DNA, 825 bp, Klebsiella oxytoca
atgaagatccattttctgggaacggcagcgtctgaagggatacctaacccgttttgccgctgcgagcactgtcagcaagcccgtatacgtaagggaaaagacattcgtacacactcttccgcgattattgatgatcaactgttgattgacgtcgcgccggaatttagccagcagctgctgcgcgacggcatggacgcaactgaaatcaggtcgcttctgtttacccatactcatcccgatcatttcaacgtcggcgatcttttcagccgaatggagggttacggatttgagattacccatccgctgaatatctttggtaacgatcgtgcgattaacggtgcggcagaggttttgccgggctatagcgcagagcgctttgcctttcattgcctggtgcccttcgtcaccgtagaaacccgtggttatcggataaccccgctgctggccaaccatgctaaatgggagctttgctatacctggtttatcgaaaaagagggccagtcaatattttacggtcatgactctggctggtttcctgagctcacctggcagtggctggaaggcaaaaaaatcgatctggccgttctggagtgtacttacggctttaatggagaaaatcgtaccaataaccatatgagtctggaaacggtgttcgctgccagagacagactggcggaactgggctgcctgaagaaaacaagtcaacttatcgtctcgcatatttcacacagcggcggtctcctgcacgatgagctagtagcagcatgcgataaagagaacattcttgtcgcctgggatgggcttaacctgagcattaaccaataa

SEQ ID NO: 179687 - DNA, 678 bp, Klebsiella oxytoca
atgaaactgaatccattattcatctctctctttttattcaccgtgacgccctcctcccatgcgattaatgtcggagacgtcacctcaataatggggccggatgcctcgacgctggcaaaagaaatcattaataccaccgatacggcgcgttacgttagcgtcagcgtggagcgaatatcatcgccgatggccgacggcaaggttatcccgatggcgagcagatcggaattattatcaacgccagccagcctgatattacccggaaatgctaaagagaactttcgttttttttacaaaggaccgcaggacagccaggaacgttattatcgcatatcctggaccgatgagccggtgaccgagtttgaagccagtaagaagaaaaaacagggcgaggcaacgacctctgccattattgggaccattctggtggttgcgccgcgtgaagaaagatttgactatcgtcgcgataatgacacggtaaccaataccggtaacgcttcattccgcgttatctcctacggcccctgtcgtgataaagcgaaggatgaggggcaaggctgccgtgaacgctattatgtcatgcctggagtcagcgtaaaaataaagcataccgatctcaccaacaaaaaaacgcgaattggaatatggcacggtgagcaatatataaatgtaaactga

SEQ ID NO: 179688 - DNA, 918 bp, Klebsiella oxytoca
atgaatattacccgtaaagagcagcgcattattcagcgcgcgctaaaggcgtggcaggccagcggcgatttagcccctgaggatagcaagcggctggcgcaaacgctgcgcgtctctcccttcgactggcagcggctgagccgctatgcgttctggaccgcgctggcctgctacgcctggggttttcgccgccagcggcgggaaacgcagtggcactacagcaccgaggcgatcctctttctgggggttatttttaccgccgtggcgctgtggcagcttggcgaacgtctggataccggcagcggtcatgtcgcgccgctgttcctggccggatgcctgatttacggcgcgattggcttttttgcccgctccgggctggtgtggctcttttttctgctgtcgctgggcaactggttcggtgcagaaaccggctacgtttcgggctggggcgcctactggctgggcatgaactacccgatccgcttcgtgctgttcggcggcgcgctgcttgcgctctgctacggcgcgcaacacgctttgcgccagcgccagctgtttaccgtcagtaaagcgatggggctgatctatctgtttatcgccctgtggatcctgtcgatttttggcaactatgacctggatagctggtccagcatagcgcaaaggcagctgctgccgtgggggctgctgttcgccgtggcggcggggatctgtatctatatcagcctgaaaaccgacgacggcatgctgcgcggcttcggtctgacgttcctggcgatcaacctctatacccgtttcttcgagttcttctgggatggcatgcacaaagtcgcatttttcctgatcctcgcagtctcgctggcggtaattggccgctatgcggagcgcatctggcatgcgggaagggtaacccatgaataa

SEQ ID NO: 179689 - DNA, 2730 bp, Klebsiella oxytoca
atgaataaggagtcgatttttcgccagctagaacaacggatcgtcgggcgaccgctgaccgcggaagtgcttggcgagtttaatgcgatggcgattgccgatagcctgaagcaaaaacgcagtatcatcagccatcatctgaataatctccatcgcgagcagcgggtggtcaaagtaaatggtcgcccggtgctgtttttacccattgccgcgctgcgcgaccaccaccgcctcgcggttcgacacggcgaatacgcttcccttcaggccctgtgcgctgagcgccaggatagtctggcgcagctgataggcgctcagggcagcctgcaggaagctttgcggcagtgcaaggccgccatcagctaccccggcgcaggtctaccgcttctgctgcgcggtcccaccggcacggggaaaagtttccttgcgcgccagctctggcgttatgcgatggaacagggcgttttgcctgctgatgcgccttttaccgtgtttaactgcgctgagtacgcgaataatccagagctgctgacctcgaaattattcgggcacgcgaagggcgcctttaccggtgcggataaatcagtccccggtcttatcgagaccagcaacggcggggtactgtttattgatgaggttcatcgtctgccccccgaaggacaggagaagctgttccattttatggataacggtagctggcggcggctgggggagagcagcgaggagcgcagcgccacggtacggctgatttttgcttcaacggaggatctggaaaagcacttcctggcgacttttattcgtcgtattccggtgatcgtcaaaatcctgccgatcgccgagcgtggacagtatgaaagactggcgtttatccatcacttttttcgccgtgaagcgcagcgattacatcacgatctggcgctggacggcgaaatcatcagccagctgatgcgcgaaacgctcgagggtaacgtcggcggactagagaatttgatccgcaatatttgcgccagcgcctggacatttggcgagcgggatagcgatcttttacagataaaagcgggtttactgcccgaccggttgctggcggatgcgcctttttctcttcagcaaaatagcgaacgggtcatgatctaccgcgatggcgacgcgcagcctttgttttccggtcgtcatcatgagtatcaacggctaacggaaaatatttgcagcctctgcgaggaactcgggaaggacaatatcagcgcaaggacctttgaaaagctcatttatcaaaacgtgacgctctatctcgatgcgttgatgaatcaggagagcgcggtctctcttcaggacaagcggctgcgctttattgaggatgtgggcaaggcgatcgccgccaattacgatctccagctgaatgccgaattcgcctatcttactggccgctacctgaccagcctgcctcttgctccgcgcagcgttgccgagcccgcgcgtctggtgatgcagcgctggctggagtcctcagcggggctggcgcagcgtgtcgcgggcaaactactggatgtcgtcaataacaaatacgatctgctcatcgatacgcttgaccgcctggcggttgccgctatcgtcagcaatgcgattgatgcgaccagcggcggaaaagtgaaagcggtgattatcgcccacggctattcgaccgccagcagcattgcgggggtcgccaatcgcctgattggcgagaagatctaccaggcgatggacatgccgatggaggtggcgttcagcgacgtcagccgcgccgtggttgattatctccagcataccgatacccgagccggagtcatggtgcttatcgatatgggctataccaaagagattgccgatgcgcttttgtcggtgattaacggcccgctggtggtggtggataacgtcacgacgcgcatggcgctgaacgtcgccagcgagatcgctctggggaaaaatatcgaacatattgccgaagagatcgtgccgctcaatcagtcgcgctgggatgtcttctggccgacagaaaaaaaagagcgtgctctgctggtgacctgcattaccggaatcggtactgcgtttaaatttaaaaatctgatggagaagagcctgctcagcgactttgatattaacattatcgcctgcgagtatacgcgcttaaaaaatagccgcacggcgatatccttgctccaccagtatgaagtgattgcggttgtgggtacgcacgacccacagctggcgggggtgccatgggtaggtattgaagagctgctgggcgagcaggggcatcggcatctcagtcagctcttaagcggctatctcaatgagaagcaaattgcgctgattaataaaaatatggttcgtgagttttcgctgcataacgtcgtcaactccttgacgatactgaatgccggaaaaacgatgagccatattgagactattattgcagagtggcaaaacacgcttggctttaattttaataataatttaattattagcctgtatgtgcatctcagctgcatgattgagcgtctggtaatgcgtaatgaaattacccattataaaaatcttgagcaattttctcgccagcacggagaatttattgctatggtgaaccactcgtttcagcgcctgaaaatactctataacgtgacgctgccggtagcggaaattggttatattcacgatatttttgaattacgcgttgacgattttcgctggtaa

SEQ ID NO: 179690 - DNA, 420 bp, Klebsiella oxytoca
atggacattcaagtagttcataacgttactgaatatgatagagaagagctgctaacggggctaagaagctacaatgcccagtttatcgattttagcaaacatgggcagctcggtgtctactgcagaaatgaaagcggggagatggtaggtggtttaattgcggacaggaaaggtccatggttgtgcatcgattatctttgggtgagtgaatcagcacggagtggcggtttgggtagcaaacttgtgagcatggctgagaaagaaggcgtactgaaagggtgcattcatggcctggtcgatacgtttagctttcaggctctcccgttttatgaaaaacagggttatatacttcaaatgtcattgcctgatttccctaaagtaggttcacaaaggcattatctagtaaaaactaatttatag

SEQ ID NO: 179691 - DNA, 645 bp, Klebsiella oxytoca
atgtttgctgaatttggtatcgtgaatttctggacgtatctgcttggtgcgacactgatagttcttgctcctggccctgagaccatgttcgtgattaaaacaagcattacgagcggcatcaaacgaggctttgctgcaatattttccattctcatgagtgacgtacttctggttctgctggcatggtgtgggcttgccgcagtcataagctcaactccagccttgtttaacgccatcaaatacgcaggtgctgcctatcttttctatctcggtgtccagacgatacgcgctatctttaagccaaatgttgaaacgagtcaggaaaagaaatcttcagctgatgctaaggggatcatcgggcgtggaatgcttgttactctactgaatccaaagacgctgctgttctatatctctttcttcgcccagttcatcaatgttcaggctgaacattcctggatggcgtttatcatccttgcagcagtaatgttcgcgattactctcgtttatttcggtttcctcgttttctgcggctcttatctgctaagccgtttgaaaggcaaccgtagattatcaaccattggaaacgcgctggtaggtatgttcttcattggatttgcagcgcgactcgcaagcgcaacctcctaa

SEQ ID NO: 179692 - DNA, 1593 bp, Klebsiella oxytoca
atgattcacttgccaggttggcgcaatattccctccgccagaacgctttccatcatgatctttttcgccgggatcggcctcatcgtgtcggtggtttttctgctctatctctcccagcatctgattggccagaaagcgaacgaaattgataagcatcgctccgttttatcggttaatggcgcggtgcagacgtcggttaaccgcgtgctgtcgctggttctggataattccgtctgggatgatgccgtgagtcagacctatgccggaaggcttgatccgcagtggctctataattcctggggttctggtttcaagattaacaatctctatgacggtactttcgtactcgatcagcactaccgcgtactgtggggatcgtttcgcagccagcccttccccgggcaggatacgcagtttctcggcagcggcttccacgcgcttatttcgcagcatgccgccgcgctgcgcagcggtaaaagcgcctgggcaggcattacccgcacccgcgccggtattgcttttatcggcatcggcctgatccgtccgacggtcggacgcctgcaggtgtttgatgatacccgccgctatctggtgattacccgccatatcaacccgcaaatgcttgaacgtctaggcgatacgttccagattcgcaatctgcacgtcacccagaccggtggcgaatacagcattccgctacgtacccaggccggggaaaccgtgggctacctgagctggcagcccggcctgcccggcgccgaagcgtcgcgggcggcatcgaacagcattcggctgattgcagcggtggcggcagggctgatcctgctgtttatcctgttcagctgcctcgggctgtacaaactggcgcgtggcgaaagcgtggcgcgtcataccgccatgaccgactggctgagccgcctgcctaaccggcgggcgctgatcgaacggcttaatcaggtttgtgaaaattcgcgctatcagacgcaaagcgtggtgtttatcgatctcgacggctttaaggacgttaatgataactacggtcacgacgtcggcgatgcgctgatcctgcatatagcgaaggcgctgcgggagcgggttcccccggaagggatgctggcgcggatggggggcgacgagttcgcaatgacgataagcggcgcagaggcggccaatcaggcttcggcctttgcccgcgcggtgctggaactgttaaacgcaccgattatcctgagcggacgcaaaatctatatcagcgccagtatcggtattgccagcggcgtgccggcaagctgctccagcacggagctttttcgtcgcgccgatattgctatgtaccactctaaaaagactggcaaagggcgtaccacctggtatgacgacgcgctcagcgacgcgcggcagtatcagctcaatatcgagaatggcattcgtcagggactggagaacgaagagttcgatgtctggtatcagccgatcgtcaacgctgatacgctggtgatggaaggggtggaagcgctgctgcgctggccgcgacgcccgcagggggcgctgccgccggatgcgttatcggtatcgccgaaagcagcggcctga

SEQ ID NO: 179693 - DNA, 582 bp, Klebsiella oxytoca
atgagggagcatcgcctcgggaagttttgccactccgccctcggtcccccgggggcggcgcaaagcgcctgcccgggctacgggttcacagccgtctgcgggccggtagcccgacagatgcgccagcatcgcctccgggaaggcttgccactccgccctcggtcccccgggggcggcgcaagcgcctgcccgggctacgggttcacagccgtttgcgggccggtagcccgacagatgagggagcatcgcctccgggaagttttgccactccgccctcggtcccccgggggcggcgcaagcgcctgtccgggctacgggttcacagccgtctgcaggctgatagcccgacagatgcgccagcatcgcctccgggaaggcttgccactctgcagtcagtccccccggggcggcgcaagcacctgcccgggctacgggttcacagccgtttgcaggccggtagccggacagatgcgcagcatcgcctccgggaaaagcgcgtgcaatgtcgttagtttttactcaaatcactcagcagaaaggcaatactctgcccggccaccgtctgttcgagggcgattttga

SEQ ID NO: 179694 - DNA, 606 bp, Klebsiella oxytoca
atgagtgatgctatccgggtaggattaatcggttatggctacgcgagcaagacctttcatgcgccgttaatcagcggtacgccagggatgacgctggccgccgtggccagcagcgatgaaaataaagtgcatgccgattggcctgcaatgccggtggttagcgggccagagcggattttgaacgatcccaatatcgatctggtggtgatcccgaccccaaacgacacccattttccgctggcaaaggccgcgctggaggcgggcaagcacgtagtcgtcgataaaccctttaccgtgacactgtcacaggcgcgtgagcttgaagcgctggcaaaaagcggcgggcggctgctgtcggtattccataaccgccgctgggacagcgattttctgacggtaaaagcgctgattaacgaagggctactgggggaagtaggatactttgagtctcatttcgatcgctatcgaccgcaggtgcgtaatcgctggcgtgaacaaggcggaccggggagcggcatctggtacgatcttgccccgcatctgctggaccaggtggtaaatctcttcggcctgccggttagcatgcaggttgatctggcgcagtaa

SEQ ID NO: 179695 - DNA, 1371 bp, Klebsiella oxytoca
atgtccggatttccgcagcattttttatggggagccgctaccgcagcctggcaggttgagggcggacacgatgccgacggcaaaggcccttctatctgggatatctactcccatctcccaggcaccacttttcagggcaccaccggcgatatcgccgtagaccattaccatcgctttcgcgaagatgttgcgctgatggcggaaatgggtctgcaaagctatcgcttctcaatttcatggccgcgtctgctgcccggaggccgcggcgaggttaacgaggctggggttcagttctacagcgatctgattgatgagctgctggcgcataatattgaaccgatgatcaccctgtatcactgggatcttccgcaggcgctgcaggaggaaggcggctgggaagcgcgcagtacggcggaagcgttcgctgggtacgcccgcctctgctatcagcgcttcggctcgcgggtcaaattgtgggcgaccttcaacgaaactatcgtctttatcgggcatggctatattaacggcatccacccgccagcggtgcgcgaccctgcgcgcgcgattcaggcctgccaccacgtctttatcgcccatgcgctggccgtgaaagcgtttcgtgaaatggcagtcgaggggcagataggttttgtcaacgtactgcagccgcatacccctttaaccaacagcgaggaggatatgcgcgcgacggcgatggcggatgctattcacacccactggctttacgatccggtgctaaaaggtcaataccctgaagagctcctgcaacaaacccagacgctgtggggcgttccggcttttgccgcgggcgacgatgcgctgctgcgtgaaaaccgctgtgattttatcggcctgaactactaccgccgcgaaaccgtctcagcgcagcccccggaggttccgaccggcggcgaacccggcgtcgaggggctgttctattttgtacgcaacccgcaaagtacctataccgaatggggctgggaaatttggcctcaggggttaaccgacgggatcatgatgattaaagcgcgctacggtgacataccgatttacatcaccgaaaacggactcggggccattgacccgatcatcgatggcgaaatcgtcgacgacccgcgtattgactatctgagtagccacataactgcgctggaaaaagcgctggaactgggcgctgacgtgcgcggctattatccctggtcctttattgatctattaagctggctcaacggttataaaaaacagtacggctttgtttatgtcgatcatcagaacaatctggcgcgtaaacgtaaaaagagctttttctggtaccaaaacgttattgccagccgaggcgaacagcgttaa

SEQ ID NO: 179696 - DNA, 576 bp, Klebsiella oxytoca
atgggtcaccgcatccagaccaccgaaagcacacagggatttcggcatttccatgaccaggttagcatcaacaatcgccatatccggagtcagggcatagtcagccagcgggtatttctgcccggtggcatcatcggtaacaacggcgaacggcgtgacttcagagccggtgccagatgtggtagtgatcgccaccattttggctttaacgcccattttcgggaacttgtagatacgcttacggatatccataaagcgcagcgccagctcttcgaagtgggtttccggatgttcgtacatgacccacatgattttcgccgcgtccatcggggaaccgccgcccagggcgataatcacgtccggtttgaaagagttcgccagctcagcgcctttacggacgatggtcagagtcgggtcagcttccacttcaaagaaaacttctgtttcaacgccagccgctttcagtacggaagtgatctgatccgcgtagccgttgttaaacaggaagcggtcggtgacgatcagcgcgcgtttgtgaccatcggtgatcacttcatccagcgcgattggcagtga

SEQ ID NO: 179697 - DNA, 321 bp, Klebsiella oxytoca
atggaggaaagagaggcatttatcctgctgctgctggataaccagcatcgcctgattaggcacgaaacgctgttcaaaggcaccatcagccacaccgaagtccatccacgggaagtggtgaaggccagcctgagacataatgcggcagcggtcattgttgctcactgtcatccttcaggtcatgccgaacccagccaggctgacagacgggtgacagagcgtctgaagaatgctctggaccttgtgaatgtgcgtctcctggaccaccttgttatcggcggaatggatatcgtctcgtttgccgaacggggctggttgtaa

SEQ ID NO: 179698 - DNA, 450 bp, Klebsiella oxytoca
atggataaacacatttcactgacccctgaggtgacagagccattcatcctcactgccactgtcgtaccggatgaacagcgccttcgtttctggcctcagctctttggctctatcccgcaatggataacccttgagccccgcatctttgcgtggatggaccggctgtgtgcggattacagcggtggcgtctgggctttttacactctcagtaacggtggtgcctttatggctccggaagagggtgacggtatctggtcgctgttcaatatcctgaatggtaacggcgctgaaatgagtgctgaagctgcgggtattgcggcctgtctgatggcttacagccaccatgcctgccgcacggagtgcgatgccatgacagagcattattaccgtctgcgcgactatgcgctgaaccaccctgagtgcaacgccattatgcacatcatcgactga

SEQ ID NO: 179699 - DNA, 141 bp, Klebsiella oxytoca
atgaagggagggctgtcaggacgaaccgcacagggtaaacgcagccggactcgtgccgtgaacggcattgacggggacgttaagctcaaccgggcattgtgggtgatgactgaaaacatgctggccctgtctgaccgttga

SEQ ID NO: 179700 - DNA, 630 bp, Klebsiella oxytoca
atgaaattagcgagtcgttttggccgcgtgaatcagatacgccgtgaccgtcctttaacccgcgaagagctgatgagccacgtccccagcgtgttcagcgaagaaaagcatgaatcccgcagtaaccgttacacgtatatcccgaccatcaccctcctcgacagtctgcagcgcgaaggatttgaacccttctttgcttgtcagacccgcgtacgcgaccagcgcaggcgtgagcacacaaaacatatgctgcgcctgcggcgtgccggacagctcaacgggcaccaggtgcccgaaattatcctcctcaacagccatgacggctcatccagctatcagatgctgcctgggctatttcgtggcgtctgtaccaacgggctggtctgcgggcagtcattcggggaagtacgggtgccgcataaaggggatgtggtggaaaaagtcattgaaggggcttacgaggtgctgggcatttttggccgtgtggaggagaagcgcgatgcgatgcagtccctgatattaccgccacccgcacagcaggtactggcgcaggccgcgctggcgtatcgctttggtgaagaccaccagccggtgactgcctcccaggtgctcacccccccgccgctatga

SEQ ID NO: 179701 - DNA, 951 bp, Klebsiella oxytoca
atggctagtaaaaacaaaataattgtacatattggagatgatcttctttactcggttcttaaggatgaaattaagaaatctggagggaatagctccgaatttgtgcgtaagatccttgaggataagtgttcaaaaaaggttgcagaggagcgagttttattaaaaaacaattattctaactctaaaagtactgatgcaaatagtgcttaccctttaaatatgacgatagattcagagaggcaagttactaaagatggagtctttcggtttaataaaattgaagatagcttatacgatgactatgagtctgttttttttgggatgatgtgttttgacttcagtgacattaaaaacaaggtcaagaatgaggcggtaaaacgtattccgggaattataaaaaatgcatggttttctattgaggaaaattatagccaggctgatattaatctcatgtttgttgacagagtagatataagatttcttgaatataaaaacaaaaggttttatgtgcgcataaaagttaaatttcatgtttcgagatttctttttagtgctattgagcttaatgatgacattcttcgtattgatttcctcaatatcaaatatttgcgatttaaatatgttgcaataaatggatgtttatccaaaaaatatgaccgatggcttttcttaaagccgacaaaagaaacttcgctgggtggtttttttgctggccttttttatatacctaaaaagaaagaagtattgattgaggaaattaaacagttgctcaatagtcaggatttttgcaagaatggtatgctggagattcccggtaagtttgtgaaaatgcatatcaatagcgatcaaattaaagtggatgggcgctcttttgctcagggtttcaaaatactgaagcagagaatgaaaatacatagtgtgggggcgaaaaatccttcgtggctaaaatga

SEQ ID NO: 179702 - DNA, 645 bp, Klebsiella oxytoca
atgaacatcaaacgccataagcactacggcttaatgaacgcgatctatgtagaacgcatcatcgacaccgttgacaacgctctcaatcaatatccacgtatgttggcaatccggattgacctacgctttcccgatgaagaggacaggcaggattgccctacacagtgctattcaggcccggatgtaatctcccgcttcatcacatcaatgaaagcccaaattcgagccgatatttaccgcaagagaaaaaccggaaagaaatcactcaactgtaaaatgaggtatatctgggtcagggaatacaatcaggaaggtaacaaaaggcattatcacgttctgcttctgctaaacaaagatgcttatcaccgtcctggttatttgactctcgatgataactacgatcgctgtactctcttcaggatgataatccgtgcatggttaagggcaataaaacgggattatgctgagaaaaagtatcatgggttggttcatatcccctacagggcatactacttactgaacagtaaaaaaccttatttcagacaagatttacaggaactgaccgaaagagcgctttatctcgctaaagaacgtagcaaggataagtccgacggctatcgtagttttggatgttctcagggctaa

SEQ ID NO: 179703 - DNA, 219 bp, Klebsiella oxytoca
atgaccactcgaaataacaacaccactttgcttaacgacaaaatggtagatatggcattcatcacccgttttacgggattaactgacaaatggttctacaagctgattaaagacggggaatttccaaagccaatcaaactgggccgcagttcccgctggatgcaaagcgaggtggaatcctgggttcagcagcgcattactgactcacgcaacagctga

SEQ ID NO: 179704 - DNA, 1074 bp, Klebsiella oxytoca
ttgcactggatagttcgtttacgcctggcctggcgccaggtcatcactgcatttccttcacgtgcccggctggctgcccgtgatgcgcttgcgactgcactggcctgccttctggcatggatactggcggtatggctgttagggcatgagcatcctacttttgctatcgtcagtaccgtggtatgtcttgctcctggggtacccagtcatctgaaacaggcgagaaacctggtgattggctgtacgttcggtatcgtgatgggggaactaatgtggcagttccccgatacccatccactggtgcgcatgagcacaggtatgttcttcgcaattttgctgggagctgtcattggcccggctccggtggtaccaatccaggccggagtgtcggtggctctggttcttgcgatggggcctgaaagcgcgggtggcacgcgattagtggatgttctcctgggagcttctgtaggattattattcagtcaggtactctttacgtctaatccatttagtgacattgggcgttcaacctctgacttcctgcgtcaactcggtaatgggctggatcgaatgctgagagcctgcgaggcgcaaagcagtaagggagcagaatccgctcttagtcagctttcagaagctcagggcgctctggcagctcttcgtgctgctgtcaccgaggcgcaggtcagcaaacgctggtcgctacgggggcggcttaatgccggtcggcttgctattgtcacacaacgttatgaccgccacgcaatacgagcctacgccacggcccttttattagcggaaagtatcagccgggctatgtcacacacccatacaccgccaccagccgccgttatgacatattgccagtggttatcggatagttgcatgatattagcccggcaatcagccgttgttgcgctcatggaaggtgatccaatagcctgtctgggaacacaacctcattccattactgaaaagcatgatgaactactgccagaatgggtcatggtagaggataatgcacggcaactggagtatgccctgctggccctgctcggctcacgtgatgtatga

SEQ ID NO: 179705 - DNA, 1449 bp, Klebsiella oxytoca
atgactgaacaagtgcaggtaaaactggcatttccaatttggaagggcgttttcacgctctttgtgggtctgctaatctggtttacgcctccacccaccggactggatttttttgcgtggcatatgtttgcgatctttgccgcgacaattctggcgattattttaaaagtgatgccaatgggggcggtaaccatggtggcgctggttgtatcggcgatgaccgggctgaccccgatctccggcggaggcaacggtaaagtagccgcgctctccggctttgccaacggcactatctggcttatcggtattgcgatgtttatctcccgcgcggtgattaaaaccgggctgggcagacgcattgcactgtggtttatctcaaaatgtggacacagcatgcttggggtggcttacggcctggcgctgtccgatatggtacttggcccgggcataccttccgcctcggcacgcggcggtggtattatgtaccccataacccagtcgattgccactgcgtatcagtccgagccggggccaacggccagaaaggccggggcgttcctgatgatctgtgtttcacagattgatgccattatttgtgcgatgttcctgacggctatggccgggaacccgctgattgccgagctggctgccagccaggggattcaggttaactgggggacctggttcttaggtgccattatacccggcctgctgacgctgctgattattccgctgtgcctttattatatttatccgcctgagctgaaaaagacaccggaaataccgggtattgctcgggaagaactgcgcaaaatgggtccaatgtctctggccgaaaaaattctggcattcgacttcgtattgctaatcgtgctgtggactgcgggcgatatttttttccagatccccgccacgctatctgcctttattggcctggcgatcctgctgctctccaatatcatgtcatggaaaaacattattgaagagaaaacagcgtgggatacgatgttctggtttgcggtgctggtgatgatggccaatgccctgaataaatacggcatgattgcctggatctctaaaggtatcgttggctatatcggccatttcgactggctgatggtgttccttgtgctaatcctggtctacttctacacccgctatttctttgcttcggcgatggcgcatatttcagcaatgtatctggccttcctggcggtatccgtttcggtaggcgtgccgccgctgctggccgcgctgacgctgggctacacatccaatctgtcgatggggctcactcagtactccggcggccctggcccggcactgtttggctccggctataactctactggtcagtggtggggtgtcagtttcctggtgtcgatcatttccatcgctatctggctactggcaggcggcgcgtggatgaaaatcgtgggtatctggtaa

SEQ ID NO: 179706 - DNA, 366 bp, Klebsiella oxytoca
atgattgatgttttaggtccgtacaggtgcagacggcgaagtgttcaggaaaaaatcaccattgttcagcagagctttgagcccggaatgaccatgtcgctggtagcccgtcagcatagcgttgctgccagtcagctgttcctgtggcgtaagcagtatcaggaagacagcctcacagccgttgccgcgggagaacaggttttgcccgcgtcggagctggcatctgcgatgaagcaaatcaaagaactgcagcgcctgctgggcaagaagaccatggaaaacgagctgctgaaagaagctgttgaaaatggtcgacaagaaaagtggatagcgcatgtgcccttattaccggaggatggcaaataa

SEQ ID NO: 179707 - DNA, 726 bp, Klebsiella oxytoca
ttgaaacacaggctttatctgacttctgatgaaattgaatcaatgcttaccgctgcccttaccacaaacagcggtaaacgcgactactgtctgattttgcttgcattccggcacggtatgcgaataagcgaggttcttggtctcagctatcgtgatttcgatatgggggccggtcgtattaacgttcgcagacttaagaacggattctccacgattcatccgcttgaagatgatgaaagacaggccataaatgcatggagctgtgagcgttcaggctggaaaggagccgacaaatctgacctggtctttctttcccgacggggaacagcgctctcacgccagcaggcttatcgtattgttcgtcgcgcaggagaaaaggctggcattgttattgaaactcatccccatatgctgaggcattcttgtggatttgaactggcagaaaggggaactgatacccgcctcatccaggattaccttggtcaccgcaacatccgtcataccgttcggtatacagcaagcaacgccggtcgttttgtcggactctggcagagggctaatgaggttcagcgaagagatgaaacaagcagcgaaaatacccaatcagaacatattcgaactggtcaattggggccaaactgtatatatgtaaaaatatttctattttttgcgcaagtgaattttcagaattatttaccacaaaaaacctatatgattgatttataa

SEQ ID NO: 179708 - DNA, 546 bp, Klebsiella oxytoca
atgaaaatcaaaacactggcatttgttatcacttctgctctggcgctgacgtctgctgccgtctctgctgcaaccaccgttaacggtggcaccgtgcattttaaaggtcagttagttaatgcggcctgtgcagtagacgcaaactcagtagaccagactgttcaactgggccaggtacgcaccgccaaactggctgaggctggtaagtatagcgagaacgtcggcttcaacatcgtactgaaagactgtgacaccactattgcgactaaggccaaagttgcctttaccggtgtggctgtgagttccacgaatgcgaatgtacttgctatctcctcttccgccgccggtggcgccaccaacgtagggatccagatcctggattcccagagcaatcccctgggtcttgatggtgccaccttcagcacccctgtgacgctgaacgacggcaccaacaccctgccgttctttgcccgttactatgcaactggcgtagctactgccggtgttgctaacgctgacgccacctttgctgtgcagtacgaataa

SEQ ID NO: 179709 - DNA, 540 bp, Klebsiella oxytoca
atgatgcgttcgctgatactgagtctgctgtttcttctgcctcaggcgctgcaagccagtgatgacctggaattgtcgtttcccaacggtggtatgcgctttcagggggaactgcttgcagaggcctgcaacgtggaaacctcggatcgttttctggccgtcaatatggggcaggtccggaccaatatgcttcctgcgccgggcgcggatacggatccggtcgcattcgatatccatctccgggactgtaataaacacgtcagccagtatgtcggggtcacgtttaacggtgtggccgacggtaaaaatccggccgttctttcggtgggtgaaggcccgggcattgcccaggacgtcggactggccctctttgatgcttccagtacgcttatcccgatcaacagtccgccaaggcgaattgcctctgttgagaacggagaaacggtccttcatttcgtcgcaaagtaccgggctaccggacatcacgtgatgggaggaagggcggatgcacaggcctggttttcgctgacctacgaataa

SEQ ID NO: 179710 - DNA, 705 bp, Klebsiella oxytoca
gtgaagaaaaaaacgggattatcccgccggttactggccggtatgatgctgctggccttcacagggctttcatcgcaggcggaagctgccgtggcggtcggtgccacacgagtcatttatccggccggtcagaaacaggttcagcttgcggtcaccaataatgatgaaaaaagcacattcctgatccagtcctgggtggaaaattcggcaggtcagaaagacggacgctttgttatcacgccaccacttttttctatgcagggaaaaaaagaaaataccctccggatcatcgatgcgacaaataatcagcttccccgcgacagggaaagcctgttctggctgagtgtgaaagccatacccgccatggataaatcaaagacaaacgacaatgtcctgcagctggccattatcagccggataaaattgtattaccgtcctgccgggctgtctgttccgccagaaaaagtggcggagtccctgcgatttaaacgccagtccggaaagctcgtcatcagcaatcccacgccctattacgccacggtgacggaattaaacgccggtacgcgcaaactgaataacaccctggttccaccgctgggcgaggcttcagtggatctgcctgccgatgccggcagtcaggtcacctaccggacgattaatgactacggcgcgctgacgcccaaaatgaccggacagagccagtaa

SEQ ID NO: 179711 - DNA, 2628 bp, Klebsiella oxytoca
atgtcatatctgatatctgaaaaagggcgaaaagccccgggaaaaaggacgctctccggatattcatctggctgtcgctttacccttattccccttgctctggtgattgcagccagtcttccgtccgcccggggcgagctttattttaacccccgctttctggcggacgacccggctgccgtggcagacctttctgccttcgaaaaaggccaggaggccccggccggtacctaccgggtggacatctatctcaatgatggtttcatgaccaccagggatgtccggtttacggccagtgagaaggaccacagtttgtctccctgcctgacccggggacaactgagcggcatgggggtcaataccctgtccattcccggtatgtccgtgctggcagccgatgcctgcaccccgctttcaacactgatgccggactccaccgttcgttttgatgtcggccggcagcgtctgtatctgaccgttccgcaggtttacatggataaccgggcgcggggttatatttcgcctgaattatgggatccgggcatcaatgccggaatactgaattacagcctgaccggaaataatgcccgcagcaaaaacggcgtcaccagtaattatacctatctgaacctgcaaagcgggctgaatctgggggcctggcgtctgcgggataacaccacctggagctacagttccgggtcaacgcatgagaatcgctgggagcatgtcaacacgtatgttgagcgagacataactgcgttacgctcacgcctgacgctcggggaccggtataccgccggagatatcttcgacagcatgaactttcgcggcgtacaggtggcgacagatgacaatatgttgcctgacagtcagaaaggctttgccccggttatccggggcgtcgcacgcggcacggcgtcggtttccatcaaacagaacgggtatgaagtctaccggagtaccgttccccccggtcctttcgtgattaatgacctgtatgccgcgggcagcagcggtgacctgcaggtcaccgtcaaagaagcggacgggaccacgcaggttttcaccgtgccgtattcgaccgttccactgctgcagcgtgaagggcatacccgttttgcactgacagccgggaactatcgttccgggaaccggctgcaggagcatccgggcttttttcagggcaccgtcatgcggggtctgccaaaaggatggactgtctacggcgggactcagctggctgaccgttaccgggcatttaacgtcggggtcggtaaaaacctgggcatgctcggggcggtatcacttgacctgacacaggccaattcacgccttccggatgactcagaccatcaggggcagtccctgcggtttttgtataacaagtcgctgaatgacattggcacaaatattcagttagtcggttaccggtattcgacggaaggtttcttcacgctcggggatacggcctataagcggatgtccggctataacgtggagacacaggacggggttattcaggtcaagccaaaattcacggactattacaacctgtcctacagcaagcgaggcaaagttcagttgagcgtgacgcagcagctgggccgtcagtccaccctgtatgtgacaggcagtcatcagacatactgggacacgaaaaagtcagaccagcagttacaggtggggctgaatacggtcgtgcaggatatcacctgggggctcagctacagcctgaacaaaaatgcctggcaggataacagtgaccaggtgctggcgttgaacgtcaacattcctttcagtcactggatgcgttcagacagtcagtctgtctggcggcacgccagcgccagttataacgcatcccacgacctgcgcgggcgggcaaccaatacggccggactctacggtacgttactggaagataacaacctgagctacagcgttcagaccggctatgccgggggcggccaggggacatccgcagcaaccgggtatgctgcgctgaactatcggggtgcctatggcaataccaatgtgggttacagccataccgatggttatcgccagctttattacggcctcagcggcggggtactggcgcatgccaacgggctcacgctcagccagccaatgaacgataccgttgtgctggtcaaagcgccgggtgccggaaatgtcaatatccagaaccagacaggggtaaagacggactggcggggttatgccgtactgccgtatgccacggattaccgagaaaaccgtgtaggtctggataccaacacgctcgccgataacgtggacctggatgaagccgtggtgagtgttgtgccgacgcacggagcagtagtgcgcgccagctttgagccccgggtgggaataaaggtactgatgacgctgttatttaacggaaaaccggttcctttcggcgcggtggtgacatcggaaaataacaaaagcggaagcattgttgctgacggtggtcaggtgtatctcacgggtctaccgcttaccggccgactgctggcgagctggggaaataccccggatgcgcagtgtcgcgtggagtatacattgcctgaggcaagccgtaacaaggcgctcagcgaatatcaggcagagtgccgttaa

SEQ ID NO: 179712 - DNA, 543 bp, Klebsiella oxytoca
atggctgacaaatttaaccggtggtctgccgctgcgctggcgctgatggtgctgagtccggccccccttctcgctgctgacagcaccattaccattaccggcacgataaaagataacgcctgcgttgttgccccggcatcggaagagttcacggtgaacctgatgagtaatgccgtcaagcagctgttttccgtcgggagccacacgtcgccggatattccgttcagcattgagctcggtccctgcggggcctcagtggtggcggttaaggtgggttttgtcgggacggctgacgggaatgataccagccttctggcgatagatacgggggcatcggcagcgaccggcgtgggtatcgaactgctggacagaaataaaacgcaaatcccggtcaatgcagccagcagtgcgctgagctgggtgagtctgacaccgggtaccacgaatacgctgaatttttatgcccggctcaaagcctccgtattacctgtaacagcaggggtcacgaacggcaccgccacatttacgctggaataccagtaa

SEQ ID NO: 179713 - DNA, 507 bp, Klebsiella oxytoca
atgcacagtgtcacactaaaaatgagcctgctggcagcaagcctgctggcatttgtctgtccggcgttttctgcagatgtcaccatcacggtgaacggcagcgtcgtggcaaagccctgcacggtgtccactaaggacgtgacggtcgagctgggggatttgtacacgtttgacctgacgtcggccggcagcgcgtcagcctggcatgagatagcgcttaacctgaccagttgccctgtcgggacctcagccgttaccgccacgttttcggggaccactgattcgaccggatattacaaaaatctgggcacggcgaccaatattcagctacagctgcagaatatgtccggaacggatttaaagaacggcacacagactcaggtgtcggttgatgactcgacgctgtcggccagctttccattaaaggtgagggcactgacagtgaatggcggggccacacagggcacgatttcgtcggttatcagcgtcacctatacctatcagtga

SEQ ID NO: 179714 - DNA, 966 bp, Klebsiella oxytoca
atgcagcttatccgttttatcagagtgtttataattgcgtctgtcgcccagctggtatggattaatggcgccggtgcatttacctgttacgactccaccgggaatacagtcacaggcaaggatactactggaaatgtcgttgctacttctaacgtatatgtatcgctgcaaccgagtattgcggtagggcagaacctggttgttgacttatcatcttctatattttgtaaaaatgattttcctgactcaagaaatgaccttgtcagcatgcttaaagggtcggcctacggtggggtattagcaaactttaccggcaccatgaagtattatggttccagctattcttttccgctgacttccgcgaccgggacgcataattttacttcggggagctataccggctggaatacgcagctttacctgaccccacttacttcagctgcctcagctgccgggggggtggctattcagagcggcaccctgtttgcccagttggtgatgtatcaggtgggatcaaataaatctgatggagggagtatcagtacagcgacctttacctggaacctgtacgccagtaacagcgtggtggtaccgacgggaggttgtgatgtgtccgcgcgcaacgtgacggtgacgctgccagaatatccgggcaacgccgtggcggttcctctgacagtgaactgcgccgaaaaccagagtctctctttttacttaaccggcactacctccaccagtaccgatattttttccaatacttataccggtacgacggctgcctccggggtcggtatacagttgctccgtaacggcagtgcgatcccggcgaatcagaatatctcgctgggtacggtgggaacgtctgcagtcagcctcggactgactgcaaactatgctcgtacatctggtcaggttactgccggtggagttcagtcaatcattggtgtaaattttgtttatgactaa

SEQ ID NO: 179715 - DNA, 1296 bp, Klebsiella oxytoca
gtgatcggcgcttcagggttgtatatattttatatacccaaggaatccttttattttcttttaatgttaaagtatatttcagagaaaataaaaacacttcatcctgacattgatttggtatttatcagtgacgtatcgtgctcctggctttatcaaaacatactgcaaatggctggtggtgaaaggtttatttttcatgcaaagattgcttcatccagattgagtgtaaaacgtctggagcaatacttcctccgagtgagggagagacttcctttcacctccagagatacttttactgtcatcaatagagggttgggaaatgaagggttaactcctcgtgaaactgaagttcttcttgatttgtttaactatgctggcacaacgtttgtacaaaaaaataaatgtgtagcatcgaaaacgttatataaccagagaaaatcagggctaaggaaaatgattggaaattctgcagagcttgccggaaaacttccgggagcatcaaagagatggaaggccagactggctgaaaaagaaatgtctggttatgaaaaagactttgtgaccggtattgaaatgcaggaggtttatcaggtttatcaacccatagtaaatatttcacgggaaatttgcggcttcgaaatactcactcgctggcgccagaaagggtatgtaatctcccctgacgaatttattcccggccttaagtctgaaagcgtcctgttactgcttacagccatgagcctcaaaaatgcagttgatggaataaaccgatatggcggaaagtattttttctctattaatatacatccagagttgaatagctgccctggtctggttaaaatgtgcacagaggcttgcaggcagttaaaagatacccggtggaaaaatcagcttgtactcgagtattctgaaaaatcagactttcacaagtcatccgacattatagatgtactgaaatcaattagtcagctgggtgttactgtatatcttgacgactgcttctctgaaggaagtgtatttttcccggtcagaaaacactccttcgacgggtataagctggataaaagtattgtcgataatatattgaccagcaaagaagatatggcattgattacatctttgacaggttattgctctatgaccggaagacattgcatcgctgaaggtattgaagatatatttacatttgaaaaactaaagaagttaggtgttgaattctttcagggttatctgttctataagcccgcgagcattaccgacctgacatctttgattcaggaattgaagtctggctga

SEQ ID NO: 179716 - DNA, 168 bp, Klebsiella oxytoca
gtgattgtcagaataactgaaatacgcatggtacacagtcatggcgataaatcggttgtgtttataaaggacattcaggaacctattaaagttaatcacagactcgaagagatagaagaactcattaaaacgcagaatgctattctgaaccttaatgaaaaattttaa

SEQ ID NO: 179717 - DNA, 393 bp, Klebsiella oxytoca
atgagatacattaaaacaactctggcctgtcttacaataactggttcgcttttatcattcacagcacatgcttccagtgaactgaagggatgtgctgcaaaagaacatgaaatccaacaacaaattgactacgcaacccagcatggcaatcatcaccggttatcaggtctcgaaaaggcactgagtgaattacgtcaaaactgtactgatgaaaaactgactctcgaacgtcagcataaaattgccgagaaggaaagaaaggtcaatgaaagaatcgctgaacttgatcgggcgaaagaaacaggcagtacggataaaatccgtaagaaagaaaagaaacttcaggaagccaaaagtgaacttctggaagctcagaatgagctgaataagtaa

SEQ ID NO: 179718 - DNA, 213 bp, Klebsiella oxytoca
atgcaggtactgcttatttcactcgcactggttgcgatatcgttttcggtgcttttatttttttatgccttctggatattcttacaggaaggtgatgcgccatttgtgagcatacttgtggccctggcattcattgtcattagtttctattgcctcgtatggcatacacttctggtcctcagaagtcatggtatcaccgtacatatatattag

SEQ ID NO: 179719 - DNA, 468 bp, Klebsiella oxytoca
atggaaaatatcaatgcgctaaagaataaaattgatacaaaggtagcgaagtttgtattgctgtctgttgtcactggtggaatttatccaatgatgtggttatatctgaatcagccaaagttaacagagcacatgaagaatgaatttgttgccaaagattatcctctctggctggctatagtcactggttttggctggttactttctgatattggtatagctgtgagtgataatgtcactgtttttgaccttgtggcaaagcaacttatgtacgcttcaatgataatgtatctggtctgggcatttaaagctaaaaaggccttgcaggcttacacgttgaatgagtttaaattcgaagtgaaaatgaatctattctacacatttatatttaatatattttatatcgtttattgtataaatgatttggagtcgaaactacagaagcataacatcatccacagtagatag

SEQ ID NO: 179720 - DNA, 465 bp, Klebsiella oxytoca
gtgaagaaatatattaaatttcttatgctgattatttcagtgtcagtattttctgcgaatgctggtgagcagaaatcaccattcaaaatgttggtgcaaacgtctaaaacttatgtccatagtggtatatacagctaccgctataaatatacaatcacatcaatgactgatggactggtagttaatggtgttatacttaatcgaggtcaatgtaaaaccgatgctattgcgccgatgtctgccgaaaaagaacgtcagatcatggagcgtttaaaccgtaatgctattatgccgcgagaaaatagtaccccggcccaacgagatgaacctcgcggtgtaagcggcgtgctgaatttctccaaaacctgggtttttcattcaaatacaaatagttcatacacggattgtgctcccgttgaggttgtcatcaataccaacaaaggtcaatggtcattcaattattga

SEQ ID NO: 179721 - DNA, 420 bp, Klebsiella oxytoca
atgaaaagattactcggcggtgcagtgctgttaagcgcaggtgtgctctctgtgtctgcttatgcaaacccggaagattcctgtgatggcgaacaaaccatctttgatgcatatacccttaagggtgggaagcatgtcggcgtgtgttatgtctacgggaacgtccgctatgtttttggcagggattccggtaaacctgaaattttactcaatattcctgctgacaaagttgatttcagtatggcaggaaatggtgatcagagtgtgagcatacccaacggtaattatacctatgaggttggagaatatttgcggggcggtcctttcattaaggtctgtaaagggcagaagtttataactgaaatcaagttagatggcagcaactttgagaacaacatagcgcaatatgtcaatcgttaa

SEQ ID NO: 179722 - DNA, 888 bp, Klebsiella oxytoca
atggaatacaaagagaaaggcggttttaacccggtcaaagatgcactggagattttacctgaaaatatcagggagagtatttcaaggcgaataaatgaggttatcaactatgagccagtgattggcatcatgggtaagaccggtgcgggtaaatcgagcctgtgtaatgcgatcttcaagggagatatctgtgctgtcagtgatgtggaagcatgtacacgagaaacgcaggaagtacgcatccagtttggcaaacgcgcaatcagattgattgatattccgggggtgggtgaaagtgcagtgcgtgatggtgagtacgagcagctttatcgggaattgctaccgaagctcgatctcgttctctgggtcattaaaggggatgatcgagcattttcagcagatgaacatttttacaaaaacgttctgaaacctgccgggggtgaagagaagacgctgtttgtgcttaatcaggtagacaagattgagcctttccgtgaatgggatgtacagaatggtcaaccttccccggctcaacagaaaaatatttgtgacaagaaagcagatatcactcgccagcttggttttactgaccatccggttatcgctgttgcggccagtgaaggttacaacgtgactcaactggttgaagcgatggttcgggctctcccgaagcatgcgcaaagcggtgtagcttcgcaggtaaaggaggaacacaaaacaaaaaacgtcgtagaagaagctacagaagggttcggagataccgttgaacggatccttgatgacgttattgatgccacgctaccaaaaccggtggcagtcgtggtgaaagcggcgaaatctgccgttgtcggtggtttaaagaaagcctggaatttcttcttcggttaa

SEQ ID NO: 179723 - DNA, 291 bp, Klebsiella oxytoca
atgactacgatatgcccgcaatgtggttctgagcgcgtcagtgagcgaaatattggcaggaaggcaggaggtattgtcggcggagcggctggcgctcttagtggtgcaggtacgggggcagcaataggttctgttggtccggtggtgggaacagctacaggggctgtcattggcgcaatactgggaagatttgtcgccggtgagacggcaggagcggtaacaggagcattgcttgatggcgtcctgttcgatcagtatgaatgttgtgactgtgaacatacatttgactaa

SEQ ID NO: 179724 - DNA, 1212 bp, Klebsiella oxytoca
atggtgctaaccgatgtaaaagttaaaactgccaagccaaaagaaaagccatataagctggctgatggcggcggtatgtatctactgattaatgctaatggttccaaatactggcgaatgaagtaccgcttcgccggtaaagaaaagatgctctctattggcgtataccccgatatatcactggcagacgcacgagaaaggcgtaatgaggccagaaaaattctcgccgctggagacgatcctggtgaagtaaagaaagaagaaaaaatggcccagcaaatgagtctgaaaaacacatttgaagcagtcgctcgcgagtggcatcagacgaaagcagatcgctggtcattacgctatcgtgatgaaatcattgatacctttgagaaggatatcttcccctatatcggcaaacgccctattgccgaaatcaaaccaatggagttactggaagcactacgaaaaatggagaaacgcggagcgctggagaaaatgcgcaaggtccgtcagcgctgtggggaggttttccgttatgcaatagtcaccggtagagccgattacaatcccgctcccgatcttgccagtgctttagctacaccgaaaaaagttcatttcccatttttaactgccagcgaacttcctcactttcttaacgatctggctggctacaccggcagcattatcacgaagactgctactcagatcattatgttaaccagtgtacggacgcaagaactacgttttgcacgctgggaggatatcaattttgagacaaaattgtgggaaatcccggcagaagtgatgaagatgaaacggccacatattgtgccactttcagagcaggtcattgtgctgtttaaacaacttgaaccgatttcaaggcatcatcctctagtgtttatcgggaggaacgatccccgtaagccgatcagtaaagaaagcattaaccaggtcatcgagttattggggtataaaggccgacttaccgggcatggtttccgccatacaatgagcaccattctgcatgagcagggatttaactcagcgtggattgaaacgcagcttgcacatgtagataagaacgcgatccgtgggacgtataatcatgcgcaatatcttgatggacgtagggagatgatgcaatggtatgcaaactatattgactcgttagcaaacggtaccgtggtgcaaggcgtatttggtaaaacagcgtga

SEQ ID NO: 179725 - DNA, 645 bp, Klebsiella oxytoca
atgagcgaaaattatttaaatgaattttatattaacgaagaaaagcttgtcaaaaagatgggcgtcaccatcgaaactctcaggggctggcaggatgaaaagatatttccgaagccatcctatgttaccgagacagagacgactataagctcgttttttggtcagcatcggtacaggaaaataacaaaatggtaccctgaccaattggatgaatggggcttttttattaaaaatcatcatttttcgaaagacttgattgaaatggattttaagaatagatacatgaataccattattgggttacggtcaattggtgtttacgattctatctatgaagatatttgttcaaaagaaatgatattgaacgaagtctgggggcactttctcgatgggatatatggtatttgtactaaaaattgtaccccagaacaaattgccaccaaggatgtagcgacttattttatcagtgtgctaaccgaccagcaaaagaaaatcatgattgcggaaaacgataaagcaaaactggccattgccctggatctccttgatagcgttacgtcattttttgcgcctcacgaaagacatcaatgcagcagaaatcaatgtattaatgcggtgagaaaaaagtatctttgcgcgggataa

SEQ ID NO: 179726 - DNA, 435 bp, Klebsiella oxytoca
atgttcgatctcgtaaacctgcaattgtttgagttaattttccacctggaagttagcctgcatcaggcatcaacacgccgcagcgcgcagcttttgcagcagttgttgcatgacgaatttctggagatagaccgtagcggagaacgttacgataaaacgcagaccgtagcagcattaattaacgacgacgtggaggccatcaacgcttacagctttcagttggctttactaaccaaagattgcgcgttgcttacgtaccgcagcgaggttatcgattcagacggacgcgctgctaaaaaaacgcttcgttcgtcaatctggcagaggagccatatttgtgcaaatcatcaggaatgctggcagctcagatttcaccaggggacgccagtgaaagaagttcaggaagaagagcaggcgagcaagacggcgaattaa

SEQ ID NO: 179727 - DNA, 1605 bp, Klebsiella oxytoca
atgcgtatctctttgattagcgcagcggtttgctgcgcccttttttcggcttacggcgcgagtgcggccccgctcaccgtcgaacaacggctagcgcagctggaggcccggcttaatcatgcggagcaggaggccggagaggccaaacgtcgggcgcagcaggcggagctgcgcaccagcgccgcggaacaacgcgcggcggcagcggaaaagcaggtgcagaccctcagtcagcgcaccgcagcgaccgagcaaaagcagcaggctgccgacaaacagctggcgaaaagcagcctcagcgatggcttcgagttcaacgcctacgcgcgctccgggatgctggttgacagccatggtaaaggcgcgcgcggcggcccgggtgtctccccggccagttcgctcaacggcgatgcccacgttggccgtctcggcaacgagaaagataactacgtggagctcagcttcggcaaaaaaatgaccttcagcgacgggtcatgggcgcactttaaaaccatgcttgccgacggggcaaccaacccggatccatgggtacaggataacgacagccaccacctgaacgtgcgtcagctgtacgtcgagatgggcaatttcgccgatttttccgggccgttcaggagcgcttccatctgggcgggcaagcgtttcgaccgcgataatttcgatatccactttaccgatagcgatattatgttcctcggcggtaccggcggcgggatcaatgacgtgaagtggggtgatacgctgcgcggcgattactcggtctatgcgcgtaacttcggcgatctgggtagcgataactaccaggataacgatatacagaacctgatgttcaccgccaatcacttctggaacaactggcagctgatgaccacggcgatgaccgcccagggcaatgatgacctgaaagataatacctcgaccaccggcagttacgctctgcgcagcgataatacggcgaaaaacggctactacgcgatgctggcgtatcacgacaaacagcaattctatggcctcgcgccgggcgtatcggaaagcgccctgcagtacggcggcgggctgggcgccgaggcgcgccagcccggcagcgatggcgatcttaccgagaacgctaagtccctgcgttttgcgtcctacggcattttgccgttggggaaaaactggcagcttgctccatcggttatcgcccagcatagcgaagatcgctaccgcgatggcgaccgctacgattgggcaacctttaacctgcgggtttcccagggcatcacccgcaacttcgccctgctatacgaggcgtcctggcaatatatggacctgaatcccaacggccgaacctatcgctacgacagcggcgtgcatcaataccaggcggtgagcggcgatttttacaagctgaccttcgccccaacgttcaaagttggcgatgtgtttgatatcaaagcgaggccggagatacgtttctttgtcacgtggatgaattgggataaagacctggatcgttatgcgatcaacgatgatttcggcagtaaaggctttaccgccggaggaaactggaactttggcgtgcagacggagatttggttttaa

SEQ ID NO: 179728 - DNA, 447 bp, Klebsiella oxytoca
atggaaaccaacgattctattttgaaagaaatcgagaaatacagcgctcacattgataggtttagagcgcgagcaaacactcatggtatctggttgtttattgctacccttggatgctggggagtaactgatcccagtattcagatattggctttcgttatgcttttctttatttttttgtttcttctacacggtagctttccaggtgaaaagcgaacgtttaaaaagattcacgatgatataaaaaataaaatacttaataatttaacaccacaacaacagcaagaaaggtttcacgatcttcttatcgttgagaaaaaaagaaagtcacttattggaattataaaaacaacctttatctttatagcctgttatggtttttattttattagtttattttacttcatacagaactggcatagtgacaaagtgacaacgtgtatttaa

SEQ ID NO: 179729 - DNA, 324 bp, Klebsiella oxytoca
atgctgccatttattttcactggtcgacgaactgccgctgctgctgtagctccaggtggtgttatcgcgcagacgccaggcgccgagattcagcccgctctgcaggttcaggtacgcgtagttgctgctgccgccgatgtcgttatggacgttgttgccggtgaagttgtagttaagcagcccggcgttaatcccgtggtcccagagctcgggcggaatatagccgcgggcgcggttgcccataaacgcctggggtacggtcaggtacagccgctgcaggccggcatcaaagcgggtggtggcgtctttgatcatttcggttaa

SEQ ID NO: 179730 - DNA, 1473 bp, Klebsiella oxytoca
atggtaacctctgcaaaaatagtcgggctggttgaggttatggcgcaaaatttatccaaggaaaatcccccgtcttttaaggttgagcataccgatgaagacgcgcagacgttattgcgccagctaatggcaatttatgacgttaaaacgctggtggcgcagctggttgccgtcggtgagcagcactggagcccggctatcctcaagcgcgttgcgacggtatcgcgcgcggcagggcgcataagcgcgcaggagcaggcacatcttcgttcgctcctgccgcagcctccagcgcatcatccccactatggattccgcttcgtcgacctgttcgccggcatcggtggtattcgtcacggttttgaggcgattggcgggcaatgcgtgtttaccagcgaatggaataaacatgcggtgcgcacctataaagccaactggtactgcgatcctgagcagcatcgctttaatgaagatatccgcgatgtcacgctgagccatctccctgaggtgagcgatgaagaagccgcgcagcatatacgccaggcaatcccgcagcatgacgtactgctggccggcttcccctgccagcctttttcactggccggcgtctcaaagaaaaatgcccttgggcgcgctcatggttttgcctgtgaaacccagggaacgctgttctttgacgtggtaaggatcatcaccgcccgccagccgccaatttttgtgctggagaacgtcaaaaacctgaagagccacgacaaggggcggacctttcgtatcattatgcaaacgctcgatgagctgggttacgaggttgccgatgcggcgcataccggagcggacgatcctaaggtgattgatggacgccattttttacctcagcatcgggaacggattgtgctggtgggtttccggcgcgacctccagctccatgagggttttaccctgcgcgatattgcccacctctatcctgccagcagacctacttttggcgagctgctggaacccacggttgacgacaagtttatcctcaccagggtgctgtggaagtatctctatcgctatgcgcgtaagcatcaggagcgagggaacggttttggctacgggctggttgatccaacgaatccgcacagcgtggcgcgcacgctctctgcccgctattacaaagatggcgcggaaatcctcatcgatcgcggctgggatcggccattaggcgaaaaatattttgatgacccggagaatcagttgcgtcgtccgcgcaggctgacgccgcgggagtgcgcgcgtctgatgggttttgagacgccgcaggggtatcgttttcgtatcccggtctcggacactcaggcctatcgccagttcggcaactcggtcgtggtgccggtatttgctgcggtagcgaagctgctggcgccgcgaatcgaaaaagcggtagccatgcgtgagcaagagattaaccatggccgacgtccacgataa

SEQ ID NO: 179731 - DNA, 495 bp, Klebsiella oxytoca
atgaaactctggagtaaaacgctaatcgcttctgccgtatgcttatttcttgccggctgtgatgattcctcaaaggttgatgctaatctggataaagcaaaagataacgcccaacaaattaaagaggcggcgtccgataaagccgacgcaattaaggatgaagctgataaacacattgatgcaataaaaaaacaggcggcggacgaggccaacaatctcagcagccaggcctccagcatcaaggcggaggcggataaaaaagcggaagcaattgctcagcaggcccaggcccaggctgatgccgtcaagcaggatgcccggcagaaaagcgaccaaatcgtgcaggaagctggcaaaattaaagacagcgcgattgttgatgccaataatctggccaacgatgcggcgaataaaacaaaagaaattaaagagagtatcgctcccgctaaaaccgcagaagatgcggccaatgcgaaccagcagacatcacactga

SEQ ID NO: 179732 - DNA, 153 bp, Klebsiella oxytoca
atgaatattgatatcggttcagcgcggaagacgattttgggtgggatggccctgataagcgtatttggtttggtctatgtcagtaaaaaagcctgctcgcgagcaggctttccacagagattacatggatatactaagcattttgaccgatga

SEQ ID NO: 179733 - DNA, 651 bp, Klebsiella oxytoca
atgagtcaacaggaacgggcaaccatccttctcatcgacgatcacccgatgctgcgcaccggcgtcaaacagctgatcagcatggccccggatatccaggttatcggcgaagccagcaacggcgagcaaggtattgcgatggcggaatcattggatcctgatttgattctgctggatctcaatatgccgggcatgaacggtctggaaaccctcgacaagctgcgcgagaagtcgctgtccggccgcgtggtggtgtttagcgtctccaatcatgaagaagacgtggtgaccgctctgaaacgcggcgccgacggctatctgctgaaggatatggagccggaagatttgctgaaagcgctacagcaggcggcggcaggcgaaatggtgctcagcgaagcgttaaccccggtgctggctgccagcctgcgcgctaatcgcgctacctcagaccgcgacatcagccagctaaccccgcgcgagcgcgatattctcaagctaattgcccagggcctgccgaacaaaatgatcgcccgccgtctggatatcaccgaaagtaccgttaaagtacacgtcaaacatatgttgaagaaaatgaagctgaaatcgcgcgtggaagcggcggtttgggtccatcaggagcgcgtattctag

SEQ ID NO: 179734 - DNA, 1779 bp, Klebsiella oxytoca
atgttgaaacgactttttacgccgctgacgctggttaatcaactcgcgctgatcgttctgttggccacgatcatcggcgtcgccggaatggcgatctcttcccgcctggtgcatggcgttcagggcagcgcgcatgccattaataaagccggttcgctgcgcatgcagagctatcgcctgctggcggcgataccgctgaccgacagcgatcaaaagctgctggatgaaatgacggcaaccgtctttagcccggaactgcagtacgccgctcgccatgacgatcagcagcggcagctccaggcgctgcagcactactggcagctggagctggcgccgggaatgcgcaaagcgcaaaatcaggcctcggtcgcgacggatgtcgccggctttgtcgaccgcattgaccagctggttaccgctttcgatcacaccaccgaggagcggattaaacacgttgtctggatccagcgcatcatggccgtggggatggcgctgctgctggtatttaccatcgtctggctgcgcgcccgcctgttacgtccgtggaaacagctgctcggtatggcccgagcggtgagccgacgtgatttcacccagcgggcgcagattagcgggcgcaacgagatggcgacgctcggcatggcgctgaacaacatgtccaaagagctggcggagagctattcggtgcttgaacgccgggtgcaggaaaaaaccgccggcctggagcaaaaaaacgagatcctcgcctttctgtggcaggccaaccgccgcctccactcgaacgcgccgctctgtgaacgcatttcacccgttcttaacggtttacaggggctgaccctgctgcgcgatattgaagttcgcgtatacgaccttgaagacgaagacaaccatcaggagttttcctgccactccgatattcagtgcgacgacaggggctgctatctctgtccccgcgacctgccgccgctgcctgataccggcaccactttaaaatggcggctgtcggatgcccataatcagtacggtattttactggccaccctgcccgccgggcgtcatctgagccacgatcagcagcagctggttgacacgctggtggaacaacttaccggcaccctcgctctcgatcgtcatcaggagcgccagcagcagctaatcgtcatggaggagcgcgccactatcgcccgcgagctccacgactccatcgcccagtcgctctcctgtatgaaaatgcaggttagctgcctgcaaatgcagggcgatgacctgccggaagcgagccgccagctgctggggcaaatccgtaatgaactgaatacctcctgggctcagctgcgcgaactgctgacgaccttccggctacagctcaccgagccgggactacgtccggcgctggaggccagctgccaggaatacagcgcccacttcggttttacggtacgcctggactatcagctgccgccgcgttttgtgccgtcgcatcaggccatccatctgctgcaaatcgcccgggaagcgctcagcaacgcgctgaagcacgccaatgccaccgatgtcagcgttaccgtggcgttgcgggacaatcaggtccgtctgacggtggccgataacggtcgcggcgtaccggaccatgcggagcgcagcaaccactacggcctgattatcatgcgcgatcgcgctcagagcctgcgcggggactgccaggttcggcgccgggaaaccggcggtaccgaagtggtggtcacttttatccctgaaaaatcgttttcaatccaataa

SEQ ID NO: 179735 - DNA, 942 bp, Klebsiella oxytoca
atgctcaggaaaaagctgttggcctgtcttatcgggttgggaagcgctcaactggcggtagctgaagaggccaaaaagagcgcgatagaatttgatagtgaaaccttaacgtctttgggtatcgatccacaaattgcgcattatttctcttcagaagccaaattcctgccgggagcgacctcggttatgctgggcgttaacggtaaggataagggaaatatcgtcgcccactttgatgatgacggccagctgtgtttcgataaagcgtttatggaacaggccggtattcgccagcccgcgaatgatagcgagggctgctacgactatttacaggcccatcctgaaacgatcctgaaagcgtcgccaggaaaaggacggctcgatctgatattaccgcaggagcagttagttagccaaagtaccgacctcagcggatacgatacgagcggtacggctggggtgctgaattacacctttttcgcttcgcgcaacgattatagcggcggtcattccgagtattcgcagctgatgctggacggtggtctaaacgtgaatacctggctgctgcgtagccatcagctattaagccgtgcgaataatcagtttaccagcgaaaattcgcagacctacctgcagcgcacctttacgcagataaaaagcaccgttaaggccggagaggtaggcatgaataaccctttgctcgacggcaccgagctatacggtatctccttgatgccggagagcgcccttaacgatgccgggagcggcgtgctggtaaccgggatcgccagtaccccgcaggcgcgggttgagatccgccagcaagggattatggtgtattccactttagtgcctgccggcccctttaccttaacggatattcctctgcgcaacgtcaccagcgatctgacgatcaccgttattgagaccgatggcagctag

SEQ ID NO: 179736 - DNA, 696 bp, Klebsiella oxytoca
atgaggtacgcttttgttttattcgcgcttttactcagtccgatccttcacgccggcgataaccttagtattgattttaccgtgaccgcagaagcggcggcgtgcacgccaacgctgagccataacggcatcgtagatttcggtgagcggcatgtcgggtcgctatcaacgtccgcgtttacccagctaggcgtgcgggatattaccttaacgattacctgcgaatcctccaccggaatcgctattacggcgagagatgcgcgatccagttccgctattacgggaaaagatacacacggtcatgagggagtgctttttcaggtcaatggcggcggatacataagcgacaaatcacggctttttggtctgggtatgacgatggaaaataaacctattggcagctatgcgatgcaaatcgattccgccaataccatcgcggttgatgataaaaacgttgccgttgatatcgccggatcggccagcaaggagggaccgtgggaagtttcctcgcttttaccgctcccaacgggacaggactatttctatacctttgtgaaaaaaggctcttcggtgccgcagccaatcacggcggcaacggtgcctctgcagataagcgcatcggtgggaagtaatctcaggagcgggcaaaaggtgacgctggacggcgaggcggtaattagtattgtctatctctga

SEQ ID NO: 179737 - DNA, 402 bp, Klebsiella oxytoca
atgctcaatcagctggcaggctgcaactcaggtaatagtcgggataatatctacgcagaacatatccattacgataaagaaaagcagatcctcactatggactctatcttcttatccgaaagttttagcgtcttcctgccgttaatcgtctgcctgcgcggcctggagagctatatcacgccagcaacaccaaataacttcctgataatctatccgtactggtggggagacacatcccagagcctgtcgccagaaacggatatgtatcttgagttcgctgatggcagtagccagctgcggtcaaaaacctctgcggaaaatatcgccattgccaacgccttctttgacgaacatggtgaagcgctggcagaggagctctacgaaaaacagggatttatttga

SEQ ID NO: 179738 - DNA, 711 bp, Klebsiella oxytoca
atgaagagtattgtttttattattgctgtggcaatttttgcggtgctttttgtctggaacatgttgccggagaggagtgattcggtaatcttcctgccgcaggaaaagacaaattcagcctcaacggttaaacagatgatttatcccggcgatcgcctgtttatacgcattctgaaggcggaagataaactggaattgtggttcagtaagagcgggaagccctatgaactctataacacctggaccatctgcgcctggtctggcgggtttgggccgaaaaaggctgaaggggatggtaaaagcccggaggggttttacgctaccaccaaagcgctactgaatcccaatagccgctatcatcgggcttttaacattggttatcccaacgattatgatcgggctaacggctataccggcagctttattatggttcatgggagctgcgtttcggcggggtgtttcgcgatgactgatgccggcattgatgagatctataatctggtggcgcaggcgctgaacagcgggcaggaaaccattccgctttatatctttccgttttccatgacggagcagaatatgcaacgagctgcgatgtggccggaatatacgttctggcgttcgttaaaaccggcgtacgactattttgagaaataccaccggcttcctgaaattagggttgtcaatcggcgctatacccttgtcacaccctga

SEQ ID NO: 179739 - DNA, 1344 bp, Klebsiella oxytoca
atgaacactgcccgtatcagtattaaagaaaaatttagctatgggttaggggataccggctgtaatttagtctggcaaacagtgatgctgtttatggcctggttttataccgatgtatttggtttaagtccggcgcatatgggaaccatgtttctcgcggtaagggtattagacgcggtgaccgatgtattaatgggggcggtggcggatcgtacccgaactaaatatgggcaattccgaccttatattttatggttcgccattccttttggcgttctttgctgcttaactttttatacgccggatttcggctataccggcaagctcatttatgcctatgtttcttataccttattatcgctggtttatacggcgattaacgttccgtattgcgcgatgatcaataatatttctaacgactctcgcgagcgcgtatcgctccagtcctggcgctttgcgctcagtacgcttggcggcctgattgtttcgctgaccgcgctaccgctggtggcgtggttgggccaggggaatgtacaaaacggttatttttacaccatgatcgtaatggggggcctgagcatcatcctgttctttatctgttttggcctgacgaaagagcgttacaccacggatatcgcggtcaacaaccaaagcagcattcttgacgatctaaaaactctgctcgccaacaaggactggcgcattttgttcgcgctcaacgtcgttaacctgattgcggtgctgtttaaaggcgggaccacgctctattacgtcaacaacattatggggcgggcggatctgggtagcctgctgctgaccaccaccctggcctcgggcgtgctgggggcgatgctctcaccgtttatctttaaaaatattgataaagtgaaagggtttaaaatctcgatggccatcgaggcggcgctgctgacgggcatgtacttcgtcccggcggggaacgtagccgctatctttgcgctggtgattatcatcaatattatccagctggccgccacgccactgcagtggagcatgctgtccgatatcatcgatgcggaagaaaaacgcagcggtaaaaagctcagcgggatcgttttttcaacgaacctgtttgccatcaagctggggatcgccatcggcggcgcgctggtgggctatatgctggcctggggcgactacgtcggcggcgcagcccagcaaaccgagtccgcgctgcagatgattaagctgttgtttaccgtcttccccggcgtgctggtggcgctgctgattgttatcatgagcaaatatagtctggacgataagcgcctgtcgcgcatggcgcaggacgacctcccggcgtaa

SEQ ID NO: 179740 - DNA, 555 bp, Klebsiella oxytoca
atggtgagatggttgcggcggcggattgcatttcagtgcgtcgaggcttttgataaggcgggcatagaggttattgttcataaaggtattctgcagcgggaatgtgcaattctctatcgtgctgacgttcgcagcgaaattaatcatctgcgcaacgcaaccgatgaagaccttaaggcgctgaacgcggattccattgcccgccgtactgcatggttctgccaaaataaagccgggttgaatattggcgatagccatttattagacaccgcacaccgcttacttataacgcgattccacgctgcagaggttgaaatgcccgtggtgaacagaactgagaagcaaattactttccactctatgaatttctgcccaacgcttgaggcatgcagaattctgcgcctcgatacccggcacgtttgcaaactcctgaatgaagagtccaccgatatgttagtgaaaaagatagatagccggcttcgcttctctcgaaattataataacctcagaccatattcctctttctgcgaagaatctatttctattgaggattga

SEQ ID NO: 179741 - DNA, 894 bp, Klebsiella oxytoca
atgaaattaatcgacttgcacatgcattcggcatatagcaacgatgccgatttcccggtcagcgatctgcttaccatggctaaagcggcgaatcttgcggccctggcgataaccgatcacaactcggcgcgatccgttgaggagtctattcgctatggcagagcaaatagcgtaagcgtgatgaccgggattgaaatcgactgcgcatttgcgggcaataattatcatctgctgggctacggttttcgtcgagacagccgggattttgacgccgtcgaacacaacttccatcgtctggaaactgccgcgacgccgctaaagctggagaaactgcgggcgctggggttccagcttgatgaagatcgcctgtatgccatggccggcgatcgggtcccgcaggaagaggagatggcagaacttattttagaggatgcgcgcaacctgaatcatgatctgctgctgccttaccgcgcggggaatgcgcgcagcgatatgccgttaattaactttttttgggacttttttggccgaggcaaaccctgccaggtgacggtggaattgccgccgatggcggagatggcggcgctgataatcgacaacggcggcattccggtcattgcgcatatcggcgctaacgtgaaggaaaagccgctggcggtgattgaccagatgttgccgcttggcgtacgcggcgtggaagtgttctccagctatcatgatgaggagctatgtcgcgaactttatcactacacgcaggataaatcgctgctggcgacctgcggcagtgactttcatggtaaaaacaaacccaacattaagcctggcgactgtagaccatggcgtgacgcgctaccgaaaaccctggaaatcctcgagcaggttgatctttattga

SEQ ID NO: 179742 - DNA, 2595 bp, Klebsiella oxytoca
atgtccccaataaccgaatcttttaagaaacgttttggtaatcatcagcttaccactacgggcgatccgtgctgggttcctcccgcttttccgaaagagggccggttgcttttaagccagcggcaggtcaacgccaatataatcaaaatcgacagggaggaggcattatttcgccaggagtcccgccggcaaaaaagcagcccctgctgtaagagcttgcatatcagcctgttttttgacggtaccaataataatgcgctaaaagataccgcctgcatgccgccgcacccgtcgaacgtggcaaaactataccgtgcctgcgcgcctgatgatctcatggcaaatgagcgtggattttacgccttctatattcccggcgttggtacgccttttccgcagattggcacctatgactattattcgtcgggactgcagtttgctgtcggcggcgaggaccgtatcaactgggggatggtgcagctgtgtaatgccctgaaccataccgtgacaaaaaatttcctcggcaacggcataatgaaaagggcggttcaggcgatgaacagctccagcacttcggcggctgtggaactggggttattcgcgggcagcgcggcgatgtcttacaaccgtgaaaaagtaaaccaggcctatctggactcgcggaagacaatgcctggtcagatgcggatgcggctgcgtatgtttgaacaactcttaaggctggtgcaggaaaaattcgtgcgcgcgcagtgcaagacggcagcgataaagctgtttgtgtacggtttttcccgcggcgcggcagaagcccgcgcttttgtcagctggctggatgaggcgctggccgaagggctactcggtttcccggcaggaacgctgctcggcgtgaaggtttcggtggaatttttaggcctctttgataccgtgccggcagtgggaattgccaatgtggttccgggctttaccggtcacaacggctgggcggaacagacgcagccgctgacgcagtcagggttaatcaagcgctgctatcatctggtggcggctcacgagcagcgccaggcattttcgttggactccatccgtaccgccgctggcagctatttatcccagactcaggaagtggtctaccccggtatgcactccgacgttggcgggggatacccctgtggggatcagggcaagggccggggcggtgcgggcgatctgttatcgcaaattactctgcatgatatgtatgcggccgcgatggatgccggggcgccgctgtcgtttcatcctgatgtttttgccctgttgcacccggatttcaggcaaatgtatatctttcgggaaatgagttttgcttcagttggggaatttgatttttatcccggactggtagacacctttaacaactggcgatcgaccctctcccttgacaatcagcaggaggatccgctgtctgacgatgctatctacgcgccgtttcgttttgagtcagtctgtctggaagagatgctggaagcggaaatgatctggatgaccggctggcgtatcgcacgttttgcttcgcccaggacatcgccaataaatctcacgtcgcagcccttcttccagcatgcgccccagcacccggagattaccgcccagccgtatgcggcagggttcagccaacaggcgcagcgcgcccttgcccgtgagtggtcgcttttgcaatgcaaagctgaggcgatagcgcaggcgcgtaataaagaggcgtccagacacaggggcgatgaaaattggttccctggcccggagcttgttgggcaaccgttgttcgatgccaacaacgcccgcggtcagctttgggaagccgccaccgagtttgcggcggactacatgcgtaaagctcgcccccaggcgctgtttaaaccggcgatgaagcagaaagcgcagggggcgatcgattcggccacctgcactattgccgcaagtgccgaaaccggcttttcatgggagataagcacgacggcggcaaatctacagatactggatccactgctcgcccaggcggcctacttttatacccatcagaatgaagcctatgaatatctgcgatttaagccggcgggcgagtacagattccgtcagcatattgagccgtgcctgttgaaacgagagcagaacgataaaatcagcgggctgatcaatctgtatgataactatatccatgattcccgggcctggtttatgcactcggaaagcggcgtcagagagccttttggcagctactttttatccagaatgatctattttggcgataagtggagcaaggccgtccagctgcgctttgatgggcaaacgatgtcaggtattagcgaggcgctgcaggataaggccatttttgctcatgtgccaacctacggtgtaaaggtctttaaccgtgataccgggcaagaaattcccgttgacgaaagcagtctgccagcgcccacgcatgagtttatcgtgcagcttaaacccctggttaaacagcgccagcaggcaacggaaacggccagacgcgagcgcatcgcaaatgcgctcaacgacttatgggactccgaaatactccattcacctcaggtataa

SEQ ID NO: 179743 - DNA, 504 bp, Klebsiella oxytoca
ttgcagcaacacccaggaaagccccggcttgtgttgaacacgggccgcagaaaattgagtcgaatcccggcggcttatctttcggccttcccatgccagtttcagcacccggttgtgttgaaggagctacggttatgcctaaaatacggtgcagctcagccgattaagcggtcacagcatcttttactgttgatttttcgggatggcagaagccaggagcgtgatggccagcatgccctggccaccgctaaacagagctctgctattttaccccgcttttatgggaatacgcagggcagcgccgggactcatattaaccttcgtgcagcccgcactctcttttcaggccaaagaagcgcgtttcttcctccgccatccccggctcccatttgcgcgtggtgtgggtatctcctaccgacaaatagccctgatcccaaagcggatgatatttcaggccgtgcttttgcagatactggtaaaccgtgcggttatcccagtcgatga

SEQ ID NO: 179744 - DNA, 549 bp, Klebsiella oxytoca
atgaatgtagacgcctacaaaaagaaaataacgctcagtcgtatcgcctgctttattgccttgcagtgtgctttatctattcataataccgcattagctcgcgagtattttaatccggcctttctcgggatcgatgggccgggaaaggatctgaccgacctctctgcttttgaagaaggcatcggccagataccgggaaactatcatgttgacgttatcgtcaataaaacatcagtcggtctatatgatattgactttgtaatgcaaaaagatagccagggcaacgctacgctccagccctgtcttagccttgaggcattacaaaaatttggtatccgtacacagtcatttccccagcttgctgacggtaaagattgcgccaacttacaggttattccacaggccaatgcggaatttgtcttcgatcgccagcagctacgcctctctatcccacaagctgcattaaacaaccatgcccgcggctatgtggctccggagcggctagacgaaggaattaatgcgctactgctgaactacatacaactttag

SEQ ID NO: 179745 - DNA, 378 bp, Klebsiella oxytoca
gtgatttccctggatacggcgacgctaccggataatgccgacgtagagctgacctcacaaaccgttacgcccactcgtggagccatcgtccgcacccactttgcggctcacgtcggcaaacgagtgttaatgacgctcattcgccgcagcggtgacgtcgtcccctttggcgcaatggtctcaatcaacggcgtcgacaagccgtccggttctatcgtcggcgacggcgggcaagtttatcttaccggcatgccgactaacggtaccgccacggcaaaatgggggcaaacagcgtcagaacagtgcgagtttctctggcagctacctgacgtcgaccccgcaagcggggtcgctgaactaacatcctcctgccaatag

SEQ ID NO: 179746 - DNA, 510 bp, Klebsiella oxytoca
atgaaaattaaacaaggagttctggcagctttggttaccgccagctgcggattcttcacgcctttaagcctcgcggtcaatatcgatatcacgggaaaagttatcgcctctccttgcgaggtcaatggcggtaatgactccctttctattgatctgggtgattctattcgggccggcgatatctttgagcctggcagtggcagtgaatggaaacaggctgaacttgtgctgatttgtccgccttcggccagactttttaatgtgacatttacgggcattagcgatgatgacgagccggcttactacaagaataccggtaccgctcaacgcgtcatggttgaattaaccgatactaagtcagaaacagccttcaaaaacgggacgactctggaaaatctcaaagtacagggaggctatattctcaccatgcgcgcccgtgcggtttctaaatggaatcccatgccgggcaccatttcagcgcaggtacaggctaccattacctatccgtag

SEQ ID NO: 179747 - DNA, 912 bp, Klebsiella oxytoca
atgcgcttacgctttatttgcgcgctgagcctgtgctgcatctcatcattcagctgtgcagaagagcgctgtgaggtgcttgctggcatcgctgctggtgaggctgcttacatctataatacagcgcgggtaaaaactaagggtcggctgcatttctattccgcaccagccgccaaatgccagcttccagcctttttgattaccggggataacgtcgaagtgcttcgcagcatggcgtcgggtggctctcttagcgatcggtatcaatacatacgttttcgcgattcgaatgggcaatttgccgttggctgggtgaacgctgccgggctggcaatacagaagaatcccctacccgttagcaaagaatgtcagcaatgggcgaaccaggcgatgccgcagcgcgtaagcgaggcgcctgccctgcataatcactatcaggttcaaggatccggacgggcctggttctacacaatgcctgatgaacaatgccgcagccgtaccttttttttattacccggggataccgtttccgctcaggagcaatctaaagatggttatattgaggccgtttattacaccgccgatcgccatatcgtgcgtggctggctgaaaaaaacacggcttatcccttcaaagcacggcgatagctatcgcgaggatatcaatccgctatcaacggacaaagcatcgcggctggtaacccttaatttacgtcacgactatagctgtatattttatgaaagctgggacgcggaaaaagagatacaaatgatggtgcgtgaagatcatcaatctccgcgttgtcgcggtgcaggcgacccggaaacatcacccgtcatcgcttacatcagcgttaataaactcagcggcgttattcgctggccggatgtcgcagaaggatttgaaccataa

SEQ ID NO: 179748 - DNA, 1014 bp, Klebsiella oxytoca
atgtccgattttctcctcgctcgcgtttcacaaacgctcgccaatgaacacaccctggaaacattggttcgacagctgcttgagatgctggagcttgttacccgaatggaatctacctacctgactcgtattgacttcgaggcgcagcgccagcagattatgtacgcgcacaatagcagcgaaatgcagatccctgaaggtttctccgttccctggaatgactccctgtgtaaacgtgcgctggacgaccgctgcatattcagcaacgatgtcgccgagcgctggcgttcgtgtatcgccgcccaggatttgggtatcgcaacctttttcagcatccccgtgcgcctgaccgatggctcattattcggcacgctctgcgccaccagccgggaaagacagccctataacattgagggtgagcaggtgatgaatctgtttgccaacctcatttcgcactatgttgagaaagagaccctggtgcagcagcttcgggcagcaaacgtcgcgctggagatgcactcgtacaccgatgagctcaccggtttgccgaatcgccgctcgttgttcaagcatcttgccgcacagtttgcgcaggccagagaacgccagcgcagcgtactgctcatttttatcgatctcgatgatttcaaggcaatcaacgaccgattcggtcacccctgcggtgacagctttctgattcaggttggagaacgcctgttggcccgcgcccgccgcggcgatattgttggccgcctgggcggcgatgaatttttgctggttggcctatgttccgaagcggaggaacaacaggagtatattgccgctttacgtaaagagctaacggggagctatttccttggcgcgcaccgaattaactatcccggcgccagctttggcgtgattgaagccgacccacaggcaatggacgttgagcaagcgctacgaagcgccgacgacgcgatgtatcaggataaaaagtcacgtcgccagggaacattttttcatattgactaa

SEQ ID NO: 179749 - DNA, 1071 bp, Klebsiella oxytoca
gtgggaagaagaagaaaccatgagagacgtgatttgccacctaatttgtatgtaaggaatggaggttattacagctatcgcgatccgcggaatgggaaagaatatggtttaggcaggaaccgacggcttgcggtcagtgaagcgatacaggccaatatagaattacttggtgacgctggtcatattccgcttagtacgcgcatcagtcagatagactccgttaccttacattcatggttagagcgctatgaaaagattgtcgcctctcgcgggttaaaaccgaaaacacttatcgactatgccagtaaattaaggtcaataaaggaacgaatgcaggacattcctattgccgaaatcaccactaaacagatagctattatcctgaatgattacgctaatgaaggaaagcatgcaatggcaaagctaatcaggtcgacgcttggagatatattcagggaggctatctctgaggggcatatcgcagtaaaccccgtcacggcgacgagagccgctaaatttgaggttaaacgcacccggctgaccgtagaggaatatcgggagatttaccaggctgcgggaacgctatcaccgtgggtaaggttgtcaatggatctggccgtgctaaccgggcagcgtgtcagtgatttatgcgctatgagctgggaggacattcgcgacgggtatctgtacgtagagcagaaaaagacaggggccaaactggcgataccagtcgggctaaaaattgaagagttaggcatctctctgcagggagttttgcagaaatgccgtaagctatccgcaggaaaggccattatctcatccagtagcggaaagtgtttgtcacccactacagtctcgaatgctttcaggcgagcccgtgagctttgtggtattaactttacaggagggccacccagttttcatgaactcaggagtctgtctgcaagattgtacagcaaacaggttgatgatagttttgcacagcatttgttagggcataaatcaggcagcatgacggcaacatatcgtgacgacagaggccgcgagtgggataaaattgaaataaagtaa

SEQ ID NO: 179750 - DNA, 387 bp, Klebsiella oxytoca
atgaatatcaccgaacttaccccggaggttgccagagagtccggcagcatcctgattatcgtcgctgcacggttggtacgtcgtgagttcttcaccccgctgcataacctctgcgaaacgggaaagcgtgttgtaagcacccgcgaactgcgtattgcagtagaacaggtagaagaatacatgaaccgcgaggctctgaagattgttgatggtcatgacaggctgaccaaaaagctcaaagagtccgaagaacgcattgcgaaactggagctaaggcaccgccagcgtgaccgtgatgattttatcaggggaataacccaccccgcctccatgtataccgccgatgaagctatggaagcaattgcagaatacgaccgcacgcactga

SEQ ID NO: 179751 - DNA, 357 bp, Klebsiella oxytoca
atgagctgcgggtatcaaggttatgaatttggtgcgcattacccagatagcctttgctgtgatggctacctgtgggattgcgacgcatacgaagatggcatgctgacaaatggtggtgacattccttgccctgtctgtaatcgcaagcagtggctggccttctaccgcgatcacatcattgagtgcggaatgatgcagtcagagcgcaagcatgggcctaaaactgtgaaatacgggggtttccctgagcccgtgcgtggtgatgcaaaggctatgcgcaccatccgtcgctggctgcgtcgcggttggtatcagggccggaagttcgatgcggaagcgcacaaggtgacggcatga

SEQ ID NO: 179752 - DNA, 1632 bp, Klebsiella oxytoca
atgaacaattacacagcagatgactctttacgagaagatttaaactccactacaaatggccttggaggtgaccttgtcaatactccatataagcttagtgttacaaagttactaaccttaggccgtattgtatatccagaaatgtttgggacagatataacatctccatcagatgatgatttgtgggcagcaatgtttaaggaactctctgaactcgatgatacgacactatccagtgaccttccttatactatcgatttacgcggtaaaacctataacttatattcatcacataaacttgatataaactttaacattatcaatggctccattctcatggctgggggacagattgttatgggggatgaaacgagtggagccaaaacgagaaggcattaccttaaagatctaaaagttagatatataaatgatggcaaagcttattataaggacgcgctaataaaaatcgccagatgttataacactttcatcataaattgtgatttttgggctggaacttcaacaaataaaaatgctaacggtgaccctcttcgcgcccggtatggattatggcttggttcaaaaagagcatgggggtgctcgataattggtggtgagtattatggcgggcaaatcagttgccgaattggatttacaaatgaccacactggtatcacagtaactggcggtgcgacattccatcacggagtagttggtaatctattaatgtgtaaccctgctggcgcaatggttggcgggtgtaatattgaacattccgaagatggtgcctgggggttagctattacatcaaacacaaatagtggtagtaactctgcacatggagtaattattgaaggatgctacttttacaataatggaaatgggaccaatggaaatctaaatgctccagcaggtatactgataggctatgatgttcccggcacagagggctttgacaccaatgaaggaataataacaagtcttaatacagcccatagcattactattcgtaacagctacatagtgtctcccaaacaatcaagagctgttaaactaagagggttgtatggtttaaagatagaggataataagtacggtattgcactcaatgaaccatatggttttattgtagagggaacagcggccagaacgtttattgctaataatagaaatcaatcatctggagtttcagatgaaactgaatacacttcaacaagtaaaccgcaaattggcggaagaggaggtgcattcactccaaatatcgtcggtagcaatagcgtaggaagtattacttatagttcgcgaggtggtgactattatattagtaatggagtatgccaattgtcactttggttaactatcagttctattaccacacaacctgaaggtaatctatcaataactctgcctgtagcgataactaatggtcgtcgtacgggttgtggcgttttcgccctagcactgagttcaggcaactcctctttaccagtttcggcagctattactagcggctctacactcaacctttacttaggaggtgcagaaatgcagggatctgttcttcaagcgttaacagatatccgactttctctctcgtaccccgtagatggagcaacttatacgggttcatga

SEQ ID NO: 179753 - DNA, 2202 bp, Klebsiella oxytoca
atgttaactcttctggggattatcgaagtgaatataactttatataagaagcgcccagttgcgctgtttttggctgtcctcctcacctcaccggcttttgcggaagaacccacggataaactggcggacgatgaaacgatgctcgtcaccgccgaacagggactgaaacaacagccaggtgtctcgatcataaccgaggaagacattcaaaaaagccccccagttaacgatctttccgacatcatccgcaaaatgcctggcgtgaatttgaccggtaacggtgccagtggcagtaggggtaacaaccgtcagatcgatattcgcggcatgggtccggaaaataccttagtgatgattgatggcgtgccggtgagctctcgtaactccgtgcgatacaactggcgcggtgagcgtgattcccgtggcgataccaactgggtcccagcggaaatggtggaacgcattgaagtgatacgcggtccggctgcagcccgttatggttccggcgctgcgggtggggtggtgaatatcattactaaacgccccactaacgactggcacggatccttatcccttttcaccaaccagcctgaaaacagcaaagaaggcgacactcgtcgtgctaatttcaatcttagtggtccactggccggtgacgttttgacgatgcgtctgtatggcaacctcaaccgcaccgatgccgattcctatgacatcaacaccgaacaaaacggttcatatgcagccggtcgagaaggcgtgcgtaataaagacatcaacggagtactttcctggaaaattacgcctacccagatcgttgatttctcctatggctatagccgtcagggaaatatctatgcgggtgatactcaaaacagtaatagtaatagcagtgctaacggtctggttgaatcgctttatggcagtgaaacaaatcgtttatatcgtcaaaactacggaattactcacaacggaatctgggattggggaacatccaggcttaatttcaactatgaaaagaccaacaatacccgtttaaaagagggtaccggcggtagtactgaaggaatgataaatagcgatgtcttttccaccagtcgcctgcaaagctatcgtgctggcggggaaatcaactttcctctacagttattcgttgatcaaacggtgactcttggcgcggagtggaatcgcgacgaactcaacgatccggcttccatgcagtcgtcaagtactgacttctatttaccgggtagctcgggcgatccttctcaacgtagcagtaaaaactctgcaacgattagttcgctctattttgaggataatattgccgcgaccgacagtaccgaggttattccggggctgcgctttgactatcacgataatttcggtgcgaactggagtccaggcctgaatatttcacagggaatgggtgaatacttcaccctgaaagccggtatagcacgtgcgttcaaagcgccaaatctgtatcagtcaacgccgggctacctgctttccacgcgcggtaacggttgtccgattggtcttagccaatgttatttactgggtaacgataatctcgatcctgaaattagcgttaacaaagaagtggggattgaattcagtcatgcaggttatgcagctggcattacctacttccgcaatgattacaaaaacaaaatcgtgtctggcacttctgccgtttacagcaacggtacttataacgtgctgcggtgggagaacggcggtaaagctatcgttgaaggactggaaggtaacctgactattcctttgattgccgatacgctggagtggcgctctaacgcaacctacatgttccgttctgaaagcaagaagaccggaaatccgctgtcagtcatcccggagtttaccattaactcccaactggaatggcaagctactgaagacttgagcacaaatattaactggacgcaatatggccgccagaaaccgcgccagtatgctgaaaccgtccttgaaaaccgtaatggtctttcacaacgtgaaattagtccttattccgttgttggcttaaacgtcaactatgatattaccaaaaatctgcgtgccaatgcaggtattagtaacctgtttgacaaacgtatctaccgtgagaacgcgggggcttcaacgtataacgaacccggacgtgcttattatgctggcgtaaccatgtcattttaa

SEQ ID NO: 179754 - DNA, 153 bp, Klebsiella oxytoca
atgctcaacgctgagaaggtggtcgatgaccgcctgcagctggataacaacgtgatcatgatggatacactggcggcggttaaggtgctgattcagcaagttgaagatttggagaaaaaaattcaagctcaggaggaaaggcccaagacgtga

SEQ ID NO: 179755 - DNA, 420 bp, Klebsiella oxytoca
atgcagttctacacgccagttgagttacgtaagattatcctgatgccgttgtatagtgaccttgtgcaatgtggttttccaagccctgcacaggattacgttgagcaacgtatcgaccttaacgagctgctagttaaccaccccagcgcgacgtattttgtcaaagctgccggcgatagcatgaaggaggccgggatcggggagggggatcttctggtcgtggatagttcaaggaccgcagtccatggcgatattgtgattgccgcggtggacggggaattcaccgttaagaaactgcagctgcatccgcgggttcagctcaacccaatgaatcctgcatattcgccaatagtcgtcggaagcgaagatactctcgacgtgtttggggtcgttacttacatcatcaaatcggcaggctaa

SEQ ID NO: 179756 - DNA, 1266 bp, Klebsiella oxytoca
atgtttgcgctttgcgatgtgaattcattttacgcatcgtgcgagacggtttttcgtcctgacctgaaagggcggccagtagtcgtactttccaataacgacgggtgtgtaattgctcgttccgctgaggcgaagccctttgtcaaaatgggggagccgtacttcaaacaaaaggacatgtttcgccggcacggcattatcgcgtttagtagcaactatgagctctatgcggatatatcgaaccgggtcatgactacgcttgaagagctatctccacgatgcgaaatttacagtatcgatgaggcattttgcgatctgacaggagttcgtaactgtcgtgaccttaccgactttggccgggaaattcgcgagacggttctgcgccggacgcacctcacggtcggcgtcggcatagcacagactaaaaccctggctaagctggcaaatcacgcagcgaaacagtggcagcggcaaaccggaggcgtagttgatttgtcgaatatggaacgacagaggaagttaatggcgctgttgccggttgatgaagtatggggcgttgggcgccgtatcagtaaaaaactggagtctatggggatagacacggtgcttaagttagccgatacggatattcgttttatccggaagcattttaatgttgttctggaaagaacagtgcgtgagctgcgtggcgagccatgccttggtcttgaggaattcgcgccggtaaagcaggaaattgtgtgcagccgttctttcggtggccgcatcactgaatatcatgaaatgcgacaggcgatatgcagctatgcatcgcgcgcagccgagaaacttcgcggcgagcatcagtactgccggtttatctccgcttttgtcaaaaccagcccctttgcgctcaacgagccatattacggcaacagcgcatatgtaaagctgctaacgccaacccaggatagccgggacataattaccgcggcgacgaaatgcctcgatgctatctggcgagacgggcaccgttaccagaaggccggcgtgatgctgggcgatttctacagccagggcgtggcacagctgaatctttttgatgacaacgcaccgcggaagaacagcgaaaagttaatggaagtcctcgaccatctcaatgcaaaggatggcagggggacgctctattttgcggggcagggaatccagactgcctggcagatgaagagagaaatgctatccccgcgctatactacgaggttctgcgacctgctcaaagttagatga

SEQ ID NO: 179757 - DNA, 651 bp, Klebsiella oxytoca; identical to SEQ ID NO: 85595

SEQ ID NO: 179758 - DNA, 1203 bp, Klebsiella oxytoca
atgacccaattttataacagcttttggcagcgaaacctgatcgtttgcttcattggctcgttctcaaccgtctttgcaatgaccctgatgctgccgtttctgcctttatatgtcgaagagcttggtgttcacgggcatgcagcggttgttcaatggtctggtgtggcattcagcgcaacgtttattactgccgggttgattgcccccgtctggggacgacttggtgacagatatggacgtaagtcgatgctcgtgagagccagccttggcatggctattacggtttcgcttatggggctggtgacgaatatctggcaacttgtcggtctgcggttgctagttgggctggctggaggctactcatccggcgcaacaattcttatcgctgtacaggctcccagagaacgtgccgcatgggcgctggggatcgtttcatccggtgtcatggctggcaatcttgtcggcccccttgccgggggatggctaccggggctgattggtattcggtccacatttttctgtgcaggcgcactgatttttctggcctttattatgaccctgactctcatccgcgaagcggtacaaaagcccgaggatgctgcggcaaaaacgcgggtgagctggccccaattgcctgcccgctctgtgattgtctgtatgctttgtaccggtctgctgctgatgctggccaatatgtcaatagaacccattatcacggtctatgtgcgtactctcgtcatcgacgcttctcagataacgaaagtggcgggatatgtgatggcagccgcggccctgggcagcattatctcagcttcctggcttggtaaactggcagacagaataggacatttacgcattatcacgctggcgctgactacggccggtttgttgctcatcccgcaggcttttgtcacctccgggtggcaactgattgccctgcgtttcctcatggggctggcgcttggcggcttgttgccttgtattgcggcagtcatacgtcaccgtgtaccagaaggcatggtgggtagcatccttggctattccgtcgccgcgcagttcgccggtcagttcatcgggccgctgataggtggttttgtcggcgggcatatcgggatgcgagccgtctttctggcaaccagctgtatcctgctagccggagcggcttggaactttaaaatacatcgccagtcagcaacgcgctga

SEQ ID NO: 179759 - DNA, 591 bp, Klebsiella oxytoca
atgtcgaatcaactcagtaatatcagtaaaaacagcgctctgctagttatggattttcaaacgatcatccttaacaattttctcccgcaagaaatcgctggaaacgttatccgcaataccgcatcactgatagcagctgcgcgcgcagcagccgtaccggtcatttatatcagtgtcggattccgcaaagggtatccagaggtcagcaaaaacaacactatcttctcttcgattaaagagaatggaatgtttatggctgacaatgagagcacggctattcatcctgaagtcgctcccgcagagaatgaggccgtcattgttaaacgcagagttggcgctttctcatttaccgaacttgagatgattcttcgcgcccaaggcattgaaactttgatccttaccggcgtgaccaccagtggcgtggtgctgtctacagtcgggcaagcttttgacctggattaccaactggtggttgcgggtgattgttgcgccgatccagatcatgacaccaatttgtttatacttgacaaaatcctgcctcaacacgccattgttacccgttcaactgaaatatcagaagcatgggcataa

SEQ ID NO: 179760 - DNA, 984 bp, Klebsiella oxytoca
atgaatattgccgcctccattgcccttttgagtgcttgcccatttgtgagtctggcagcagtaccggtgaccttttccgaaactgtcctggatgccgcagggccaaaaggccctttgaaaggcacgttacttaccccgaattcaaaaccaacagccgttgttcttattgttccaggctccggaccgaccgatcgggatggaaacaacccgcttggtgtgaatgcatcgccttaccgatttcttgctgaaggcctggctgccaaaggctttgcgacgcttcgtatcgacaaacgtggaatgttcgctagcgcaatggccgtaaaggatgccaatgcggtgaagattgctgactatgttgacgacgttcgatcctgggtagacgtgcttagacgtcatatgcacactccctgtatttgggttttaggacacagcgaagggggcgtagtcgcacttgcctcagctcaagagaaggatatgtgcggcgtggttcttatcgcaacgcccgggaggccgatgggcgaggtgttgagggggcaacttaacgctaatccggaaaacgaaatgctattaaagcaggcactgccgataattgatgctctggagcatcggcggcgagtcgatattacgaatgtgcacccagcactacaaagtctctttaatcctgcggttcaagggtttttgatcgatgcgttttcatataatccggctcatctcatttcgagtatttccaaacccgtgttagtactacaagggcagcgcgatctccaggtggaagaaacggatgcaagactgcttaaggccgcgaatcctcaagcgtcgctggttatactgcccaatatgaaccatgttatgaaagaggtgacctcggacgatcgcaaggcgaatatcgcgtcatacgctgaacccgcgctccctttagctcccggtttaatcgactcgattgaacatttcctgatccacaactcaccttttcccgaaaagtaa

SEQ ID NO: 179761 - DNA, 669 bp, Klebsiella oxytoca
atgactaccgctgatttcaaacgtcctaaactagaactcccaaatgggacagataaactgctgctgcactcttgttgcgctccgtgttctggtgaggtaatggaggcgatccaggcctcagggatcgactacaccatcttcttctacaacccgaacattcatccgcagaaagagtatcttattcgtaaagatgagaatattcgctttgccgaacaacacggcgtaccgtttatcgatgcggattacgacacagataactggtttgagcgcgccaaaggcatggaatgggagcccgaacgcggcattcgttgcaccatgtgttttgacatgcgttttgagcggactgcgctttacgccgctgaaaatggcttcaacgtgatcagcagctcactggggatctctcgctggaaaaatatgcagcaaatcaacgattgcggtcagcgagccgccgcccactatccgggtatggtttactgggactataactggcgcaaacagggcggttcgtcgcgcatgattgaaatcagcaagcgggagcagttttaccagcaggaatactgcggctgcgtttattcactacgtgacagcaacttgcaccgcaaatcccaaggccgtcctctcattcagatcggtaagctttactatggtaaagaagacgaccagtcctga

SEQ ID NO: 179762 - DNA, 540 bp, Klebsiella oxytoca
atgataaatagagaaaaacgaactgttagcaggggcataaatcatgtggggctaacggttccaaacctgcagcaggcaacagaatttttgcaaaaggcattagatgccaggtttgtttatgacggcctgaccgatagcgattccccaagagaaggggctgataccgaaagacagttgggcctgacagaaggctcaatgattatcaaacagcggttgctgagaattggtaatggtccaaatctggagctttttgagatagtaagcagagaacaggcgcagccggtaaggctacaggactttggctggaaccacatttcactttatgtggacgatatacattacgcggtggaaagggtcagggcagcgggaggccagttcctttcggaaattcatggaaattcgcgccatgaagataccgatgataatgccagcgtatactttaaggctccatggggcggcctgattgaactacaatcaatacctaatggttattattatcctgaagacagcgaagcagacacatggatacctgagcgataa

SEQ ID NO: 179763 - DNA, 1764 bp, Klebsiella oxytoca
atgttgactaatctcagtagagatgaaagtaaaagacttgcggctatcgacttgttgaaaaatcctgacaaaggtcgggatgatgcgttaaaaaaatatactcatctaatatgtcacttgctgaatatgccgatgagctttgtttctgttctcgatgaagaaaagcaatatatcaaatccgctcagaatatcgccgccacggaaacccgcctgagcgaggcattttgcgtacagcccctgaaacagagtaaaacattcatttgtcatgacactcatcaacaccccacctttcgtgactatcacgcggtaaaagaagatccattcattcgcttttatgcagggtgtccacttaaaactcaggatggagtaccgataggaaccttgtgtatcctcgatactcaacccagggaactttcagacaagcagctcgaactttttgaaaagatggcagggcttatatcagattttctggcctcctggcactcagtaggctataccgatgtcgtcacgctattacccaatcgtcagcgcctgctcaaggacattgaggtgtcggcggcaagcaccttccggctggtcatcattgactgcattgatatgccctttgcctacgagatggcccgctcattgggaatgattgccgtagaaaacttacttcgggacatgaccgtcgaactgcaggcacgtctcaccctggcgggccagctttacgccgtggcggtcggacgatttgcttttttaacgcctgaacctacggccctgtcactggaaagcattgcacaaaaccttcaaggaacccaggcccggattggcccggaagttcccctggatttggatattcacatgggggactccgggctatgcgacagcaccctgactccgaatgaaattctgcgtcgtgcggtaagcgccttgcatgaggctataagccaggggcaccgttttacgacctataatgacgccctggatacccgcaaaaagagagatttcagcctgctgaccgaactcagacaaacgttgcagggaaaccagggcttatatctggtctatcagccgaaaatctcactggcgaccgggcgcgtgacgggtgctgaagcgctggtcagatggaagcatccgacaaacggcgaagtcctgcccggcgaatttatcccgctggtcgaaaaaaccagcctgatgcgtgagctcacggcctgggttatcgatcgtactattgcgcagctgagtgagtggcgggaccagggacttactctgccggtgtcaattaatctggccgccagtgatttttctcggcccgatttcgccgaggagcttgaacagaaactgcggaatgcgtctcttgacccagcgctgctggggttagagtgtctggaaacagagaagatgcttgagagtccggccgcgcttaacgggctggacatgctcaaaaaacgcgggtttaaaatttctctggatgactttggttcgggatacagcaacattaattatctgcgacaaatcccgatggacaccatcaagcttgaccgctctattgtgagtaaggttgctcacgacaaggcaagccgcatcgttgttcgcaacgttatcatcctcctcaagcaactcgactataccgttctggccgaaggagtcgaggaagccagtactgttgatattttaagaacgctgggctgcgatgaagttcagggctatttttttgccaaaccaatgacccctgatgtttttgaaacctggtatcatggtagagacgaagccttaaagtga

SEQ ID NO: 179764 - DNA, 618 bp, Klebsiella oxytoca
atgacaggtgatttgatcgcggtttctgctattggcgtagctatcctttttggtgcaatgagcccgggagctagctttcttctcgttgcccgaatggcaatgtccagttcgagacggacggctttatctgttgctgcaggtatgggttttggtgcatctgtttttgctgccatagcgctagcgggtctccataccctgctgactctaatcccatcactttacacaggactcaaggttgcaggcggttgctatcttttatggctggcgttgaaaatgtttcgtcgtccttcaaatcgttttaatgattctgccggtacaaaagaagtaagcgtctcgaaagcttttatgactggcgtttttacgcaaatcagcaacccccatactgcgctggtatttgccagtattttttccgcagcgctgagcaaaaatattcagcctgttatgtacatcatcctgcccacaatggcattcgttattgatttgctctggtatgcagtcgttgcatgcttattatcaactgacgggccacgtcaggcttacattaaatatcgtcattttatagataaactcagcggaggctttatggcctttttgggaatacgattgctgttaaagtga

SEQ ID NO: 179765 - DNA, 1362 bp, Klebsiella oxytoca
atgagaagaatttcagtctggtcagtgctgttggcctccactattgcgatgtcaaccgccacaacggcatacgccgatagccaatgggcagccgccaccactaccttccctggtaatatccgtgccgggtcacgggaagttcctgttaagccaggagataaaacggttgtagccattaagaacctgcaggcgggcacgaccgtcaccatgctcaatggcactgaagtcctgacaccaaaaccactgactgccgatgaaaaaggaaatctcaatattccgctgaccgttccgaccgatgccgctacaggccttcatccactcactgttattacgcaaaatcccgcgagcgtttcgcaggtcatgttgaaattgtcccggattgtcccgccaaaaaacacggaggctttcaggctacaaacaacgtccgtcggtgagcgagcttaccagtcggcagtgtcggctgacgggaagctgttcgtgacctctgcacgcggcccgaaggatggtagccgcctgatgagactgaacgccggaaccctggctatcgaagcagaggcaacgctgcctaaagacaaaaaaggtgagcagattggtgtcttcggcgtcggtgttgataacgcccataatcaggtctggacgacgaacactcttgccgagacggtgaccgtctatgacgcaaaaacgctttccgtcgtgaaggttttcccggagggatcggtctcgcatccacgcgatgtggttattgatgaagccaacaatcgggcctatgtcagcgcggctctgaccggttttgtcgaagtgtatgacaccaaaacgctggagcacatcggtcagttggagtttgtggtggagcgtggcaaaaacctgtttaacagtaccgatcttaccctcgatagcgctggcagcaaactctacggcgttagccgagatacgccatgggtaggctggattgatctcaaaaccggcaagagtacaacggtgaaagtacctcaggcgcagggcgcaaccgacatcgctcgcgatccgcaaactggccgtctttacgttgcttctcaggagacgaacaacgtcgtggttcttgatgctgggggtaaggttctcgctgatacttatattggtgccgggggcgtatctgtcgtctgggatcctgtgacgtcgcaggttttcgccgccacgcgtgcaggcggaactgttgcagttctgaacaaggacggtaaattagttgctaatattccgatggatgaaacaccaaaccacctgactgccgcgcctgatggtaccgtttatctggtgtctatgtatggaacctccggggataaagctcaaacaggttcagtgacgaaaatcacccccaaaaattag

SEQ ID NO: 179766 - DNA, 348 bp, Klebsiella oxytoca
atgagttttgagcgaaaaaaggaacgtgcacttgccattatggaaagcaaaaagatgtggcgcagcaactatgcccctcctctgttgcgtggtttatggaagttaggactaagaataccgccattacctttcgcttcattttggcaaatatcattcattatgggattcgggtttggtcttgcatggggaatcgtaatgtggtttttcacatggaaagatatggacgttcaaccttccggggcgatattacggagtttctcctgtgggattctatatggcctaatgatggcagcgtttcacagatggcgcaaaaaggccaataatctgcctgactggaaaaacctttaa

SEQ ID NO: 179767 - DNA, 1974 bp, Klebsiella oxytoca
atgttcaggctaaacccttttgtccgggccggattatgtgcgtccgtcgtatccttagcgtttccggcgctggccgacgttaatgaagagacgctggtcgtcaccgctgcggcaactgaacagagcgtcaaagatgcgcccgccagtattagcgttatcacccaacaggatctgcagcgtagaccggtacaaaacctgaaggatgtactgcgggaagtgccgggcgtgcagctcaccaacgaaggggataaccgcaagggggtgagtattcgcggcctcagcagcggctatacgctgatcctcgttgatggcaaacgcgttaactcgcgcaacgccgttttccgccacaatgattttgaccttaactggatcccggttgatgccattgagcgtatcgaagtcgtgcgcgggccgatgtcttccctctatggttccgacgccctcggcggcgtagtgaatatcatcactaaaaaagtcggccagcagtggaccggcaccctcagcgcggacaccaccattcaggaacaccgcgatcgcggcgatacgtacaatggtcagttctttaccagcggcccgctgattgacggtgtgctcggaatgaaggcctacggcagcctggcaaagcgcgccaaggacgatcagcaggcttccagcaacgcagctggcgaaacgccgcgtattgaaggcttcaccagccgcgacggaaatgtcgaattcgcctggacgcccaatgacaatcaggacattaccgcaggctacggttttgatcgccaggatcgtgattccgactctctcgaccgcaaccgccttgaacggcagaactactccctgagccacaacggccgctgggatgtcggcaatagcgagctgaaattctacggcgagaaagtggataataaaaatcccggacaggccggcaccatcacttctgagagtaacgcggtggatggcaaatacgttctgccgctgggaatgattaaccagctgctgaccttcggcggcgaatggcgccacgataagttgaaggatccggtcaacctgagcagcggcggtaaatccacttccgccagccagtatgcgctgttcctggaagatgaatggcggataatcgaacctctggccttaaccaccggcatccgtatggacgatcaccagacctatggcgatcactggagcccgcgtgcttatctggtctataacgctaccgataccgtgaccgtgaagggcggctgggcgacggcatttaaagcgccatcgctgctgcagctgaacccggactggaccaccaactcctgccgcggttcgtgcagcattatcggtaacccggatctgaagccggaaaccagcgaaagcttcgagctgggtttgtactatcgcggcgaagagggctggcttgaaggcgtggaaggaagcgtcaccaccttccagaacaacgttgacgatatgatcgatattctgcgtacctccagcgccagcgaagcgccgggctatccgaactttgtcggctggaaaacggtgaacgggaaacgcgtgccggtcttccgctacttcaacgtcaataaggcgcgaatcaaaggggtagaaacggaattgaaagtaccgtttggcgatgaatggaagctgacggtgaactacacctataacgatggtcgcgacctgagtaacggcggcgataaaccgctgcagacgctgccgttccatacggctaacggcacactcgactggaaaccgctggatgactggtccttctacgtcaccgccaactataccggcgaacagcgttcggtcagcacgacgggcaaaacgcccggcggctacaccatgtttgatatcggcgcggcctggaatgtcaccaaaaacgtcaagctgcgctccggggtgcttaacgtcggcgataaggatctgagccgcgacgactacagctatacagaagaaggtcgccgctactttatggccgtcgattaccgcttctaa

SEQ ID NO: 179768 - DNA, 216 bp, Klebsiella oxytoca
atgcagcgccctctgacgccaacctttggtatgttcggtctgcagattttgtccggagaaaacgaaagcatgtgttatgaatcacataccaacagacgttttcatcatacggctctacctgcagtactcaatgtatgcgaaattgttattgaaggccattccatcgcgcatcatacccgcagtttcctcttgccagccctgcagaaccttctctga

SEQ ID NO: 179769 - DNA, 2163 bp, Klebsiella oxytoca
atgtctcaagttacaaataaatcttctgcgaaagatacagatgaaattgatttagggcgtttggtaggcgagcttattgatcatcgaaaattaattatatctgtaacagctttagttactttgatttcgttagtttatgtactgtttgctaccccaatttatcaagctgatgctctggtacaagtcgagcagaagcaagggaatgccattctgagcaatttaagtcagatgctacctaatagccaaccgcagtccgcacctgaaattactttgctgcagtcaagaatgattttaggaaaaacggtaaccgatttaaatcttcaggcaaaagctgaacaagattatttcccagtctttgggcgtggttggtcgcgattaattggggataaaccagggaaattaactatttctagactttatgtgccgacaattgcaggagatgtacctgaactgaagcttttagtattagatagtatgcattatgcattaatatataatgatattgaaattaaaggtaccgtaggggaattattagaaaaaaatggtttatctcttaaagttgataaaattgatgcattgccgggaagtaaatttacagttgaatatgtaacgaagttaaaagcaatcactgatttacaaagtactttttctgtcgttgatcaaggaaaagatactggtatgcttacattgtctttgactggcgatgaccctgagttaattaaaaatataatcgacagcattagtaataactatttagctcaaaatatttctcgtcaagctgctcaggatgcaaaaagtttagattttttaaatttacaattacctaaagttcaaaatgatttaaatattgctgaggataaattaaatcagtatcgtaggcagaaagattctgttgatttgtcattagaagccaaatcagttctagagcaaattgttaatgttgaaaatcagcttaatgaattaacctttagagaatcagaaatatctcaactttacacaaaagagcatccgacatacaaagctttattagaaaagcgtaaaactttgcaagatgaaaaaataaagttgaatgaaagagtttcggggatgcctaaaacccaacaggagatattaaggttaagtagggatgttgagtcaggacaagcagtatatatgcagcttttgaatcgccaacaggaactaagcattgcaaaatcaagcgctataggcaatgtaaggattatcgatactgctgttactgaaaccaaaccggttcaacctaagaaatttattattgtattagcaggtatcgttttaggattcataatttcagttggcttggttcttcttcgggtattcttacgtcaaggaattgaaagcccagagcaactcgaggagagaggcataaatgtatatgcaagtatcccagtttctgaagcattcgcaaaaaaagctgtacagaaaaaatattggaataagacaccaaatagtgaagcgcaaggatttttggctgttgaaaatccagctgatcttgcaattgaagcaataagagggttacgcacaagtttacattttgcaatgatggaagcgaggaataatgtattaatgatctctggagctagtcctaatgcggggaaaacctttgttagtacaaacttggctgcagtaattgctcaaacgggcaagcgagttcttctcattgatactgatatgagaaaaggttatacacacaagttatttaatatatcaaatgagaatggtttatctgattttttatcaggtaaaatagaattacaaaagactttaaaaaaagtatcaccagttggttttgactttatatcacgtggtgcagtaccaccaaatccagctgaattgttaatgcatcgccggttcggcgagctcatcacttgggcaagccaaaattatgatatcgtagtcttagatactccgcctatacttgctgtaactgatgcagctattattggacattatgccggtacgactctgcttgttgctcgttttgaacaaaatacagctaaagaacttgaggttagttttaaacgttttgagcaaagtggtgtgatagctaaaggatgtatattaaatggagtaatcaaaaaggctagtagttattatagttatgggtatagtaactatggttattcctatacagaagataaataa

SEQ ID NO: 179770 - DNA, 768 bp, Klebsiella oxytoca
atgagaaatacctggctacgtaatttcatgattaaaggatatcgttatgtttctgtgatacctactttacgaggaatgcctctagatagtacggatatgtcttttatatttagtcatgaagtaatgatattccgggttcagcaaaatttggctaaatggtcatctagatttcttaagcgaatctttgatatagctggttcattaactattataattgtcctttcacctgtattactttatattagccggaaagtaaaaaaagatggtggtcctgcaatttatggtcatgaaagaattggcaagggaggaaaacctttcaaatgcttaaagtttcgctctatggttataaattcgaaagaggtattagaggaattattgaataatgatgtagctgcaagggtagaatgggattcaactttcaaattaaaaaatgacccgcgtataactaaaataggtggatttctacggcgaacaagtctggatgaattaccacagttattcaacgtacttaaaggtgaaatgagtctggtaggaccacgtccaattatcactgctgagcttgcaaggtataatgatgaagttgattactatctcttgagtaagccgggcatgacaggtttgtggcaagtaagtgggcgaagtgatgtcgattatgacacaagagtgtaccttgatgcatggtatgttaaaaattggtctatgtggaatgatatcgctatcttgtttaaaactatcagtgtggttttgaaaaaagacggtgcttattag

SEQ ID NO: 179771 - DNA, 681 bp, Klebsiella oxytoca
atgaaggaagaaataaaaaaaaatttttttatagccattccaacttttaatggagggcaggtctgggaaactgtagcaaaaagtattaaaaaaaattgtcctaaagatacttctatttttataattgactcgggaagtaaagataatactttaggtatagctcatgaactaggtttcaatgtaagtactattgaaagtaaaaactttaatcatggggcaacacgtaatttattggcagatttagcacctgcagaatgtgatgtcgttatatttttaacccaagatgcaatcccacaacatggctttgtagagcgaatagtatctgtatttaatgatgaaaatgtggtgtgtgcatatggtaggcaattaccacatgatgatgctaaccctattgcaagccatgcaaggtatttcaattatccgatggagactcatatatatagtgcagatgatatctctgtaaaaggcttaaaaactgtttttatgtctaattcattttcagcatatcgattatccgtatttaaaaagttggggggcttcccttcgaacactatcctttgtgaggatatgtattatacagccaaagctattaaaaatggatttaaatctgcgtatatagccgatgctaaagtcaagcattcacataactaccatatgcacacaccacattttcatcattaa

SEQ ID NO: 179772 - DNA, 1779 bp, Klebsiella oxytoca
atgtttaaattcaaggtttcatatgttgcgctggcggcagcgctaagctcatccgttgtttatgccgacccgtcaagctatacgcataggtcaggggcaaatgttattgatattgaagcgcctaatgccgcaggcgtctcgcataacttatatcgcgaattcaacgtcggccctaacggcactattttaaacaacagcgccagcgacgtgaaccacagcactcacggtaatatcgcaaagaataataatctgaccaacggcagcgcttccgttattttgaatgaagtgacctccaataaaatgagtaacctgcagggctttatcgaagttaacgggcaaaaagccgatgtcgtgatcgccaaccccaacggcatcacctgctccgggtgcagttttatcaacaccaacaaagcggtactcaccacgggccaggtcaacctgagcgataccggggcgattgatagctatacggtcacacaagggaaaatcaccatcggtgataaaggtatggatgcctctactaactatgccgccctgcttgcggatgccattgcgattaacggcagcgtaactgccgccaatgctacattgggtgcgggtaacttcacgtttgacaataagaccgggaaaatagctacccttgggaaaacagcaacggttatgcaaatgatctttccggaatacagcatcgatatcagtaacctgggtggaatcaaggccaatagtattagcatggtgggtaataccttaggtcttggcgtgcgtaataaaggcactattaccgcaaatgccgcgctcgccatgaccagctatggttctctggttaatgaaggggccatcaacgggaatggtcttatgacaaatattgtttcagcattggatatgaaaaatacgggtacgattaaaagtaccgcttacgttacacaactcagtagcatggataccctaaccaatgatggcactatttccagcagccaggggttagcgattagctcgacgggtaacctggttaatacaggtaccattagcggaactaaagcattatccgtagccagcaatggcgatatcactactcgctatggctcatatatcctatccgatggccagttagacgtgtccgccaaaaatatcaacaacggcggttcaatccggggtaatgtcacgaacgttgccttcagcggcgataacctcaacgttaccggcaatatctggggctactccagcctcaacgtgaaatctgtaaaggatgaccaaatcaattccgggaaaatatataattcaggacggatttcaggcaatgacgtaacgattaccactaatggaaatttggatcaggagggtaatattgttggtcaaaactcgttatcgattaaaagtaatgctatagataatgtttattatatttatggaaagtcattaaatatagaaagtaattatgttcgcaacagagcaacaatcgatggctataataacaatatcgccgctgccaacggcatacttaatgaaggtcagctttctgcgagtggagatttatctttaaaaacgctaaatcatgctaacattaccaattacaatactatcaaagccaacggcaacctgacgatatccacaggaacagtcaaaaatggcggctatcgctgcggatttttttatctggcaacctgcggtaagggctctatttccgctaacaaactggtccttaattcttctcataactacgcctatgaaatgggcgggcaacagcagtataaatatgctgaaataaatactattcgttaa

SEQ ID NO: 179773 - DNA, 222 bp, Klebsiella oxytoca
ttgtttctagaacacaatacgagttttaacaactctgaaacgttgcagatgtcgcctgacggcaaggatttatctcacattgcaagcgagatcacttctggcaggaaaatggatgaaaacggggagggatattctgtaactgcatcgcaggttgtttccccggaggcggcgcttgacgcgcctgtccgggctaccggcccgcagacgacggtgaacccgtag

SEQ ID NO: 179774 - DNA, 876 bp, Klebsiella oxytoca
atggtcgacgatggtattgaccgcccagccgccttcttccagcgcgttcaggttggtgtgatgcgtcagggtttccgcccacggcgtaccgaagaagtcataggtcatcacgttgatgccgtacagaccggcctgcagcagcgctttcacgttggagtaatcgaaggtcttcactaccgcggagctggcaatggagattttgacgttgctcagaccggcggaatccagctgcttacgcagctcgccgatcagcagcgcatagttttcgccgtcttccgggccgtaagggttgcccgcgccttccgcgttcgggtattcccagtcgatatccacttcgctgaacatcgggaactgtttgaacagttttaccacgcctttcgcgaaggttttacgggcggaatcagaagctgcggtttcgtggaagctgttactcatggtccagccgccgatgctcatggacagcaccagatcgtgaccctgctgcttcgctttggcctgcagatcgcgcaggccgccgagcagacctttggtattcgcctgagtgacggttttcggatcgacgtcccagccgctgacggagtggccaacgttaacgtaggactggaaatcgccccacgggtcgaggaaggtcggctcatatttgacttttccgcactgctcggcggcttcggcaaccacatcgcggtacatcccatccactttatggaagccggtgacgccgacgaagccgacgatgattttatcgtaagccgtaggggagacgttagtcagatcgtagccgcgaccgcggttatctttcgcatcgccgccctgcagacgtccgtcatactgagaccagtcggtgtagtaaccaaagactttcggtttgctggttga

SEQ ID NO: 179775 - DNA, 375 bp, Klebsiella oxytoca
atgaagaacatcctctgcgcagttatggggctgcttctcgcgctccctgcttttgccagactcaatacctatgaagaagcgcgtattaacgccatgcttgatgccctggcgcaaaagaaagatttgatctttgtgcgcaatggcgatgcccatacctgcgaggaggcagtgtcacacctgcggctaaaattaggtaatacccgtaaccgcatcaacaccgccgagcagtttattgataaagtggcctcatcatcgtcgatcaccggcaagccctatatcgttaaaatccccggcaaaagcgacgaaaacgcgcagccttatctgcatacattgatcgccgagacggataaaacggtcgcagcagagggaaattaa

SEQ ID NO: 179776 - DNA, 1188 bp, Klebsiella oxytoca
atgccctgcctcaatgcgcgctatcagcaagagcaggaagaatatatccgtaaaaaccgtaaaacgatcgacgcattcagcggcattagcgaccctgttgcaatgcttaagctcgttcatgaatccaggccacacgatccgttaatcgagtggctcccctgccctgagcccaccgataaactttatcaagggctttccgtcgaccaaatccgccatctgactgcttacgcagaagagttattggattctggtggcgagaatgaagcacaggaaattgctttgtgcctggcggcctttacccaggcaaatctggataatttcttgcgccgcttaattaatgaaaaggagttcgaattttactcttgtcttctctttcaccgcgcaccgccagatgtgcgcgatacgctgctacagcaggtcgaaaactatgccggcagccgtgacggcattctttgcgccctggcctggattggcgatgaggttgtcgtgaaacaatttaatcgctggcgtcaggaaccaccgacgtggtgcgatacgctgtatctccctcctcatgactacgcccgccaggcaggatgggaattaaccaaagagggccgcagacgcaacctttacttcccgcaatgtacccatctgataaaacagctgccggaacggtctaccgcttttcgcgccgttgctgaacacggcgaaaactgcccccactgcgctatgccgctgatcaacctgtttgaagctgagccaggcgctgtcggattcagcgcggatgactggcccgggcaaattcgtattctgacctgccagtgctgtacggtatttgacacggttttcgccagggtcgattcgcacggtcagccgcgatggttcgaaaaaaataagctttcaacgctggcgttagaacattcagccgactggaccatgctcccgcacgatattctgcaccctggagaatcccgtctaccgcttttcgctgccgaaatatttttacccacgacgttctcacagctcggcggccatccggcctgggttcaggatgcggactatccaacgtgcccaacgtgcgcgcaaacgatgatgttccttgcccagctaagctatgaagatattgaagagtacggggaagggatgctttacgggtttatctgccccacttgccgaacaacggcaacatcttatcagcaaacataa

SEQ ID NO: 179777 - DNA, 657 bp, Klebsiella oxytoca
atgaatattacgcaaaaatatcagacaatcccggatgtaaatacgctacgtaatcatctgatgctgtatgcaaaaattgattttttgctcagtctggaggacgaagatgaagatggtgcttattatcactacgatgataaagactggttgcccggtggggattatattcgggtcgatgatggctgcggcgatcatgttcatattttgatgacaccaaacggcaccgtgattaagggttttgcgcatgagagtaaactttcgccctacaatcctcatctccctgaatggatctcccgccatgatttttttgcagggttgcctgaagagctgaagaaagaaatcataaacccctcttttgagcctgaatgcacaacttttgtggtctgggcgcaggagggagatcgctggcaatttgcagccatggctgaagcgcttaatgaatttgatggtagtgctgaattcttagaaccactagccgatctggcaagctattacaacttgctcacagaatattatgaagtagagctagactgggcggcactcgaaaagctctatcacggcgcaccttttactgaatcaattttagcgacgctcttccctgagcaggacccgaatgcattgctgaacatgctggaagaaaagtttggcaacgcctga

SEQ ID NO: 179778 - DNA, 885 bp, Klebsiella oxytoca
atgacttttcccggcggcaagcgcggcgccaaatacttttttattctgtttattgtggcagtatgcgtttatctactgcctcgcgtcgccatcaatgctttttactatccggataatgaagtctatgggcaggatccctggtctgccgaatccgttacattcaccgctaaagacggtacccgcctgcacggctggtttattccatcagctactggccctacagataatgcggtcgcaacggtgatacatgcccacgggaatgccggaaatatgtcggcgcactggccgctggtcagctggctgccggaacgcaattacaaccttttcatgttcgactatcgtggatttggcaaatctcagggcacgccttcgcaacaaggcctgtatgacgatacgaaaagcgctatcgactatgtgcgccagcgcagcgacgtgaacccacagcgtctggtgctgctggggcaaagtctgggaggcaataacattcttgccgcaattggctactgcatgcattgcgttaacgaacgttcggcaaagcgctcggggatccgcgccgttattctcgactcaacttttgcatcctattcgtctatcgccaatcagatgatccccggcagcggctttttgctcaatgatagctatagcgcagaccgaaatatcgcatccatcagccctatcccgctgctgattattcatggtaaagcggaccatgtgatcccctgggagcatagtgaaaaactctatcaactagctctccaaccgaagcagaaaatccttattccggatggcgagcatattgacgcattttccgaacgccacggcgatcgctaccgtgatgagatggtgcgctttatgcaaaacgcgctgtcagaagctaagaattaa

SEQ ID NO: 179779 - DNA, 687 bp, Klebsiella oxytoca
ttgtataatctgattagcctgagacaaacgggttgggaaagcgtaccctttgctgtacacggccagctgctgattgccggtttcgtgctggtttttttccacccgggtcacggtaagatgccgcttgttgcctggatgctgcataaccaccccacgcgcagacatttttttgtctggatagtccgtagctggcgcccgcagtgcggtttcttcatcattattttctggcgcgttgggtttatgcaggatatccccagagatacgctgctgcgttttatctcaattttcaattacatctgctatttcgccacgttgattctggggttgacgctggttcatgatgcctggcgcctggtgaaaacacctgaaatcccaatcagcaatcttcggctaccgctgattttcgcgctggggttttatttgccgtttcagatcgtattgctgctgcacggcgcaagcgaaaatgactatgtgccgttggggtggctgctgtttgcgccggtcatggtgggcattttattgtcccgactcgccaccggcgggatagcctgcctgatacgtcgcctggttggtgaggcgggaggccagaaatggcgcgcgcatttcgccctgtttaacggcgtggcgatattgtgtatggcgataaataccgcggtgcggattgtgtcatccttgcttaattcttag

SEQ ID NO: 179780 - DNA, 1134 bp, Klebsiella oxytoca
atggtcttacactccacgcgctggctggcgcttagttacttcacctatttctttagctacggtatcttcctgcctttctggagcgtctggctttccggacttggcctgacgccggaaaccatcggtatgctgctcggcgccgggctggtgtcgcgttttcttggcagcctgctgattgcgccgcgggtcagcgacccgtcccgactgatctcttctctacgcattctggctttgctgacgctgctttttgcgctcgcattttgggtcggccaccatgtcgcctggctgatggtgattatcgtcggctttaacctctttttctcgccgctggtgccgctcaccgacgcgctggcgaatacctggcaaaagcagatcaccatggactacggtcgcgtgcgtctgtggggatcgatagctttcgtcattggttcggcgctaaccgggaagctggtcagcctgtatgactaccggatgatactggtgatgctcagcgtcggtattgcttcaatgctgctcggcatgctgctgaaaccgtcggtgcagccgcagggagagtcccgccagcaggaagcggccggcctggcggcctggcttacgctggtgcggcaaagctggcgcttcctcgcctgcgtctgtttgctgcagggagcgcacgccgcctactacggatttagcgctatctactggcaggaggcggggtattcggcctccgcggtgggctatctgtggtcgcttggcgtggtggcggaagtggtgattttcgcgctgagcaaaaaagtcttccgtcgctttagcgcccgcgatctactgctgctgtccgcggtgtgcgggctgattcgctggacgttgatgggctggacgacggcgctaccctggcttatcgtcgcgcagatcctccactgcggcacctttacggtgtgccatctggcggcgatgcgctatatcgcagcgcgtcagggcagcgaagtgatccgcctgcaggcggtctactccgccgtcgcgatgggcggcagcattgcggtgatgacggtatttgccggtttcctctaccagcatctgcaccagggcgtgttctgggtaatggcgttggtggccttaccggcgctggtggtgaggccaaaagcggtagcctag

SEQ ID NO: 179781 - DNA, 369 bp, Klebsiella oxytoca
atgaaacaattaactgtttttgaaatggaagaaatctctggcggctactcttgggatttttcttcaattcaatcaacgattagctcatttgcatgtaatgcagttgaagctattgcggctggtgtgctcggaggtatagttggcggttcatttggtaccttaattggtgggactcaatctggtgctaatggtggtctgttaggttttggcctcattggaaatggggtgggattagtttggggagctattgttggtggggtagcgggggcatctggggcgatcgcggctggctgggacacaaccctgcaagttgttgttgatgccttccagagcgtcattgacggtacatttatcccatggagccattaa

SEQ ID NO: 179782 - DNA, 1098 bp, Klebsiella oxytoca
atgaaaaaatatattttattattgctggcctgtctcgctccgatctatagctgggcgtgtgagacaggaacgaattatggcgatgtttcaatggctaatttgcccgcgaaaatattgattaatgccggcagttattcgaccgggaccgtactttatgattccgggaagctcacgcatcctacaacttattttatcaactgtcagggatcaatatattcaaatttagcatggagttcgggtaatgccggctcgttgattggcgataatatatatacaacctctgtaccgggtatcggtatcagagttaaggtctggctgaatattaccggcgaatataatggtgataacaacgattttactccggattataacgagcatcatatcggtgatgcggatttttatcttggaaagccaaccgggcttttagatttttgggcaggcacatattatgcgccaacatatcaggtgcagctcgtggcaactggcggagccattgccagcaacagcacgctgacgctgggggagccgatatccactgtgtcggttagagacgatcacggaacgatggtcatttcccaactgcacgtcaccggaagcaccaaaatccagctgacgccgatgggctgcaacgtgagttcgaccacgctgaatttccctatgggctccgtgaaaacgagtgagtttactctctccagcaaagtcggttccgcccagcaggcgctcacgctgacctgtgagccagggactaacgtgatgatgcgagtcaatgcgactgaagctgaaggcgataacccggagcgtagcgtgatggcgctaacggcaggggagaacgtcgcgactggcgtaggcgtacagctaaatatcaacggcgcgccgctctccttgaatactaactactccgtttttaaatcaaacagaacaacgataactaacagcggggcggaagccagctattcaatatttactactcccgatagccccggcggggcatccgggtcggacacgctcaatttctcaactaactattacaaaaccggggctgaagtgacgcctggaacggccaacgccagcggaacgataacatttatctataactag

SEQ ID NO: 179783 - DNA, 570 bp, Klebsiella oxytoca
atgagcatcaataatatcaggcgattagcaaaatatgcaggatggttgagcctcaccagcacctttattttattgtacagtatgatgccggcccgggcctacgaagcgaatagtaccgtcaatttaaatattaccggtaatattgaagagcccgtctgcgaggtgtcggttaagccttccagtgcaatcgatctgggaaccgtctcttaccaacgtctgaccgggaagccgggctcgagcagcgatagcactgcgctttcccttgtgtttgataactgttcaactggcacttcttccgtaacgattactttcagcggtttatcttttgataatacttttaaatcgatttatgtgaatgaaattatctacggtgccaaagaggttgggctacagcttttgagcgcccaggatcagcaatcgttggggccgaacgatcggtacacctatgtattcaacgatagtgctgatgggaatgtttttaatatgctcgccagaatgtatacacctactggaagggtggcagccggtaaagtcgcctttaccgtcacctttaacgtgtcatataagtga

SEQ ID NO: 179784 - DNA, 201 bp, Klebsiella oxytoca
atgcttcagggaatgaaggcggggatagaaaaaggtttgcgcaagggccgacaggaaggtcgtaatgaaggcagaaatgaagggcaactagcggcgacaaaacgcatcgaccgggcgatgctggaagaggggcttgagcgtgaccaggtcgcaaagctaaccggactgtcgctgcggcagctcgctaagcttcagcactaa

SEQ ID NO: 179785 - DNA, 330 bp, Klebsiella oxytoca
atgtctaaggaacaatatcttacactcaataaagcgtcgggaccgaatagcgataccccgacaacgccctttgtaaaagttgtcgccctgatcgcgacgcttggcggtttactttttggctatgataccggggtgatttccggtgccttactctttatgggcaccgagcttcatctcactccctttaccaccggcctggtcaccagctcgttgctgttcggtgccgcctttggcgcactgctatctggcaatctggcaatctggcgaatgcggcgggcagaaagaaaattattctgtggctggcggtgctttttgccatcggcgcgatag

SEQ ID NO: 179786 - DNA, 1149 bp, Klebsiella oxytoca
atgattttctttcgtcttattctcggcgttgcggtcggcggggcggcggctaccgttccggtctatattgccgagatagctcccgcgaataagcgcggacagctggttactttgcaggaactgatgatcgtatccggtcaactgctggcctatatttctaatgccacgttccatgaagtctggggcggggaaagcacctggcgctggatgctggcagtggcgacgctacccgccgtgctgctctggtttggcatgatgtttatgccggattcaccgcgctggtacgcgatgaaagggcgcctggcggaagcccgtcgcgtgcttgagcgcacccggcataaagatgatgttgagtgggagctgctggaaatcaccgaaacgctggatgaacagcgcaatctcggtaagccccggttcagcgagattatgaccccgtggttgttcaagctgtttatgatcggtattggtatagcggttattcagcagcttaccggtgtaaataccattatgtactatgcccccacggtactgacctcggttggtatgactgataatgccgcgctgtttgccactatcgccaacggcgtagtctcagtattgatgacattcgttggcatctggatgcttggcaaaattggccgtcgcccaatgaccatgattggtcagttcggctgcaccgcctgcctggtctttatcggtgcggtcagctatctgttgccggagacggttaacggccagcctgatgcgctgcgtgcctatatggttctggcagggatgttactgtttctgagctttcagcagggggcgctgtcgccggtgacctggctgcttatgtcggaaattttcccaacccgcctgcgcggtatttttatgggaggggcggtattttcaatgtggattgccaacttcctgatctccctgttcttcccgatactgctggcgtggttagggctttcaggcaccttttttatcttcgccggtattggcgtatttggcgcgatattcgtcattaaatgcgtaccggaaactcgccaccgtagtcttgaacaaatcgagcactatctgcgggataagctggacaccagtgaagaagggcaggccgccagggcccggcgaatagtggctgaatcgcaggcgaataaagtgtaa

SEQ ID NO: 179787 - DNA, 1272 bp, Klebsiella oxytoca
atggccctaacggatactaaagttcgttctgcgaaacctgaggagaaagagtattcacttgttgacggcgacggcatgtccttacttgtaaaacctaacggctcaaagtattggcgattccgtttccgttttggcggtaaacagcatttgatggcgttcggtgtctatcctgaaatttcactggcggatgctaggaagaaaagggaagaggccagaaggttggtagctgctggtatcgatcctcgtgagcataaacgtgctgtgaaagaagagcaggcgaaagagattattactttcgagaaggttgccagagagtggcttgcgactaaccaaaaatggtcggaagatcatgctaatcgcgtaaaaaagagcctggaggacaatatcttcccggcaattggtactcgcaatattgctgaattgggcactcgtgacttactggcacccattaaagcagtggaactgtctgggcgtcttgaggtggcttctcgtctccaacagcgcaccacagcgatcatgcgttatgcagtgcaaagcgggttgattgattacaatccggcacaagagatggccggagccgtcgcatctggaaatcgacaacatcgtccggcgctagaattaaagcgcatccctgagttacttgagaaaatagacggctataccggcaggccactaacccgctgggcaacggaactcactctgctaatctttattcggtccagtgagctgcgttttgctcgctggtcagagatcgattttgaaacgtcaatgtggaccatcccgcctgagcgagagcctattcccggcgtgaaacattctcagcgaggatcaaagatgcgtacgcctcatctggtgccgctttcaaagcaggcgctggcaatcctaaagcagataaagcagttctgcggtgaacatgaactcatttttattggagatcacgatccgcgtaagcccatgagcgagaacacagtaaacagtgcgctacgggtaatgggctatgacactaaagttgatgtttgcggccatggcttccgcacaatggcctgtagttcattaattgagtcagggctatggtcgaaggatgcggtggagcgtcagatgagccatatggaacgtaactcggtacgtgcagcatatatccataaagcggaacatctggatgaacgcaaattgatgctgcaatggtgggcaaacttcctggatgcaaaccgggagaagagtattagtccttttgattttgcgaaaattaataatcccatgctgaccagataa

SEQ ID NO: 179788 - DNA, 291 bp, Klebsiella oxytoca
atggttacaatgtgtccaaaatgtggttctgaacacgttagcgaacgtaacattgggaggaaggctggaggtattgctggaggtgtggctggagcccttagtggagcaagctcgggggctgcgattggctctgttgtgccagttctggggactgcaaccggggctgttattggtgctgtgctggggaggtttgtggctggcgcaactgcgggagcggttaccggctcagcccttgatggactcctgtttgacagatttgagtgtggcgattgtggtcatacctttgactag

SEQ ID NO: 179789 - DNA, 162 bp, Klebsiella oxytoca
atggcatttattcttttacttttgtggatcggagcatcaatagttattggtaaattggctcaggccagtggccgttcgttcttcatatggtttgttatcagtatgcttatagaccccatatttggtgcgattctttttgctgtagtcgtgaggtcaaaatga

SEQ ID NO: 179790 - DNA, 780 bp, Klebsiella oxytoca
atgataaactattatgaatatcttgagctggatatgaatgccagcgttgatgaattaaacgatgcgatacaaaaagtaagtgaacgtgatgatgcagatttaaaattcatccgtgagatgaaatccattttgttaaacgatgaaaccagggtactgtataataataaattgatttcttttattgttggcgatcgtaacaagtctgattttgtaagcgctgagaatatccgtaaattattaaatatagacaattcgtcgttacatgaaaaatatatctggattgcaacgggattgtttgttgtcggcgttttatctgcatgtttgtttagtttagctgtcaactatacggttaatctgttcgttatgattgccctggttattttgttctatatggactggaagttactggataaacatggtaaggcaagcttttcaaaatggtggattcttttttcgccagtctatattgctaaacgttgtaaaaccgttggtcagggaaaaatgctgttgctggtctggcttgggatatgggttgtatatggcatcgggaactttgcattcaacagtagcaaaacaatgctggagcgctcagcatgtgaggtggtaacggatatctatcataagcaactacgccagtactcacagcaatgtgagaacgtaacgttaactgaaagtgaaggaaaacggcactatggatttgctcagattagtgatgggacaactaaagatattaccgtgacagaacaatcagatggtaagattgttgtatatattgaatag

SEQ ID NO: 179791 - DNA, 210 bp, Klebsiella oxytoca
atgaaatttttaaagaaactgaaatatgtaatcactctgggggtaataaccgcctcctgttcagtaatggcatcaccttatggagattcagatgttctgttcgggtgtatcataaaaggtaaaaccactaaagaagtagctgtgttgaggaataataatgaggtcacttatttattcggtaagtcggatattaacggagggggggggtga

SEQ ID NO: 179792 - DNA, 276 bp, Klebsiella oxytoca
gtgattcctgaaatcactttggtaaaaaatgtgagccagctaagtcaggcctggaattacagtagggctgagggtgtgtcgatacatacattgaacataccagaaaacgagtatacttactctgtttcctatatcgatgatggaaaaaatactgatggggaaataactgttttaaaacagggaaaagaaatcagtacgataaaatgcgatgatgtctgggaacaacatctgggtgacagcaatatgatgcatggtatccccgatgagtcagagtga

SEQ ID NO: 179793 - DNA, 168 bp, Klebsiella oxytoca
atggaggatcccattgtttaccttgactgtatcgtcggctttgttaatggaatggtcgcctcccttctcttgtgccacagtgagacgatgaatccccactacctgagcggagcggccatcatgaacgttaagactatcggtattgatttggcgaaagaggttttctag

SEQ ID NO: 179794 - DNA, 918 bp, Klebsiella oxytoca
atgctttccttttttgccaacatacctccatgtttaatcggcatggaagcctgtgcttctgctcacttttgggccagcaaactgatgtcgatgggccataacgtcaaactaatggctcctcagttcgtcaagccctatgtcaaaaccaataagcatgatgctgcggatgcagaggctatttgcgaaaccgtcacgcgacccaacatgaggttcgtgccggtcaagacccctgagcaacaggccgtactggcacttcaccggagccgtcagagctttatcaaacaacggaccgctcaggcgaatcaaattcggggattattggctgaatttggcatcgtcgttccccgagggatccagcagctacagcttttgttaccagagatcctggaagatgctgataacgcgttgccctctctgtttcgtgtacagctgagtctgttacgacaccatctggcatatttgtttgatgtcgtcgctacgctcgacaagcaaattgagcagtgctaccgccagaatgcactatgtcagcgtatcagcaagatcccaggcattggtccgattaccgccagtgcactcattgcgactatcggcaatgccagtaatttcgaaattagtcgacagctggctgcctggcttggactggttccacgtcaacattcaagtggtggcaaacaagttctgctcgggataagcaaacgaggcgatatttatttgcgaaccttacttattcacggtgccagagcggtgttgcagtcggtaaaacgtaaacaggatgtcgtatcgggatgggccagtcggctactggaacgtcggaataataacattgcctcggtagcactggctaacaagaatgcgcggatcgtgtgggcactattggcaaaagaccaggagtactgtgctccagtgatgaacgcttaa

SEQ ID NO: 179795 - DNA, 186 bp, Klebsiella oxytoca
atggcaaagcaaaagtttaaaatcaccaactggtctgcctacaacaaagtgctcaggcagcgcggttcgctgacggtctggcttgatgagtctgccattactgatcttgcccagcaacggcagacacaatcttggacagactggtgcataacgcgtaaagagtggttctgcagggtaaatttatga

SEQ ID NO: 179796 - DNA, 1083 bp, Klebsiella oxytoca
atggaaaaaaaatccttaagaaaaataaaaaaatggataatcgcggctgcaatatttactcagactttagggtctgcatatggaaatttaaacttccaagcaggagcaatggaggatggaacgtttctacttaccgtaaatggaagtatttcttcaggagatgcatacattttcgcaaaacaaatcgactcatttaagcaagataacatgccactcagtcagatttggttaaatagtcttggtggtaatgttgccgacgccttaaagatgtcattgattatatcaagtaataatttaacaacggtagtgccaaatagatgggagtgtgttagtgcttgcgttcttttatttggcgcgggaatacgacgccatgcttttcccgaaagtataattggtgttcatcgtataagcattaatgaaattgataatgaccaagcaagatcattatcacttgatatggatactgtatacaccgcaatgaacttcccagaaaacattaaatacaaaatgttaacgacgccccctaatgacgtatattatctaacaacaatagacaaaaagaacatatcaacgacatactcaaatactaagcaggttgatacatcgtatagaaactctggagtctcagcaccacgggtaataatcactaaaaaagatcgttcagaatcaagagcgctaaatcaaaaggctattatacaaattaggtcaaatcagttcatttctgctatagctaatcttgaaacagcaaaaaaaatatacccgtcagatgctgaagtattagggaaccttggatatgcatattacatgatcggcgattatactgcagcacaaatgaatctgacatcatcacttaaactagctccacgtagaggttcatcatggaataaccttggattagttttagcatcgactaatcaaatagaatgggccgtaaattgctttataaattactggaacttttcaaaaaataaaaaagcggcaacaaatcagttcttttcatgggagcaagaacgtccaggaactggtattgatatagcatcaaaaagagctcgttctacccttgggatttattcacccgagtga

SEQ ID NO: 179797 - DNA, 219 bp, Klebsiella oxytoca
atgtctgactgggtaaggctgttgaccgcgaaatactgcgaacatcagccgctgtatcgtcagactgaaatctttgcccgtcagggtgtggatctgagtcgtgcgctgctctccaactgggtggatgcctgttgccggttaatggcaccgctggataaagccctccagtctggtgtatcagggggcgacatcactcgggtgaataaatcccaagggtag

SEQ ID NO: 179798 - DNA, 822 bp, Klebsiella oxytoca
atgtcaggtggggagagacagcgctttgcacttacccgggcattgttgcgagatacacctgtcatagcaattgacgaaggaacctctgcgctggattacgctaatgaatccctgtatttgaacacgctcgtcgcactggccagacgtaaggtcattatcattgtcactcaccggttatccagcatctctgctgcagacgccatactggttctggataagaacggtgaatttcagtttggaccggttaagacgcttctggaaagcaaccagtatatacagaacttccttaatatcggacatggcgtgctggcatggctgaaacgtaagcgccccatcgagcggggcatcgccgggccgggactgctggcccacgtactgtcctcaaagtatgcagagcacacaccgctgtatcgccagtctgaaatatacaatcgccagggtgtagaactgagtcgctcactgctgtcgggttggatggatgtgtgctgccggttgctgtcgccacaggaagaggctcttcaggcctatgtactgaccgacggtaaactccatgccgacgatacgcctgtcccggttctgttgccgggcaataaaaagacgaagaccgggtggttgtggacgtacgttcgcgacgaccgcaacgccggctcagcgttggcacccgcagtgtggttcgctaacagcccggacagaaaaggcatccatccgctgccccatcttgccgccttcagcggtgtgttgcaggcagatgcgtatacccggcttattcgtaagcgtcaagcactgccgcctgtgattccagtcccgggatcgctagcttag

SEQ ID NO: 179799 - DNA, 423 bp, Klebsiella oxytoca
atggaaaatgctgccaactggcgaactgaatcgcgtactgtctattccagtgacttcaaacttcggatggttgaactggcttcacgaccagatgccaatgtcgcacaactggcgcgggaacatggcgttgataataatctcatttttaagtggctacgcctctggcagagagaggggcgaatctctcgtcgaatgcctgcaactatcgtggggccggtggtaccacaatctcttccgatttccccgactctgttgtctgtcgacgtaatcaacgacccgctgcccattgcagagaatgacactctgtgtacgtcctcctccgctcattccagcgcgacatcctgtcatgttgagttccgccacggcaaaatgacgctggaaagcccgtcgtcgacgaagatctctgatttagcactgcattga

SEQ ID NO: 179800 - DNA, 321 bp, Klebsiella oxytoca
atgaataaaaaccatgtcatcatcaacagttatattgaagattataaagatattttgttgatgcttaactacgtcagtgatattcatgatgttaaattttacaacgataaaaggataccgatgtataaaggcattaataaagagattgttaaatggatgattagaaatgattttcttgttgacctgaataagacagaaggagataaaaagcataaagaacttgtcgcctataaaacccgacgagaacagaaagaattttcaacggttctgaaaagccgcagaggtaaacctgccatagctaaaaatggcggaagactgtaa

SEQ ID NO: 179801 - DNA, 249 bp, Klebsiella oxytoca
atgacgtttcagagaaacattatatctccggaagaaagaacagaaatccttgacacaataaatcactggctccacgaacagatattcccctataaacgaccttcagcacaattatgtgaacaggcaatccccccgattaacgcttttcgtattataacaaataagaaaaaattcgatctttacttcagattcggacagacatgggttaagcatgaagaaaaaaatagtgattgcaagaattggatttaa

SEQ ID NO: 179802 - DNA, 975 bp, Klebsiella oxytoca
atgactacacaggctgtgacaaaagaacgtttagatactgatttgcagtattacattaataataaagacgatgttgccgttatagtttatgctatcgtgaaaggtaacaacgcccctctgagaatggatattgaatctccagcccaaaatggactgaaatctctttttttgaatgtgattaacaatgatattctcaaaaatgaagatttgaccgtattgcctttgtcatcagttgatgaaaggagtaaggtcctgtatcactatgacattccgataccggatgaattaaaatgtctgaatcaggctttgggccagccggatgagccagagtttgatttcaacgttcataaacttgaagatataaaggttctgttaatctgcataggtaatgcagaaagaaaaatgacgttgtataaaacaatggcgccagtgaacatattttcacgggacggtttttttcttatgaaatcggataccaggctgaaggaaataaaagaggacttcttcagggtaagtggtaacttccagattataaaaattagcggagagttgtttgttgtagatttgcttttgatagaaaaaatgtttggttttcatgatgtaataaaaaaagaagcagccagaggaatgcaatctgtcagtgatatgaatatccttactaatatggacgcattacatgagttaattaacgatgttaaatatgcaaggaagttaacgcgtgtagcgaaggcttcacctgtaattaatgcggggattgataacgtcagtattattcagttctgtaaaacgtatccaaccctgaaaggccgtattcgttttaacgatgaggaaacgaagatctctttagataccaaagtatcaaaagacttattcattaaagtattaatggatgattttctgacttcacaattgactaaattttattatgacagcatagcaaaagatactctggttaccgaagttgtcggtgattga

SEQ ID NO: 179803 - DNA, 603 bp, Klebsiella oxytoca
gtgaatgccgaatcgagaaaaaataaggagcaaataagaagaaaggtggacttatatattttatcccttgctattttatttgtgttttttatcttcattacatgtaagtttccggtatgtttttcatcacaatgtaaatttattgggtgggaggtgctattaaaaaataacatagtgcctgctatatgtattatcttgttgttatattcgtttttcgcctattacagatttaaatatgacactaaaaaatccgttgagcttccggttaaaatagtcaagttagagaaaataaactacgaacatttaacatttctgactacatatattattccactaataacttttgattttgagaaagaaagatacatattagttttagccgctttattggttattatgggtgtaatttatattaaaacagatcttttttatgcaaacccatctctcgcattattaggttttaatatttataaggtcgatatcaatatctctggaaatgttataagggagggtgtaatcgttataacacgcagaaaattagaagcgggtaaaatgttcagctatattgtactggatgaccgggtttattattctggcaattga

SEQ ID NO: 179804 - DNA, 135 bp, Klebsiella oxytoca
atgatgaagagaatgagtattgcgctttcgctggcagccagcctgatgctaccccatctggccacagccgcgccgctctccggactgaagtttgaacagcagaagcatttgaacagcagaagcagcagatcgtga

SEQ ID NO: 179805 - DNA, 966 bp, Klebsiella oxytoca
atgatgaaaaaaggaacctcctcgacgccgcacgacgcggtttttaagcagtttttatcgcatcccgagtgcgccagggattttatcgacattcatcttcccgcgtcgctgcgccagctatgcgatctgcaaacgctcaggctggagtcaggcagctttattgaagcgaatttacgcgccagctactccgacgtgctgtggtcgctaaaaaccagcggcggtgatggctatatctacgtggtgattgaacaccagagcacgccggatgcgcatatggcattcaggctgatgcgctacgcgctggcggcgatgcagcgtcatctggatgccgggcataaaacgctgctgctggtggtgccgatgctgttttatcacggcgcgaaaagcccttatcccttctcgctttgctggctggatgagtttaccgatacgcagacagcgcgacgactttatgccgccgctttcccactggtggatattacggtggtgccggatgacgacattatgcagcaccggcgtgtagcgttgctggagctgattcaaaagcatattcgccagcgcgatttacttggcctggtggagcgattagcagagctgttggttaaaggttgcgctaatgacagccagttgaaagcgctgtttaattacatgctgcagtgtggtgatgcgcctcattttggtgaatttcttcacgaggtcgagcggcgcgttcctcaacataaggaggtactcatgacgattgcggaaaggctacggcaggaagggagacaagaaggcaagttggagggcaagttagagggcaagttagaaggtaaacaagagggtagacaagaagaagcgttgcgtattgctcgttcatgtctggaacagggatttgagcgcgagctggtgcaggtggtttgtgagctgtcggatgacgatctgaagatgctgcaaactcaggtcgcagcatctccggccagataa

SEQ ID NO: 179806 - DNA, 3108 bp, Klebsiella oxytoca
atgttttcccgcttctttgtgcgacgcccggtcttcgcctgggttatcgccattctgattatgctcgccgggattctggctatccgcaccttgcctgtcgcccagtatcctgacgtcgcgccgccggcgataaaaatctccgccacctacaccggggcctctgcggaaaccctggaaaacagcgtcacccaggtgattgagcagcagctcaccggactggataacctgctctactttacatccaccagcagctccgacggctcggtcagcattaccgtcacgttcgagcagggtaccgatccggataccgcccaggttcaggtgcagaacaaagtgcagcaggcggaatcccgtctgccgagcgaagttcagcagtctggcgtaacggtggagaaatcgcagagcagcttcctgctgatcctcgcggtgtatgacaaaaacaataaagccaccagctccgatatctccgactggctggtcagcaacatgcaggatccgatggcgcgtatagaaggcgtcggcagtctgcaggtgttcggcgccgaatacgccatgcgcatctggatggacccgaccaaactggcctcctattcgctgatgccatccgatgtgcaatcggctatagaggcgcagaacgtacaggtgtccgccggtaaaatcggcgcgctacccgcctccaacgcgcagcagctgaccgccacggtacgcgctcagtcgcggctgcaaaccgtcgcccagttcaaagagattatcgtcaagagcaagagcgacggttcggtggtgcgcctgagcgacgttgcccgcgttgaaatgggcagcgaagattacaccgcttccgccaatcttaacggccatccggctgcggggatcgcggtaatgatggcgccgggcgctaacgccctgaataccgcgacgctggtaaaaaacaagattgccgagttccagcgccagatgccgcagggctacgatatcgcttacccgaaagacagcaccgagttcatcaaaatctcggtggaggatgtgattcagacgctattcgaggcgataatcctcgtggtctgcgtgatgtatctgttcctgcaaaacttccgcgccacgctgatcccggcggtggcggttccggtcgtactgctgggcaccttcggcgtgctggcgctgttcggctactcgatcaacaccctgacgctatttgcgatggtactggcgataggcttgctggtggatgacgccatcgtggtggtggaaaacgtcgagcgtatcatgcgcgacgaggggctgcccgcccgcgaagccaccgaaaaatcgatgggtgaaatctccggcgcgctgatcgccattgccctggtgctctcggcggtatttctgccgatggccttcttcggcggctcaaccggggtgatttatcgccagttttcagtgaccattatctcggcgatgatgctctcggtagtggtcgccttaaccttaaccccggcgctgtgcggcgcgctgctgagccattcgaaaccgcataccaaaggtttcttcggcgcctttaaccgcctgtggggacgcaccgagcagggctatcagcatcgtgttgtcggcggcctgcgtcgctcggcgatgatgatgggcgcttttgccctgatttgcggcggcatggcgctggcgatgtggaaattgccgggcagcttcctgccgacggaggatcagggcgaaatcatggtccagtacacgctgcccgccggagcaacggcggtacgcaccgccgaggttcgccgccaggtcaccgactggttcctgacaaaagagaaagccaataccgacgtgatctttaccgttgacggctttagctttagcggcagcggacaaaacgccgggatggccttcgtgtcgctgaaaaactggtccgaacgtaaaggcgaagaaaataccgctcaggccatcgccctgcgcgccaccaaagagctcggcagcattcgcgacgccaccctgttcgccatgaccccgccgtcggtagatggactggggcagagtaacggtttcaccttcgaactgatggccagcggcggcaccgatcgcgacagtctgatgaaaatgcgcagccagctgttggccgcggcgaatcaaagttccgagctgcagtcggtacgcgccaacgatttgccgcaaatgccgcagctgcaggtggatatcgataataacaaagccgtgtcgctcgggctgtcgttaagcgatgtcaccgatactctttccagcgcctggggggggacctacgttaacgactttatcgatcgcggtcgcgtgaagaaggtctatatccagggcgaaagcgacgcccgcgccgtgccgtccgacctcggtaaatggttcgtacgcggcagcgatgacagcatgacgccgttctccgccttcgccaccacccactggcaatacggcccggagagcctggtgcgctacaacggctccgccgcctttgaaatccagggcgaaaacgccagcggcttcagctccggcgcggcaatggacaagatggaagccctggccaatgacctgccggccggtaccacctgggcatggagcggcatgtcgctgcaggaaaaactcgccagcggccaggcgatgagcctctacgccatctcgattctggtggtcttcctgtgcctcgcggcgctgtatgagagctggtcggtaccgttctcggtgatcatggtgatcccgcttgggctgctcggcgcggcgctggcggcatggatgcgcggtctgaacaatgacgtttacttccaggtggcgctgttaaccactatcggcctgtcgtcgaagaacgccatcctgatcgtcgaattcgccgaatcggcggtggaagagggctattccctgtcgcgtgccgccatgcgcgccgcgcagacccgcctacgacctattgtgatgacctcgctggcgtttattgccggggtgctgccgctggcgatcgccaccggagcaggggccaacagccgcgtggcgatcggtaccgggattatcggcggaaccctgaccgcgacgctgctggcggtgttcttcgtgccgctgttctttgtgctggtgaaacgcttcttcacccgccatcgttcttctcaggagtaa

SEQ ID NO: 179807 - DNA, 507 bp, Klebsiella oxytoca
atggcatcggcggctaattccccccggctcgcgctgcgcttagccgggctacaggtttataaccgtctgcggttgagtagcgcggataagcgcagccgccatccgggggatttaacccggttcacagccgtctgcaattgggtagcccggataaggcaacagccgccatccgggggatttaacccgattcacagccgcctgcaattgggtagcccggataaggcgcagccgccatccggggaatttaacccggttcacagccgtctgcaattgggtagcccggataaggcgcagccgccatccgggggatttaacccggttcacagccgtctgcaattgggtagcccggacaggcgcacagcgccgcctccgggatggtctcctgaagccagatttacaagactttcgataaataatggcgctgcatacccgcgtgcggaaaatccggcagcgacatctgcagctgatagcccagcttctgataaaacggcagcgcctgaaagctga

SEQ ID NO: 179808 - DNA, 378 bp, Klebsiella oxytoca
atgatgaattccgccttaccagatgccaatgttacgggatataagggattaataagtaatctgcatctgccggatcccaacgacagacatgttcttgccgcagcgataagagcgaaagctgaaattattgtaacgcttaaccataaggactttccgccagaacttctgggtccatatgaaatagaaacgcttcaccctgatgcgtttatttccgatctcttcgatcttaatcatgctctgacgcttgaagccgtcaggcggcagcgactgtctctaaaacatccatctatggcggtcgatgaatttcttgaaatgctgctaaagcagggtttaccgatgacggtaaaggaattagcgcattatcagtatgctatttaa

SEQ ID NO: 179809 - DNA, 846 bp, Klebsiella oxytoca
atggccggaaataatgttaatgaacccgaagtgttaaccgggcacactgatgtgatttgctccaccagcattgaacgtattgttacaggccggaatgctgcgctgacacggattcaaagccttatcagtgaacttgatgatatctccattctgacccacgatatcggcggtggtacagtacaagaatggggaatgcgggaggggcatcgctacgattgctggtttacggaaaaaaccgataaagcgatgaaagtgatgacccgcaatattgatcgccgtatctggcgcgatctgatgaataaatcaggcatgctgagcctgatggatgctcaggcgcgtgacgagtggcacaaaagcctggagaaagacgatatccccgcgatctctgaagacaatatcctgagtacctttgagcaactgcatcagagcaaaggtgaggtatttgagcgtggcgtaatcaatattttcaaggggttaagctgggactataaaactaataacccctgttattttggcaagaagattatcgttaacaatctggtgaagtacgataaatggggttacagcctgaactggagctgccggcgtgaccagttagttgatctagagcgcatgttgttcctgctggatggtaaaaccattcccgataataggcacgatgtggctatccgactgatggacttcatacgcgataatccacgacagcaggtattcggagatgatctcttcactattcgtcttttccaaaagggcagtggtcatatcacgtttaagcgtatggatctggtagagaagatgaacggtatcatcgcgaatcactatccgggaatgctggctgcaagataa

SEQ ID NO: 179810 - DNA, 561 bp, Klebsiella oxytoca
gtgtgggctaccggtccgcagacggtggtgaatcgtgggggttaccggcttacagacggcggtgaacccgtagcccgggcaaggcgcgttaagcgccgcccccgggagcagggcgcagtgcggcagaatttcccggaggcgatgctgcgcatctgtccgggctacccaacagcagacggcggtgagtggggctcgcagacggcggtgaatcgtgggggttaccggcttacagacggcggtgaacccgtagcccgggcaaggcgcgttaagcgccgcccccgggagcagggcgcagtgcggcagaatttcccgggggcgatgctgcgcatctgtccgggctacccaacagcagacggcggtgagtggggctcgcagacggcggtgaatcgtgggggttaccggcttacagacggcggtgaacccgtagcccgggcaaggcgcgttaagcgccgcccccgggaacagagcctggcgcgagtagggaaattcacggctattgcgccacttctttccctgcggacgccaccgccgggccgcggtaatcgccgcccagggctttaa

SEQ ID NO: 179811 - DNA, 441 bp, Klebsiella oxytoca
atggtaaatatttatattgcgagtccattttttagcgacgaccaggttgatcgcgtccagcgcgtcgagcaggcgctgaccgccaataaaacggtagataaatttttctcaccgcgcctggccgatgcggagaatctggaatacggcactttaccctggcgcgatttcatctttaagaacgatatcaagcatctcgacgaagccacggtggtggttgccgttgttgatttctttgacgatcacgtcgatagcggtacggcatacgaaatcggctatgcccacgcgtttaaaaagccgttgattatcgttcaggaaaaagggaataagctaaacctgatgatttcagaaagtctgacttactatacccaaagcgctgaagagctggcgacttacgactttactcaactgaaaaagaatatctttaccggcgacgttttctga

SEQ ID NO: 179812 - DNA, 537 bp, Klebsiella oxytoca
atgcacattattcatgctgaagaacagcacattaccgcgatacgcaatatttatgctcaccatgttctgcaaggtacaggtagctttgaaaccgaacctccggatacgcaggagatgctgaaccgactgagtcgcgttcagtctcatgggtttccatggtatatcgccctcaagggcgatacggtcatcggctactgttatctttctcgttaccgcgaacgccatgcctaccggtttacggttgaaaactcgatatacattgatccgcgttatcagcgacagggcatcggaaaagcgctgctcgatcgagccgtcacctgggcacagtcccagggatatcgtcagatgattgcggttgtgggtgacagcgctaatgtggcttccattgcgctgcatgtccgcgcaggatttactgaaataggcactctgaaagatattggtttcaaacatggccgctggctggacacggttttcctgcagcgcattctgggtgaagggaacagtactcagccagaagattcagaccttacgctctga

SEQ ID NO: 179813 - DNA, 1173 bp, Klebsiella oxytoca
atgataaaaaattcagtggcttattcgcctctggctatgctatgcatttttgctatgacaacagggttggccgggtgcgacagtaaggactcgccttccgccagcaaagatattccgcccgaggttattgtcgagacagtaaaagcaacgcccctcaccctgacccaggatctccctgcaagaacggtggcatctcgtattgcggaaatccgcccgcaggtttcagggattgtgctgtcccgtgattttacagaaggcagcgacgttaaagccggtcagccgctctaccatatcgacccggcaaccttccgcgcttccgtcgataatgcccgggcggcagtcaaccaggcgaaggcccagtcacagctcgcccagacgacgctttcccgctatcgcgcactaagcggcaaggattatatcagccgtcaggatctcgatcaggcgcaggccacagctcaccagtcacgtgcggctatcgatgcggccagcgccgcacttcgatctgctgaaatcgatctggcccacagcaccgtgacgtcaccactgaatggccgcatcgggttatcgagcgtaacggagggggcgctggtccagaacggtcaaagtagtgcgctggccaccgtgcagcaactcgatccgatgtacgttgatattacccagccgggcgaagcatggttgcggctgcaaagtgcgctggcgaatggtcagattaagcaggaaaacggcaaagtgcctgtccatgtgctcatgcaggacggaagcccgtatccactaagcggcacgctggcattctctgatgtcacggtggatcagaccacgggcgcaattaccctacgcgccattattcctaacccgaatcatcaactgctacccggcatgtttgttcgcgcacgtcttgaagaaggtatcgcgccagaagcgctgctggttgcccaacaggcggtcacccgcacaccacgcggtgacgccacgacgctcgttgtcgataagcaaaaccgggtacagccccgcgcgataaccgtgacgggaacgtctggcgatcgctggcaggtcaccgagggtcttcaggcgggtgaacgggtcattgtttcaggcagtcagcgcgctaaacccggcgaggttgtgaccccgcatgaacgcgccacgcgctccggttcgtcttcacaggaataa

SEQ ID NO: 179814 - DNA, 3132 bp, Klebsiella oxytoca
atgtctaaattttttattaaccgcccaattttcgcctgggtgctggctattatcgtgatgattgccggggggattgcgattatgggattacccgtggagcaatacccggacgtcgcgccaacggcggtacagatacgcgtgagctaccctggtgccgatgccaccacgctgcaaaatagcgttacgcaggtgattgagcagaacatgacaggcctggatggcctgatgtacatgtcctcaaccagtgactcctccgggacactgcaactgaccctgtcctttaaaaacggcaccgatccggatatcgcacaggttcaggtgcagaataagctccaggtcgccactccccttctgccgcaggaagtgcagcaacaggggattacggtgatgaaatcatccagtaccttcttcctggtccccggctttgttgacgaaaccgggcgcatgagcatggaagacatcgccgacttcgtggcatcgaccattaaagatccgattagccgtattgacggcgtgggcgatacgacgctgtttggttcacagtatgcaatgcgcatctggctggatcccaataagctcaataactatcagttgacccccgttgatgtcagcaatgccctaaaagtgcagaacgcgcagatcgccgcaggccagctgggcggtgcgcccgcgatgaaaggccagcagttaaatgcgtcaatcattgcgcaaacccgcctcacctcgccggaagagttcgggaacattttgctgaaggttaacagcgatggctcgcaggtcacattgcatgatgtggcgcgaatcgaacgcggcggcgagaactaccagtttgtggtgaaaataaacggcaaaccggcttccgcactggggatccagcttgccagcggggcaaatgccatggataccgccaaagccattcgcgcgaaactggctgagctggagccttactatccgcaggggctaaaagtcgtttacccttatgacaccacgccgtttatcagcatctcgattcatgaggtggtgaaaacgctgtttgaggcaattcttctcgttttcctggtgatgtatctcttcctgcaaagcttccgtgcgacgcttattcccaccattgcggtaccggttgtgctgttggggacgttcggtattctgagcgcactgggctattccattaacaccctgacaatgttcggcatggtactggccatcggcctgctggttgatgacgccatcgtggtggtagagaacgttgagcgcgtgatggccgaggaaggtctcaagccccgtgcggcaacgcgaaaatcgatggatcagatccagggcgcgctggtgggcattgcgctggtcctgtcagcggtatttattccgatggccttttttggcggcagtacgggcgtgatttatcgccagttctccatcacgatcgtctcggcgatggtcctgtccgtgctggttgcgctcaccctgacacctgcgctttgcgccactatcctgaaaccggtcaaacccggtgaacacgctaaagatcgtgggctgttcggctggttcaaccgccgcttcgatgccagtagctcacactactcacgagccgttgcccgtatgctgaacggaaccggacgctatttaatcgtctacggcgtgatcgtactcggtatggcctggatgtttgctcgtctgccaaccgcgttcctgccgtcagaagatcagggcgtcctggcgacgcaggctgttttgcctgctggcgcaacgcaggaacgctcgcagcagattctcgatcaaattaacgactggtatctgagtgatgaaaagcacaacgttgccaacgtgctgaccgtcaacggctttggttttgccgggcgcggacagaatatcggtatcgcctttatcggcctgaaagactggtctgaacgtgacggtagtgaaaacagcgttgatgctatcgcagcccgtgctaaccaggcgttttcgaagctgattgatgcacagattgccgcattcaacctgccgcctattattgcgctgggtaacgccaccggctttgattttgaattgatcgatcaggcagggctgggacatgaaaagctgatggaagcgcgtaatactctgctacagatggcgcagcagcacccagacgtgctgatggccgtgaggccaaacggcatggaagatacgccgcagtatcgggtcaatatcgatcaacataaggcgtccgcgctgggtgtttcactggatgatatcaacaccacgctaagcaccgcctgggcagggagctacgtcaatgattttatggatcaaggcagggttaaaaaagtctatgtaatgagcgatgcggcatggcgcatgatgccggacgatctcaataactggtacgttcgtgccggtaacggcaagatggtgcccttcgcaagctttgctgacgcgcagtggatttacggttctccgcgccttgagcgctacaacggtctttcttcgctggaaattctggggcaacccgctccgggtcgaagttcaggcgaagcaatggcgttgatggagcaactggcttcgcagttaccgaaagggattggccacgactggaccgggatgtcgtatcaggaacgcatgagcggccagcaggctccggctctttatgctctgtcgttgattatcgttttcctgtgcctggcagcgttgtatgaaagctggtccattccattcgcggtgatgctggtggtgccgcttggcgtcgtcggtgcgctgctcgcgacaactttgcgtggtctcaacaacgatgtctattttgtggtcggcctgctgacgactatcggtttatcggcgaagaacgcgattcttattgttgaatttgccaacgacatgatggtgaaggaaggcaaaggtttaattgaagcgacgcttgaggcggcacatatgcgtctgcgcccgatattaatgacctcactggcctttatcctcggggttctgccactggcattaagccgtggtgcgggttctggcgcacagaatgccgtcggcactggcgtaattggtgggatggtcgcggcaacgctgctggctatctactttgtgcctgtgttctttgttgtggttcgacgacgttttaccggaaggcgtattacagatgaagatagtgagtaa

SEQ ID NO: 179815 - DNA, 1677 bp, Klebsiella oxytoca
atgacgacaaattcagtaattaactctgcgggcatgtcgcacaatgcatccgccgaaacggcaatgaaatggttgccgctgctggtactgtgcctcgcgcagctctcaacatccggcgataatgcaacgttgagtatcgctaccggtgcactggtcaaagacctgcacgcgtcaatggatctcatcagcattgccaacgcgatgtactcgctggccgcgggttctctgatggttgctgccgggatggccgggctgatcgtaggctggaagaaaacgttccgtatcggctgcgcgctactattcctcgccgagctgacggcctatttttcaccaaacatgctggtcttcacctacggcgcccgcctgctttccggtattggcgggagctttatgatcccttcggtgctggggcttatcgccagtaactataaaggcgggcagcaggcgatcgcctttggcgctatcggcgcggcaagcggggtctcttttgccgcaggtccgctgatttgcggtctgctggttgaccacctcggctggcgcgcggcctttgccgctatcgccggcctgtgcatcgtgatcttctgcggctctttcctggtacctacgccggcaaaaccagaacgcaaagtggtgttcgatctgccgggcgtcatcctgaccgttatcggcctgttcagcgtaatcctcggcttcctgaaagtctcaagctggggcctgttcacgccgttcaacgcgccattcaccgtgatgggcctcagcccggcgccgttcctggtgctgtttggcctgatcgtcctggcgattatgctaaagtgggaacgccatcgcgaagccactacaggcagcgcgctaatcccgttgtcgttcctcgctacgccgcaggtgcgtaacggcctctatctgacggcatttatcttcctcgcctacggttccggtatttttgtgaccgtgagtttcgtgcaggttgtcgccggactgaacggtattgaaaccggcttgctcattctgccgtttgcgctgggcgtcgtggtcttttctctggggctgccgatcgtctggaaaaatgcgaatccgaaacggatgtgccaaagcgcgttgttaatcggcacgctgggttcagttttgtgcatctttggcttcggcccgtccgatttcagcgcaatcgtgccggtagggatgtgtctgattggcgtcagtatgggcattgtttccgcctactccagctatattgtcaccagcgccctgccggcgcgagatgcgcaacagtccggcggcgtccaggcaacgtcgcgtaacgtcggccaggcaatcggcgtagcggtctgcggcatggtgatgctaacggcaatcaccatgacggtgcagaatatggcaagtaaagacgcttcgctgagcctggatacgcagcagaaggtggcaaatatttccgttatcccttatctcagcgataccggcttctcaaagctcatgctggatcaaggggtcaataagaaggatatatccgaactaaaccgggtgtataaaactgcccgtctgaaagccacgcgagcgggtatgatcgctactgcagttatgacgctgctatttttattcgggacacgtaatctccctgtccgcgccaaaggttccgctgacgctacaggagaagagccgcgtgccaggaagtcgaaaatctaa

SEQ ID NO: 179816 - DNA, 708 bp, Klebsiella oxytoca
atgaatgtaaaattgaacctctgtgcgctcttattagcatgccttgcaccaataagttatgccaatatgtccgtctacccaatgtccgttgatatgaacaatcaaggtgaaggcaatgtccgtgtgatttcacgaaccaacgatgttcagtttatcaaaacgactattgtcaaaatttccgatgctggtacagcaaaagaaaaagaaaacgaaattaaaaccggcgatcccaatgctattgtggtgatgccgccaaaattcgcgctcccggcaggcgccagtaaaatggtgcgactggtgtcgatggagcccgccctgcaagagaccacttatcgcgttaaatttgaagccgtttcgcaacttgatgaccctctggaaggaacgaaaggcaccaaaacacagctcaacattaatctcatctggggggttctggtaagcgttccgccagagcatcccgaactgaaaatgagcttacagccgggtggggaaattaccaataacggtaaccagcgttttaaagttttaaaaattggcctgtgcaagaaagcacaggcggataaagagtgcgcatggcaagacgtagggcgaaatctttaccctactgcccattttgcaccaaagaatatactgaattacgaccgcgtcgttattcagtattggaactggattgataagaccaggaaatctcaaagcttctcaattcattaa

SEQ ID NO: 179817 - DNA, 519 bp, Klebsiella oxytoca
atgaaagcagcaatttctaaatctttacttgctttagcaatggtatccgtaatgggttctgctatggcagtacaaaaagacattaccgtaactgcaaacgttgacgctgccctggatatgactcaggtcgacaactctgcgctgccgaagaacgttgatatgcagtatatcccgggcaccggcctggtaccgtatcagctgcagaccaaaatctgggcaaacgacaccgcgaaagatgtcatgatgcagctgaccagcgatgcagtactggttaacagcctgggcggttcaaccgttccgatgagcgttacctggggcggcgaacagctttcaactaccccagcgactctgaaagcgaccgaactgttcccgaatccggatactgctctgcagaccggttctgttgctaaaaccctgcagatcgctcaggcaactcaggaacctctggcgactggcacctaccagggtgtagtcagcatctatctgtaccaggcaacaacggctccagtaactcagtaa

SEQ ID NO: 179818 - DNA, 2697 bp, Klebsiella oxytoca
atgaaaagatcaattcttggactattaatattttccatactcaatgttgcaaatgcacgtaccgagaaaattcctccaggatttgaaattatcgtactcggtcaacaggaataccttgacgtaaacctcgcgggacgtaatctaggcaaattttatgccaccgtcagccttgactccgtcaagttcgatcaaccgcaaaagattattgctgcaatggggctggataacgaccctgtacggcttaaagctatttctacaaagctcggccaacctcttgagcgtcacggcgaactagcatgcagcatcattaatcacagcacaggttgcggctacctgaccaccaacgatgtcgcgttgatttataacgacgagcaaaactccgtctccttatttcttaataaagagtggtatccagaaaacggtaaagacacgctttatctgtcccccactcaaggcgacgatatcgttaatgccttcgttcaccagcaagatattaatgtctccattcaggacgactataaatcggcatggttgcagggtaccggcgcgctgggcgttacgggcaacagttacatcggtgcttactggagcctgaacggtaacgaaagcgatggcgaaaccgaaacggacgctgacgtcagcgaactctactatcgctacgaccttctgcagagattttatgttcagggcgggcgaatggacagtcggagcctgtacaatcttgatggcggtaactttaacttctcgttcctgccgctcgatgcctttgacggcgttcgcgcagggtcgaccctgagctacctcaaccgcgaacaggcgggtcagggaacaccggtaagcgtactgctttcccgcagctcgcgcgtcgatgtctaccgcgataaccaactgctgggttcgttttacctgaacggcggcaaccagtcgctggacaccagctcgttcccttcaggaagctacaccctgcagctaaaagtttatgaaagcaaccagctcgcccgcacagaagtggttccctttaccaaaacggggagcatgacggatggccatatccagtggttccttcaggcgggtaagctggcggatgattccagctcttcaaccaactatagcgatgacggcgctacctccgcgcaggcgggcctgcggatcccggtgacggcgcaaagcgaactcatgcttggcgtcgcctcggtggacaataatttttcggcagaaattaacagccatattacgcctgcgctaggcgcctttggcgatatggatctgcaaaccggctttttctataacgaccagggcggtcgcggcaatatgcagcagctcaactggcgggtcgagaattggccctcactgaacttctaccgtaaagacaccaacggcggacagtgttccggcgataacgattctgaagattacgatctcaactgttttgagagcatcagcgcaggtctgtcgcaaaacgtcttaagctggaacctgtcgttaaactggaaccgcactcgcaaccatgcggactaccatactcgctgggacaatgacgaaaactttagcgacaactatttcagccagactaacgccaactctacatcggatagcgtacagttcagcgcatcgcgatcctttagcctgacgaactggatcctcaacaccaaccttggcgtatttacccgcaatgacagcggcagcagccgtaacgataacggcgcttatctgatgttcacctttagcgagacgccgcgtcaggacaataacgcacgcagccgcagcaccaccattagcaccgattatcgtaccagcaataacagcagcgaccagaccgcctggaacctgtctcgcacctggtatgacgataacgtgaaccataaagaagtgggcgtcagcctgggcggtattaataccgacacgctggacagcggcgttaacggccgtatcgatggcttgtatggcaacctcagtgcttatctcaccgacagctatgatacccaggaccgcgagcacagtaccgcctttaccggcagctatagctccacgctcgccgtcagccgccacgggattcaggttggccgtgcgggtaacggtgacccatcggcagcagttcttattgcggtgaaaaaaatggacgacgccgacaacgatgaactgtccgtcgatgccactaccaacggcagcaaggccagcctgaccggcgatgaatcggtcctgttccctttcactggctatgagatgggctacgtcgacgtcaacgacagcgcgcgtaaacaccagaccggtaccaccaacctgattgccggttcgggtaaacaaagcctgatgttgctgccgggcaaactgcgctaccgcgaagtgtcagccacctttaattacaactacatcggtcgactgctgctgcccgaagcgctgaagcagtatccggtgattggcttaaatagcgcgatgctgctgatggcggacgacggcggcttcacgctggaaatgcagggctcatcacgcgatctctacgtgctggccgggcagagcttcctgaagtgcccgctgaaggtgctgaagaaacgcgccagcattcgctttgctggggatattcagtgctccgtagtggcctacgatcaactgccatcgccaattcaggttcaggcgcagcttaagcagtcgcagcgcagacaggcgctggaaaccgcacaaagggagagtgtgcaatga

SEQ ID NO: 179819 - DNA, 648 bp, Klebsiella oxytoca
atgaatgctcttcccattggcggtgtatgggaaggacaactgaagattggctggaatcagctgggtggcaaaggatcgttcacttatttagccaatatcaccctcaagggtaaagcgcccggtaaacaggacatttttttcccggaatttaacagcgccaatccactggtgcaacttgacctgcatcctgtcggctccgtgacgggcaacagctacgcagaggatgttaccacgctggatatgtgcctgtatgacggctttaactctaacagcgacagtatgactctctccttcagagatgaagggaaaagcgcaccggcgcgacaaaatggagagttctccatttataacacggcaaacgccactaccggtgagagcgagcggatagactaccgggtggagatgtttaacccccatactcacagctggatgacgatgaaaaactccgaagcagtgaagatctcggctggcgtaaacggtcaggatcaaatacgcccggtgcgtctgccttcaatcacctatccggtactttgcgcaccgacgccgctgcggctgaccgtcaaaaaattcaaggtggcgcaaaaatcagccggttattataaaggtaaattgactgtagaatttagcccaagcctgaacagtatataa

SEQ ID NO: 179820 - DNA, 1680 bp, Klebsiella oxytoca
atgtctcttattcaaaaccctattttacgtggatttaatgccgaccccagtattatccgtgttgaggacacttactatatcgccaactctacatttgagtggtttcctggcgttcgtttacatgagtcaaaagaccttgagcactggaatcttctccctgcgcctttgtcaacgaccaccctgctggatatgaaaggcaacccctcatccggcggcatttgggcaccggcgctctcctgggctgacggtcaattctggttagtctataccgatgtcaaagtcaccgaaggcgcctttaaagacatgactaactatctgaccaccgcaaccgatattcgcggcccctggagcgatcctgtcaagcttaacggcgtgggttttgatgcctctcttttccacgatgatgatggccgaaaatatatcgtgcagcaaacctgggatcatcgcgaatatcaccacccttttgacggcattacgttaaccgaactggataccaaaaccctgaaattaatgccaggaaccgcgcgtaccatttatcgtgggactgccgttggcctcgttgaagggccgcatctctataaactcaacggatattattatctttttgccgctcagggagggaccgtatttacccaccaggaagtggttgcccgctcaaaaacgctggaagcctacagttttaccaccgaaccgggagacgtcttcttaacgaatgttgatacgccagacagctatatccaaaagcaagggcatggcgccttagtttctaccccaggaggcgaatggtactatgcctcgctctgcgctcgtccgtggaatcgccctggcgagtcggtctacgatcctcgcggctggtcaaccctcggcagagaaacgtcgatccaaaaagtgtactgggatgaagatggctggccgcgtattgcgggcggtcacggcggtaaaacattcgtcgaggggccgaaagacgccatttataccgaaattgcagaggatcgtagccagcacgacgactttaccacgccgacgctcgatcccaactggaatacgctgcgggtgccctttagcgagaaaatgggtactaccggacacggaaaactcaccttaatcggccagggctctttagccaatacgcacgatctgtcgctgattgcccgccgctggcaagccttttattttgatgcccaggtaaaagtaaaatttgatccgttcaactaccagcaaatggcaggattaacgaattactataacgatcgccactggagctttgtgtttgttacctggaatgaaattaatggaagggtcattgagataggggaaaataatcgcggaaaatatacttcctatctgaaagataatgccattaaggtgccagagcatgtcgaatatgtctggttgcgcagcaaagtcaggaaggaaacgtatagctatgaatatagctttgatggcgtcgcgttcactgaaatcccggtcaggttagatgccgctatcctttcagatgactatgtcttgcagagctatggcggtttctttaccggagcgtttgttggccttgcggcagtcgactactccggctatggcgccagcgctgagttttatcattttgattatcaggaacttggcgattcgttagttggtaatgaggtttatagctgggaagccaatgagttacgtagttattaa

SEQ ID NO: 179821 - DNA, 561 bp, Klebsiella oxytoca
atgcaaaacagtatgggtaaaaacgttattgtcccggccctctccttttcgactgcatgcctttattgcagcgcaagcgtccacaaggcttgcggatcggccaaccacccgccggcagagatggacatattaacctgcgctaccgcccggaacaccgtaacgactcgactgcgacagcgccgcgctggtggtaaaaacgctgaccgtgcccctcgcaaaataccgttgcatgctaaacgccaaaatcaagggaaaagtaaattaataattgtggcacatcctctattctcctgcccggtcattgaattacgttatttcactcagcgattaagaaaagccccaaatgtgagccatctcgcaaataacagctttatatataatactcggggagctatctggcgtacattttatgcaggaatgcaagttgtaagggataaaatggtggttttagaaaattccaacgcaggcggaatagcatttttgtgtagcgactcaacatactctggagttgcctttgctttgatgatcacagaagtaaaaaaacataataaattaatttaa

SEQ ID NO: 179822 - DNA, 1266 bp, Klebsiella oxytoca
atgtttgccctggtcgatgtgaattcattttatgccagctgtgaaatggtctttcgtcctgatttacgtgggcgccccgtggtggtgttaagcaataacgacggctgcgtaatcgcgaggaatcacgaggctaaactgctggagatcccgatgggcgcgccgtatttcaaaatgaaatcacagtttgagcgtcatcaggtggcggtatttagcagcaactatgcgctttatggcgatatgtcccagcgcgttatgacccttcttgaggagctgtctcccgcggtgtatcaatattccattgatgaagcgtttgtgaatctcagcggcatccatcgcactgaggagcttgaagcattcgggcgccacgtgcgaagtacgctgctgcagtgtaccggattgacggtcggggtcgggatcgggccgacgaaaacgctggccaagctggctaattatgcggccaaaagatggccaaaattcgagggtgttgtcgatctctctttacaagccaggcagaggaaactgctggcgaaggttgccgtcggcgaaatctggggggtggggcggcgcatggcgaaaaagctgaatgatatgggaattaccacggctctagaacttgccgaaatgcccgcttccctcatcagaaaaagtttcagcgtggtgatggaacgcaccgtgcgtgagctacgaggtgagtcctgccttgaacctgaagagtatatgcccacgaaacagcaaatcattagttcacgttcattcagtcagaaggtaagcgaatatgggccgatgcgcgaagccatatgcagccatgcggtacgcgcggcggaaaggctgcgcgcgcagcatcagtattgccgctatgtttcggtattcctgaaaaccagtcctttcgccggcaatgacgtctattacggtaacgatgccgggacagaaattcacattccgactcaggatagccgggatatcgttgccgcagcggtaaaatgcctggagactatctggcgggagggacaccgatatcaaaagtgcggtgtgatgctgggtgatttctttagccggggcgtggcccagttaggcctgtttgatgactatcgcccgcgcgccaacagcgaacagttgatggaggtgcttgattttgtgaatcggcgtgaaaaaggtcggctctggtttgccgggcaggggattacgcgtagctgggagatgaaacggcacaggctgtctccagcctacaccacccggttcagcgacctgctgcgggtcaaactgtaa

SEQ ID NO: 179823 - DNA, 1575 bp, Klebsiella oxytoca
atgaacccattgcgccttatgagttattttgcgctgctgctggtattgatgccgtggcgggcgcaggcagccgacgccgacgatttcgtggctgccacccgcagccaacaggcgctgctgcttgagcagtgggccgtcgcgcctgcagcgccgcgtttaccgctgctaagggcgctgaaaagcgagacattacaatcggatagtcgcggtcatgcgttcagcaagcagggtgataagctactggcgctgggtgcggttgcggctcccgaaggaacaataaaaccggtacgcctgaccaatcgtctgcgtaacctcgcggcaggggcgctggccacgcatcagctggtcagtgacaacgtcacggaaagggcctctgcggcaaaaatcctccagcgcgaagcgacgccagaaatggcgggcctgttacagcagcgcctgacggcggaaaccgacggcgcggtcaaatcgctgctggaaattgcgcttgctcgtctgcagctaaccagtccgcagcctgcgcaaaggctggcggccattgaacggctcggtcactcaggcgacccggaaacccaggcgctgctggcgccttataccgacgcccggcatgagccagacccggcgatccgcgcggcggcgcaggagagcctgagcaaaatccagcaccgcctgctgctgggcgatctgctcggacaggcgtttatgggcctctccctcggctctgtcctgctgctcgccgcgctcggcctggcgatcacctacggacttctgggggtcatcaacatggcccacggcgaaatgctgatgattggcgcctacagctgctggctggttcagcaggcgctggcgcagctggccccgcagtggctggccttctatccgctgattgcgctgccggtggcgtttctgattgccggcgggatcggcatggcgctggagcgcaccgtgatccgtcatctctacggtcgcccgctggagacgctgctggccacctgggggatcagcctgatgctgatccaactggtgcggatgctgtttggcgcgcagaacgtcgaggtcgccaatccggcgtggctttccggcggcgtgcaggttctgccgaatcttatcctgccgtggaaccgtctggcggtactggcctttgtgctgctggtgctgctcttcacctggttgacgctgaacaaaacccgcctcgggatgaacgtgcgggcggtgacgcagaaccgcgcgatggcggcctgctgcggcgtccctaccggccgggtcgatatgctggcgtttggtctcggctccggtattgccgggctgggcggcgttgcgctatcgcagctcggcaacgtcgggccagagctgggccagggctacattatcgactccttcctcgtggtggtgctcggcggcgtcggtcaactggccggcagcgtggcggcggcgtttggtcttggcatctttaacaaaatccttgagccgcaaatgggggccgtgctgggcaaaatcctgatactggtactgattatcctgtttatccagaaacgtcctcagggactgttcgccctcaaagggagggttattgactga

SEQ ID NO: 179824 - DNA, 303 bp, Klebsiella oxytoca
atggggctttacaggagttcatcacatgtatatttgcgttgcaaataccacatagtctggacgcccaagtaccgattcaggatcctgaaagataagctgggtaaggagctgtacaggacgatctatatcctctgtggaataaaggattgtgaggttctggagctaaacgttcagcccgatcatgtgcatctggtcgtcatcatcccaccgaagatctcgatatcaactctaatgggccatctaaaaggacgcagtgcaatcaggctttataatcgttttccccatatcaggaagaaactatga

SEQ ID NO: 179825 - DNA, 1056 bp, Klebsiella oxytoca
atgaataggcgtcagtttcttatgaggggcgtgcctgtcgcctcgcttttcttagggaatgcaaacctagggattgcgcaagtacaaacttgcgagcagtcgccattcttgtatggtgatggggtggcggatcatacacaggctatacaagatgctttcgacaaggcggctttgatggcgaaaaaagttcctaatggtgttcaaaaagtggaggttttgctatcgggtgtcttcaatgtcaaaaaaaatatttcgatagatgcgacgaaaataatcgtaaaaggacctgcgacattaatttttgatcttgtagatagtgagtattgtataacttttaatgaaaatgggagtagtaattcagcttatacaaataatgttggttcgctttttgattcaataaactttatttcaaaaaggaagcaaaacctgttttattgcgcaacaataaactttgcagataaaaactcagtatgcttaattaacatcactcaatgccgatttagtggattcgattgcatattcacaaatggtccgggagggtgggggtggacatggtatatgtgtggttttaattcttgtgaaacattgttaaatataaagagagaaaaagaaacatacgaaagatacacatttgtttcgtgcatatggcaaaatggtggagttgcatttatagtcaacaatcctgatgggaaaatatactgggctgagggaagttttgattattgtaaagctattgctattataaaaaacggccatgtgcaaatttcaggtcacgtggaatacaaaagtcgagaaaatgctttggttaaggtattaggtagaggttcatcatttttatttaatggtggctctatttttataaggaaaaacaataataagtacataatatttgagcaggcatatgataatcaaattactatgataggtgtaaattttttatcagatggcataaacttgaaagagacaataatatctaataaaaaatataattcttttgggattaattttggtaatcaaaaaacccaagagattttaaaaaaccatgtagctgattaa

SEQ ID NO: 179826 - DNA, 1209 bp, Klebsiella oxytoca
atgaacatgaacactaccatcccgagtgcgaaatataagttatcttggatctttgttttattatacttcttaccgtcttttatattcgtttacttcaaacaatcctcacttgccgtaggaataaccattatctcagccttagttattggattaaatgccaactatattgcaaagaagagagttggtaaaaaaggattattattatttgtttcaatgatattgcttttatttatagaatccagttattctataatcaaatggaatgattcgaaaccgatgatgacaatacccgcaattattgccatccttgtcagtgcatggtctctttccgttagaatagcagaaagcgatgagaaaatcgtcgaatcttcattaaaatttgcactatatgtttttttattttttggttggctcgctgtattcagaacaattgatataggaaattatgctttaaaaggtaaaggcgcgttcccattttctgaagacagtcattacgcattatgttctgggtttctttcatgtatagttggttctgtttctagcaaaaaggagaggatatttatattagcaaatataactatacaggctgtattgtttccaaatcttacattattagttttttcttttgtttgttgttttttattttggttttcaaaacgtctgttagctctttttattatatttttagttgcgattacatcaggtgcgtttgtaatacaatccatgcaagggacagcagcaggtgactattttttatccagaatggatttaagtgaaagatctaataatttgacaactttagtgtttttacaaggtatcgatgacagtcgcagagccattgaggacacatatggtacaggactaggatttcaaagagcgggtaccgatgaggtaggagcttatggttatattatacagagtttaaccgggggagaatacaatcgtacagatggcggtttcctgtcctcaaaagttgtaaccgaatttggcttccttggtttaactatatctctattatattttctaaaaataataagctctgttaaagaatataattcctctgaaaacattgttgtaaagatggcagcatccgctttaattgcgttttctgtagaattcttcttacgaggatatggatacttttccccgagcctaattttggttgtagcacttgcattatctgcggcaagaataaaaaaaagatcgtaa

SEQ ID NO: 179827 - DNA, 1416 bp, Klebsiella oxytoca
atgttacttcctgtgattatggcgggtggcaccggtagccgcctgtggccgatgtcccgtgaactctatccaaaacagtttctccgactgtacgggcagaactccatgttgcaggaaaccatctcgcgcctctccggtctggatacccatgagcctatggttatctgcaatgaagagcaccgcttcctggtggctgaacagctgagacagctcggtaaactgtcaaaaaatatcatccttgagccggtgggccgcaacacggcaccggccatcgccctcgcggcgctgcaggccacgcagaatggcgatgacccgctgatgcttgtcctggcagcggaccacatcatcaataatcagcaggtcttccacgacgccattcgcgtcgcggagctgtatgcgcaggctgaccatctggtcaccttcggtatcgttccgaacacccccgaaaccggctacggctatatccagcgcggtgatgcgctgggggaaggggagcacacgccttatcaggtcgcccgctttgtcgagaagccggacctggagcgtgcgcaggcctatctggcctccggagaatattactggaacagcggcatgttcatgttccgggcgaaaaagtatctctccgaactggcaaaattccgcccggatattctcgaagtctgcacggctgcggtccgcgccgccgacagcggcagcgactttatcagcatcccccatgaggtgttcagcacctgtcccgacgaatccgttgactatgcggtgatggaaaagaccgccgatgcggtggtggtggggctggatgccgactggagcgacgtcggctcatggtcagccctgtgggacgtcagcccgaaagatgagctgggcaacgtgctgaccggcgatgcctgggtgcacaacagccagaactgctacatcaacagcgacgaaaagctggtggcggctatcggcgttgaggacctggtgatcgtcagcaccaaggatgcggtactggtgatgaataaaaatcgtgcccaggacgtgaaaaaggtcgtggagtacctgaaggccaaccagcgcagcgaatacaaacgacaccgcgaaatctaccgtccgtggggccgcagcgatgtggtggtccagacgccgcgcttcaacgttaaccgtatcaccgtcaagccgggcggggcgttctccatgcagatgcaccaccaccgcgccgagcactgggtgatcctcgccgggacggggcagataacggtcaacggcaagcagttcctgctgactgaaaatcagtcgacctttattcccattggtgccgagcactgcctcgagaacccgggacgtatcccgctggaagtgctggagattcagtccggctcctatctgggcgaagacgacattatccgtattaaagaccagtatggtcgttgctaa

SEQ ID NO: 179828 - DNA, 1005 bp, Klebsiella oxytoca
atgaagtttttagtgactggagccgcaggattcatcggttttcatgcgtgcaaacgccttctgcaggcgggtcatgaggttgtcggactcgacaacatgaacgattactatgatgtcaatctgaagcaggcccggctggatttgctgcaatcccccctgttcagtttccataaaatcgatctggcagatcgtgaaggtattgcccagctttttgctcatgagaaatttaaccgggtgatccaccttgctgcccaggctggcgttcgctactcgctggaaaatccgttcgcttatgctgattccaatctgattggttatctgaacattcttgaaggctgccgacataatcacgttgagcatttgctgtatgcctcatcgagctcggtttatggtttaaaccgcaagatgccattctcaaccgacgattcggttgaccatccggtttctctctacgccgcgacgaagaaagcaaatgagctgatggcgcacacctactctcacctttacggtattccgaccaccggattgcgattctttaccgtttatggcccgtggggccgtccggacatggcgctgttcaagttcacaaaagccatgctggaaggaaagagtattgatgtctacaactacggcaagatgaagcgcgacttcacctacatcgatgatatcgtcgaggcgattgtacggatgcaggatattatcccgcagcccaatcctgaatggaccgttgagacaggttccccggctgacagctctgcgccctatcgtgtgtataacatcgggaacagctcaccggttgagctgatggattacatcactgcgctggaagaagcgctgggtatggtcgcggaaaagaatatgatgcctattcagccaggcgatgtgcttgagaccagcgcggatacaaagccgctgtatgatatggtgggattcagaccgcaaacaacggtcagtcagggggtgaagaacttcgttgactggtataaggcatattataaggtgtaa

SEQ ID NO: 179829 - DNA, 165 bp, Klebsiella oxytoca
atgcatgagttagccgtgggtataaaaaatcatcctgatgtctgggatgttgtttccgattctaataacttttataaaatagcttccagcgctagctgtaaagacggaacgcatctccacggctggcagtattttatattattatttcctatgccagtattataa

SEQ ID NO: 179830 - DNA, 1167 bp, Klebsiella oxytoca
atgaaaattactatttccggtaccggttatgtcggtttatcgaatggcatcctgattgcgcaaaaccacgaagtggtggcgctggatatcattcaatccaaagttgatatgattaaccaaaagatttctccgattgtcgataaggagattcaggaatacctggcggaaaaaccgttgaattttcgcgcaacaactgacaagcatgatgcttatcgcaatgcagattatgtcattatcgccacgccgactgactacgatccgaaaacaaactacttcaatacgtcgaccgttgaaaccgttattcgcgatgttaccgagattaaccctgatgcgatcatgatcattaaatcaaccatccccgttggtttcactcgtgatattaaagagcgcctgggcattgataatgttattttctctccagagttccttcgtgaaggccgtgcgctctatgacaacctgcacccgtcgcgtatcgttattggcgagcgttcagaacgcgcggaacgttttgctaatctcctgaaagaaggggcgatcaagcaggatatcccgacgctgtttactgattctaccgaagctgaagcaatcaagttatttgccaatacctatctggcgctgcgcgtggcttacttcaatgaactggatagctacgctgagagccagggcctgaacagtaagcagattatcgaaggcgtgtgcctcgacccgcgtattggtaaccactataacaacccgtcctttggctacggtggttactgcctgccgaaagataccaagcagctgcttgcgaactacgaatctgtaccgaataacattattggcgccatcgttgatgctaaccgcacgcgtaaagatttcgttgctgactctatcctggcgcgtaagcctaaggtcgttgggatttatcgcctgatcatgaagagtggttctgataacttccgcgcttcctcaattcagggcatcatgaagcgtattaaggctaaaggtattccggttattatctatgaaccggttatgcaggaagatgaattcttcaattcccgcgtagttcgcgattttgaagcgttcaaacaagaagctgatgtgattgtctctaaccgtatggctgaagagctgtcggatgttgcagataaggtatatacccgcgatttatttggcagtgactaa

SEQ ID NO: 179831 - DNA, 1371 bp, Klebsiella oxytoca
atggcaaaattaaattgttttaaagcttacgatatccgcggcgaactgggcgaagaattaaacgaagatatcgcctaccgcatcggacgcgcctacggtgaatttctgaagccgaaaacgatcgtggtgggtggcgatgtgcgtctgaccagcgagtcgctgaagctggcgctggccagaggcctgatggatgcgggaacggacgtgctggatattggtctgagcggaaccgaagagatttacttcgccaccttccacctgggcgtggacggcgggatagaggtgacggccagccataacccgatgaactacaacggcatgaagctggtgcgtgaaaacgcgaagcccatcagcggcgacaccgggctgcgcgatatccagcgcctggcggaagagaaccagtttgcgccggtggacgcgtcccgtcgcggcaccctgcgacagatatcggtgctgcaggagtacgtggaccacctgatgggctacgtgaacctggccagcttcacccgtccgctgaagctggtggtgaactccggcaacggcgcagccggtcacgtgattgatgaagtggagaaacgttttgtggcggcaggcgtgccggtgacctttatcaaggtgcatcaccagccggacggccacttcccgaacggtatcccgaacccgctgctgccggagtgccgtcaggacaccgcggatgcggtgcgcgagcacggcgcggacatgggtatcgcctttgacggtgacttcgaccgctgctttatgtttgataacgatgcagaatttatcgaaggctattatattgttggcctgctggcggaagcgttcctgcagaagcagccgggtgcccggattattcacgacccgcgtctgacgtggaatacggtggatatggtgacccgcagcggcggcacgccggtgatgtcgaagaccgggcacgcgttcattaaagagcggatgcgtcaggaagatgcgatttacggcggggagatgagcgcacaccactatttccgcgatttcgcctactgcgacagcgggatgatcccgtggctgctggtggcggagctgctgtgtctgaagaacagcccgctgaaggcgctggtggcggaccggcaggcggcgttcccggcgtcgggggaaataaaccgcaagctggagaacgcggcggcggcaatagcgcgcatccgtgagcgctatgaaccggatgccgtcaacgtggacaccacagacggcatcagtattgaatatccggagtggcgttttaacctgcgcagctcgaacaccgagccggtagtgcgtttaaatgttgaatctaaatcaaatattgagctaatgaaaatgaggacgtcggagttattagattatctaaattaa

SEQ ID NO: 179832 - DNA, 936 bp, Klebsiella oxytoca
atggaagacatttccatagttgctataattccgactataggtagggacagtgtatttgcagctgttacatctatactaaagcaaaaatatccagttaatgaaattgttctttgttatgacggtaatgctttcaaagaatttgaaagaaaaatatatgatttctttgatgctgagaagcgtatcaaggtaattgattgtggggttttcaatggcggcaataatgcacggcaatgtgggattgaaaattccagttcaacttatattgcacttttagatgatgatgatgaatggttgcctacacatactcaagagtttattgaacttacaaaatctgcattcataaaaaccgaatttatcttctattcttcaggtgtaattttggttgaaaatgggcgcaatattggtgaaaggcctactagaatgaaaagtgaaaaggagtctttctctgaatatatatttgtaaaaaaaggatttgcttgggaacatggatttatacaatcatctataatgatattttctagggcacttgctgaggctattccgtttgataaatcgttacgctttcaccaggatattgattggataatgaaagttcagaggtccaagcttaattatatatatttacagaatcctaacaaaacagttgtatattactcatctactgatagtgtttctaaaaaaataacatatgctcaatcatccgcgtgggctttaaaatcttttgaaccgagtgataaacgaccgttaggtgattttttgcttacgcaaacatttagatttgccaaaaataatggtgattacgttaatatgtgggaagtgttttttacaggcataaggaaagggcgtccttcaatatacgcactctctttagccttatctgctttattgattccgaagagtataaaaaaaggcctcaaaggatttctaaaaaaatag

SEQ ID NO: 179833 - DNA, 1281 bp, Klebsiella oxytoca
atgaataaaaaagctctgtctaattctctatggatgatgtcagaaaagattatttccatttttggattgatttttgttacttcatatgttgctaagtatgttggaccatcaatctacggcgaaataatgtatgcaacaaccatttttcaaattgctcaggtcgcatcacagcttggaagtgatgttattatatttaagcgtataagcaaaaaccatcattcaggtgttaagttaatcaatgcaacattacctatccgcataattatctatttagttattgctattccaacattatttatgcttgatataaacggttctggcaggggggggtattttgccattgcttgctttatcgcagggttattctcatcattagatattttttcaacctattttaatgcgttgcttcgagcaaaaatcaatacttatgttaatgtgatttcaatatctttggccctcttagtaagatgggtgatatcattttacaagttagatcctgtgcttttatcattccccattattttgagttctatgtttccttttctttttaggtgttttatctatagggaaaatttcagtattcaaccttttttagcgcatcacaaaaaaaaatatacaatttacctgttgaaggtgggggcaacttttgtcgtctcaacaattgcggtatcgatatatttacgactttcctttatttccattaactatttttatggaaaggaaatgttaggtgtgttttccgtcgctaataatttaggaactgcttggttatttatttgtacttcttttataaattcatatatgccttcaatttttaaagaaaacaacgattgcaatattataatgaagtctgttaagttgaaatatattgttacaggtgtgtcacttttaattatttcttgcgctgctatcttcgggcgattgtttattggttatttttatggtgtgagtttcattaatgcctatgagccaatgattataatttgcttcgccactatgatttcttcattatcaacaataacgtctagatatatcgctcgttattcagggtatttatatttatcaaagaaatcattctctttgttgcttgtaagtgctattttgaatttttatttagtaaaacaatgggggataattggtgctgcatatgcaattgttatcactgaaatgatatctttaactgttagtaattattttttcaaaaaaggaattgtgttaaaaatgcataaaaatattttcttgataccattgtctatgctaaaaaaatctaaggggaaataa

SEQ ID NO: 179834 - DNA, 867 bp, Klebsiella oxytoca
atgaatgttgctatattggtggttctatatgacaagctgttagaagattctaatagcttgaaatcgctacttgccatttgccctgataatgtatcattgactgttataaataatgggccagaaaaaataattaacatcacatcattccatacaaatctggttagcaaatttaagtgtttcaaattaatagagtacgtaaataacaaaccgctgagtatactttataatgattttataaatagcatgccagatgtggattattatatactttttgatgatgattctattatcagtagtgattttatttctgtgattaataatctaggtgatgaagagtttgatattttagttccgaaaattaaatctataagggatgatcgtatatattaccccgttgaagaaggtgtggttgttgagcaagagcgagcattagacccaaagaaaaccttttccatcggatcaggaatgattatctcaaactcatgtgttaataaaatcctagtgcattaccccacaatttttgatgaaagatatgctttctatggcgttgatatgagtattttcagaagaattaggttaataattaaaaaatctaaaaaaccttgctttacacttattacgagaggtatggtgctgcattcactttcacgaattgattccaaattaactattttcagagctagcgagcgtttaattgatgctacactcacattcagaaactatttcggatttatgaatgcaattgatttagttagaatttttgctagaggtttttcagttttaggatggcataaatctctctcaatcatcctgacatatgttttcagtggttgccatcataggtcaaaaaagtggaattctaattga

SEQ ID NO: 179835 - DNA, 1143 bp, Klebsiella oxytoca
ttgaagataatggttgttaatacattatattatccttatcacgtcgggggggcggaaatttcagttcaaattctttgtgagactcttgctaaacgtggtcatgacgttcaggttgtatgccttcatcaggaaaaagaccgacagaaagatgttataaatggtgtaaaagttgtttatctaccacttgataatatttattggccatacgatgggcagcaaagaagtagttttgagaggcttcggtggcatttaaaagatatatataattgcagtatgaaatatcggttagaggaagagataaataaattcgatcccgatgttgtccatactaataacatttctggtttttccgtttctatatttgatataataaaatcgcacggaaaaaaactgatccatacggcgagagattattacttactccatcctaattcaaccttatttaataagggtatgaatttaaatccgaattccctttcttgtaaaatatggagtgcaattaagcgaatcaaatccaacaaaattgatgatttcatcggtattagtaattacgttactgatttacatcaaacctgcggctttgctagaaaagcttcattcagcacagtttacaaccccatagagccgattcaccgtaaaaaagaattcgatgaacataaaattataattggttttattggtaaattatctgatgataaaggtttttttgattattgccgtttagcttataaatttaaggaacacagtaatattgaattctgcgcagcaggacgctgttcaaagcgagatgaaaaaagtgttaattgcgcggccaaaaaaagtaatgtgaatttacttggatttattaatttgacctcatttctctcaaaagtagatgctgtaattttacctgttaaatggaacgaacctttcggaagaacggttgcggagtgtgcagtttcaggtactattgtttttacaaacatgaatggtggtatcactgaaattgctaacatatgtaaaaatgtcttccctattgatatgtttaacatcaatagcgctaccgatatgataaaagcatctaataagttagtcgacaatcctttcaataaaaacaattcagttattgaatacgaaaaaatttatacgcgttcaattatataa

SEQ ID NO: 179836 - DNA, 1053 bp, Klebsiella oxytoca
atgattgtcaattgtagaaatttattaggccatacaacaggtgtgcagcgttatacccaaaggatcattgatgaattaacaaaaaccggaaatgaaattattcaagttaaaccgggctgtaatatatctggagtcaaaggacatctatgggaacagtttgttttacctgtagaatataacaaaataagaaaaaaaggttcattgtggtctccaagtaacacaggccctctttttgtgaaagatcaagttattactatccatgatacagtgccgtttgatcatccagaatggcttaataaaaaattcgttgagtggtacagatatatacagcccaagctagtaaaaaaagtacgacatataataactatatctgaattttctaaagagaaaataatggagcatttaggtgtgccagaaaataaaatttcagtaatatataatggagttgaccttaacgagccatcattggtaaatgttaatcatgataaagaaaaccataaatttgagaattatattctttcagttggctcgctcgagcccagaaaaaacttaccaaatctcattgaggggtttaataactttaagaaagaaactaaatctgatattaaactagtcattgtcggtaaagaaggactgggtagagtttttaatacttctcataaagttaaaaaagatatcagtgatgatattatctttacagggcatgttactgatttagaacttgattgtctatacagaaatgcttctgctttctgctacccttcattatatgaaggctttggtttaccgcccttagaggccatgctgtatggaatacccattttaactagtaataatacagcaatgaaagaactttgtgctggcaaggcaatactcattgaccccttgtcaactattgatatagctaaaggaattaatgagataatcacgcaaagtatttctcatgagcaaaaacacaaaaatattgaatttgctcgttcattaacttgggcgaaatgtgcaaaagaaactaacgacatattgcaatctaacaatgttctctctgctatataa

SEQ ID NO: 179837 - DNA, 1338 bp, Klebsiella oxytoca
atgaagctggcactacagaacgaggtagcgataagcaatgatgaagttcggcagctggatcgcgcttatgtgtttcattcatggtcgatgcagggcaatttaaatccgctggtgatcgccggggctaaaggctgcgagctgtgggattacgaaggcaatacttacctggatttcagcagccagctggtcaacgtcaacattggctatcagcatccgcgcgtgctggcggcgatgaaagcccaactggaagagctggtgaccatcgcgcccgccactgccaacctcgcccgcggcgaagcggcgaagcgcatcgtcgagctggcgccggaaggctttagcaaagtgttcttcaccaacgccggcgctgacgcgaacgagaacgccatccgcatggcgcggctctataccgggcgcgataaagtgctctctgcctatcgctcctatcacggcaacaccggcagcgccattgccgccaccggcgactggcgccgggtgccgaacgagtattcccgcggccacgtacactttttcaatccctacctctatcgcagcgaatttaacgccgcgacggaagaggaggagtgccagcgcgcgctggcccatctgcggcggatgattgaatgcgaaggcccgaacgcgatagccgcgattctgctggagtcgattccgggcaccgccgggattcttgtcccgcccgagggctatatgcagggggtgcgggcgctggccgatgagttcggtattgtgctgatccttgatgaagtgatggccggttttggtcgtaccgggagttggtttgccttcgagcaggatggcgtggtgccggatctggtgactttcgccaaaggggtcaatgcgggctacgtcccggccggcggcgtgctgattagcgagccaatcgcccgctactttgatgaccatttctttgccggggggctgacctattccggccatccgctggcgatggcggcgattgtcgccaccattgacgcgatgaaggaagagaaggtggtggagaacgcggcgaccatcggcaacgaggtgctgcgtccggggctggaggcgctggcggagaagcacgcgattatcggcaacgtgcgcggccgcggtctgttccaggcgctggagctggtcagcagccgcgaacataaaacgccgctgggcgctgccgatatggcggccattaaaggcgcgttaaccgaagccggcctgctggcgtttgtggtggagaaccgcattcatgtggtgccgccgtgcaccatcagcgccgggcaggtggcaaaaggcctggcgatttttgatgcggtattcgcccgcttcgcgaacctggctcagtaa

SEQ ID NO: 179838 - DNA, 1347 bp, Klebsiella oxytoca
atgaataaaatctgggtcgggtgtgttctgacgtctttatttacccctctggctaatgcacaggcgccgttatctcttgaggaacggctggcgcaaatggaacaacggctaaaggcgaccgagcagcgggcggccagcgcggaggcagaaatccgcgcgctgaaaggtcaggaagcgccagcggccacggtggccagcgccgcaccggctaaacctgctttacagcttaatgattatggtgaattaaaattctatggcgacgttgagtttaatatggacggagccagtcgtaccggtagcctgacgtcggtgaaaaccagtgccaataaaaactgggcgccgggagataaggaacgctgggatattaacggccgcattcttttgggctttgatggattacgcaaaggggctaacggtaaatatgccggattcagcgtacagccgctggcggatatgaatggcaaaatgaatcttgatgatgccgcatttttcttcggtcagcaggatgactggaaaattaaaatcggtcgttttgaagcctacgatatgttcccgcttaatcaggatacctttattgaatattccggcaacacggccaacgatctgtatagcgacggctacggctatatttatatgatgaaagaggggcgcggacgcagcagcagcggcggcaatttcctgctgagtaaaaatatcgataactggtattttgaggtgaatacgctggtggaggacggcagctcgctgtttgtcgatcagaactatcacggcaacgcgctcgataatcgtaaaaacgtggtgtacgtgcgtccggtggcgtcctggcagtctggcccctggtcggtggcggcagcaatggagagtaacctcgttaacaatgcttacggctatcagaatcagaacgggcgctgggtcgatcagtccagccgcaccggctacggtatgaccatgagctggaatacgctgaagactgatgccgaggacggagcggtggtgaacctgagcaccgcgtatctggacgcggcggatgaaaaggatttcagcgccggtatcaacgctttatggcatcgcgtggagctgggctatatctatgcgcataacaaaatcgaccagtttaatctttccggcgtgagcgcggagtgcgatggcgactgcgcgattctgacgccggggcgctacgacatccacactattcatacctcctggcagctgccgaatattatggatatgccgaactttaatatttatctcggggcctatgcgtcatggctcgattcatcggcggcgaaaagcggtaataccgatgaacgctacggcgcgcgggtgcgatttaaatatttcttctga

SEQ ID NO: 179839 - DNA, 540 bp, Klebsiella oxytoca
atgcaaaggatgaagtcaggtctgttgatatttttgctcccgccgctggcgctggccggtaaccagtggaacgtcacgctgcccggcggaaacatgcgctttcaggggatcattattgccgagtcctgccgcgttgaagcgggcgaccggcagatgacggtcaacatggggcagatcagcagcaatcggtttcattcggccggagaagacaccaaccccgtccccttcgatatccacctgcaggagtgcagtaccgccgtcagccagcgcgttggcgtggcctttcacggcgtcgccgatggtaaaaacccggacgtgctctcagtaggcgaaggaccggggatagcgaccggcgtgggcgtcgctctgtttgataaagacgaccagccaatcccactgaacggccctcccgccgcctggacaagattgtataccgggccaaccacattgcattttgtagcgaaataccgggcaacagggcatcaggtcaccggaggcgcggccaacgctcaggcctggttctccctgacctaccagtaa

SEQ ID NO: 179840 - DNA, 726 bp, Klebsiella oxytoca
gtgacgataaaaggggtaaacgtgagaacaacactggcgataacgcgcggtttactggcgggagcgctgatgatagccgccatgggatttaccgctcgcgccgaggctggcgtggcgctgggggcgacccgcgtcatctatcctgccgggcaaaagcaggttcagctggcggtcaccaacaacgacgaaaagagcacttatttgattcagtcatgggtggagaatgccgacggcgcgaaggacggccgctttgtcatcaccccgccgctgttcgccatgcagggaaaaaaagagaataccctgcgcatcattgatgccaccagcaaccagctgccgcaggatcgggagacactgttctggatgaacgtcaaagcgatcccgtcgatggataaatcaaagctcagcgacaacacgctacagctggcgatcatcagccgcatcaagctctattaccgtccggcaaagctggcgctgccgccggatcaggctgcggaaaagctgaaatttcgccgcggcgcaggcacgcttacgttgatcaaccccaccccctactacctgacggtcaccgaactcaacgccggtacccgggtgctggaaaatgcgctggttccgccgatgggtgaagccagcgttaaattacccgccgatgcaggtcgcgagattacataccggacgattaacgactacggcgcgctgaccccgcggatgcagggcgctacgcaataa

SEQ ID NO: 179841 - DNA, 825 bp, Klebsiella oxytoca
gtgtatggcccctttcttaatgaagaggtggtcggcgaagccctaaaaccgtttcgtgaccgcgtggtcatcgccaccaaatttggttttaccttcggtacggacaacaagcagcagattttaaacagccgcccggagcatatccgagaagctgtggaaggatcattacgccgtctaaagactgatgtcattgatctgctgtatcaacatcgtgtcgatccggatgtcccgattgaagacgttgcgggaaccgtgaaagacctgatcgctgaaggcaaagttaaacatttcggcctgtccgaggcgggtgcgcaaaccattcgtcgtgcacatgccgtacaaccggtcaccgcgctgcaaagcgaatactccatgtggtggcgcgagcctgagcaggggatcctgccgttgctggaggaactgggtattggttttgtgcccttcagcccattaggcaaaggcttcctgacgggatcgattaagccaggaatcacttttggcaaggatgattaccgcagtaccgtaccgcgtttcgccgggcaggcgattgaagccaatgaaaagctagtctcattgctgggtgaactggcggcagagaaaggtgtgacgtctgcacaaatcgcgctggcgtggctgctggcacaaaagccgtggattgtgcctatccctggcaccacgaaactgcaccggctggaggaaaacctgggggccgccgacatcatcctttctcaggatgactcacggcagataacccaggcgcttgaaacgattaaaatcgtcggcgaacgttactcccctgaacatcaggctcgcgtgggccgttaa

SEQ ID NO: 179842 - DNA, 324 bp, Klebsiella oxytoca
atgaaatttctacctacaacaaatatgcgggcggtgaagccatgcctgtcacccgtgactatctggcaaatgctacttagtcgtctgctggaacagcattatggcctgacactaaacgatacacctttctgtgatgaaaccgtcatacaggaacatatcgatgccggtatcactctcgctaatgccattaactttctagtggaaaagtacgaactgggtcgtatcgatcgcagagggtttagctggcaagaacaaacgccatatctcacgattattgatatcatgagggcccgtcgcgatctgggtttaatgaatcgtaattag

SEQ ID NO: 179843 - DNA, 342 bp, Klebsiella oxytoca
atgaaatctactgattcagagaacgattcatttctaaaatggggactgaatcgtaatgtgacgccttgctttggcgctcgtctggtacaggagggaaaccgacttcactatctggctgaccgggccagtttcaccggtaagttcagcgaagcagaatgtcttaagctggatgtggcattcccgcattttatcagccagatggaatcgatgctgactactggtgaaatgaatcctcgccatgcccactgtgtcaccctgtaccacaatggtttcacctgcgaagccgatacccttggcagttacggctatgtatacatcgccatttatcccactcaacgttaa

SEQ ID NO: 179844 - DNA, 543 bp, Klebsiella oxytoca
atgaataccgcattatccccggtgtcatcgcagcctgaactctttccactggcgattatggcccagcatggttgtttgctccccgcgacctccggattaaccccctatgcccaacgcaccattcgtcgtgccatcaacctgctggataaatatttgcgccagcccggtatatcctttacctccagtactgcagctcgtgactggcttcggttacatctggcaggacaagaacgggaagtgtttatggtgctctatctcgataaccagcaccgtttactggagagtgaaacgctatttgccggttcgattaaccatgtccaggtccatccccgtgaggtagtgaagtcagcgcttcgcttcaatgctgcagctgtcgtactggcgcataaccatccatccggtgatccggagcccagtcagtgtgaccgcaacattacgggcaggcttaaagaagcgctggcactggttgatgtgaacacgctcgatcatctagtcatcggttcagagggcatagtgtcgtttgcagagcgaggctggatatga

SEQ ID NO: 179845 - DNA, 444 bp, Klebsiella oxytoca
atgaatacacaaaatcatcaggttgcggagcataccgcaattactgcctccgtggtcccggacgagctacgtatcggcttctggccgcagcactttggctccatcccacaatggataacccttgaacctcgcattttcgcctggatggatcggctgtgtgccgattaccaaggtggtatctggcgcttttcgacgctcagcaatggcggcgcttttatggctcccgagtcggagcaagatgaaaagtggagattgttcaacagtatgaacggtaacagcgcggaacttactggcgaagcagcagggatagtcgcctgcctgatggcttacagccaccatgcctgtcgtaccgagtgtgacgcgatgactgagcactattatcgtttacgcgactacgcgctgaaccatccggaatgcagcgccattatgtatctcattgactga

SEQ ID NO: 179846 - DNA, 822 bp, Klebsiella oxytoca
atgcgattagccagccgctttggtcgtataaaccagatacgccgtgaccgacctctgacccacgaagagctgatgagtcatgtgcccagcgtgttcgggagtgacaagcatgaatctcgttcagacaggtacacctacatcccgaccatcaccatcctcgaaagcctgcagcgtgagggctttgaaccgttctttgcctgccagacgaaggttcgtgatctgagtaagcgggagcacaccaaacacatgcttcgcctgcgtcgtgccggacaactgaccggacatcaggtgccggaaatcattttgctcaacagccatgacggctcatcaagctatcagatgctgccgggactgtttcgtggcgtctgtaccaacggtctggtctgcggacagtcatttggcgaagtgcgggtaccacataaagggaatgttgttgagaaggtgattgaaggcgcttacgaagtgctcggtgtgtttgaccgggtggaggagaaacgcgatgcaatgcagtcgctggcgttaccaaccccggcccgtcacgcgctggcaaatgccgcactgaagtatcgctttggtgaggagcaccagccggtcacggtatcgcagttgctgaccccacgtcgtcgggaggactacagcgatgacctgtggaccgtttaccagcgcgtgcaggagaacctgatgaaaggtggattgtcagggcgaaccgctcaggggaaaagcagccgcacccgtgccgttaccggcattgacagcgatgtgaagctcaatcgcgctctttgggtgatggcagaaaatatgctcgagtttttcgggcgttaa

SEQ ID NO: 179847 - DNA, 474 bp, Klebsiella oxytoca
atgcgactgccttacgtaatatttacagcagctttactttcttctgtatcaacagcacaagctattcccaatatgtggacgagtggttttgggatgggggtcacggaatacattatcagtagccctgagaaggtgatttttgacctcaactgtactggtaatcccgatgaacaaaacattctgcagcatggcgtattagtaaccctgcccaatggtacgatactggattctcacgacgacgggacagaaataacggtggtcatggataacagccagtatccgttaccttcatccctcggctggaggaatggcgataacgcctgggtgtcatttattgacgcgttgagtcagtcgtctaatttcgatgtttacgtcaacaataacaaagttggcacttttagtccgggtctgaagaatacgcaaaaagagctgtctgacctcagtgagtgccggaccacacattacagcgattaa

SEQ ID NO: 179848 - DNA, 261 bp, Klebsiella oxytoca
atgggatggtttattgttgttcgctcgaaaccttccagagattgtccgggtggcatatgggggtggatcactcccagtaaagacgatgtggcaacagggtataccattacgccaggtaaagaattcaatctgaccatgaaggatatgtgcagtccggatatgaaagtaacgttccgcccgaataaaaaggaccctcgttatgacgatctcgtcgggatctatgccgggaaagaagcgtttcgctacaaacaaataaaataa

SEQ ID NO: 179849 - DNA, 141 bp, Klebsiella oxytoca
atgactggcagtaaagacaacaatttcaattttttcattgcattaaccttacatttaattatggagaccatctctaatcagtttgtccggattgcccccgactttctgatggagaaaatgaattcagcgactgctgaataa

SEQ ID NO: 179850 - DNA, 717 bp, Klebsiella oxytoca
atgacgcttcaggagcggcgacatgaccggcttgccgtcaggttgtcgttgattatcagccgcctggtgtccggtgaaactctgtttattcgcaaactggcaactgaattcggggtgtcagagcgcacgttacgtcgtgactttcgggaacgtctgatgtatctcgacctggattattaccaggggcagtgcagtctgcgctcggatattcacagtacgcggcaggaaatagatattctgacctttgcccaccgcacggggttggccggggttttcccgggctttgaccggcgactggtcagcagcctgctggactgtgatgagcgaccctgtctggtatggcatcaggacagacctcatcccccgtcaggaaagctcagcttctacaggctggtcagagctattttgggatgtcagcgcatcaccattctgactgaaggggagcgtcatgaggccgttgcaccttaccggctaatcgctctggacggttactggtatctggtcgctgaacataacaggcaattacgtgtcttccggctggatgagattcatctggtaaggccatcccgggaaacatttattcgcagtgagtttctccatcaactgtcggaggacaaacattttatctcagccttacctcatttccgttttattcagcagtcgctgaattcattttctccatcagaaagtcgggggcaatccggacaaactgattag

SEQ ID NO: 179851 - DNA, 876 bp, Klebsiella oxytoca
atgaataaacctgatggccttcaggcctttgaacaaccgctcgcgtcgcttccgcgcacgcttcgccagcttattcttgaacgtatccagaacctgacccattacgagccggtgattggcatcatgggcaaaagtggtgctggtaaatcctctctctgcaacgaacttttccggggcgaggtgtccccggtgagtgacgtgaacgcctgtactcgcgacgtactgcgcttccggctgcgcagcggtcgtcacagtctggtgattgtcgatttaccgggggtaggtgaaaacgggtggcgggatcacgaataccgtgccctgtaccgtcgtatgctgccggagctggacctggtgctgtgggtcattaaggccgatgatcgggcactaaccgtggacgagcagttctggcacggtgtgatgcaaccttacaggcaaaaggtactgtttgtgattaaccaggccgacaaaatcgaaccctgtcatgaatgggataccctcaccagcaaaccttcaacacaccaacagggaaatcttaaagctaagcaggctgcgattatggcgatgtttaaaccgcatcatccggtctgtgtggtgtccgccagcactggatggggcattgaggagatggtggcaatcatgatgcgctgtctgcctgaccgcgccaccagcccggtggtgacacaactgcaagggagactctgcacagagccggtaaagtcgcaggcccgtgacagtttcggtgacgctgtgggccgggttttcgatacggctgagtcatcgtcgttcctgcctgcatcgctgaaaacggtgattcgtagcgtgcgtgatgcggtggtgtcagtcgctcgggctgtctgggactggatattcttctga

SEQ ID NO: 179852 - DNA, 441 bp, Klebsiella oxytoca
atgaatatcaatataagaccagctcaatcatctgatgttgaaagtatttttaccgtcagaacatcagtcaccgaaaatcatctgagccgtgaagatatgcttgagatgggcatcagcgaaactaccgtgcgcaatatgatcggagagaatctttgcgcatgggttgcaacagatgatgatgaagtggtgggtttttcgatgatttcaagggagaagggctctctttttgctctttttgtccttcctgcatatgaaggcagaggcatcggccgcagactaataaagattgcggaacaggagttgttcaaacaacacgaagttgtctggcttgagacagataaaaacagtcgtgcggccaaattctacatgcaactcggctggggtaataagacatcattaaatggtgctaatattcgattagagaagcaacgttgtaattga

SEQ ID NO: 179853 - DNA, 918 bp, Klebsiella oxytoca
atgttgcattacgatatgatccgcagcgagataatgtacctaaaagcgctggatagttttttcaatacagatcactcgttattgtgcagtacttatgatacgccggatgattttcgacgcttgatctctcagatacttgaacgacattttcttggcgatcaggacagaatcaaagctgcgcggaaaacacttaaagaatgggccgaccttcaactgattgataaagattattttgattgtttcaaaggttcaccaagagcatcgtggtttgctcaccattatatttttgaatacccagtaaaatctgcagggttgacacttggtggattgaggagtgacgtcggttgttcaggttgttttaattctcttttaatggacgataatatcttcacaaagcttgatttctctaagtttaatttcgacctggacgatattgattgggacctgataacaaatccacaggatactgcttcgaaaaaaccgaaacgtgttttctcccgattttatctgaacgccggagcaagtaccgatctgtacaacgccactccggtaactgagcgtgaactcatcaatggtataatgaggtacattgatgaagctccatgctcacttggagataagatctcttatttcaaaaaactgcatgaatgctggcttgagcaatacgatttttttctgacagattttgactggatgtcacgtgatgatgaaactcagttagtatatctctgggactatctcaaaggaaaaggacgaatagcgggctatcttcgcccttataatacgtctatgcgttatgacatgattattgcggctatggatgtgtggaacgtccagcctgaagagaagctggagtttattgagaagatgaaacatgcctggcaggcggcgaaatcttatcggcgatccgctaaatag

SEQ ID NO: 179854 - DNA, 579 bp, Klebsiella oxytoca
atgcacacaccttaccctttcaattccagatatacgatgaactggtttctactgtctctgatcaatgaccacctgaatcagctaatgaaccgatactcccgaatacaggccctcagactcgacctgttctatcagaaaggtacagagcgttttaaacgtcattcatggaacgaaaccgagcgagaagtacgtgtactgattgaacgcaccctgcagcacacaaatctgacagggtatttctgggtactcgagaactctgtagaccacggctgccatgcccatatcgtgttctatctcgacaggcaccttaaccaggctacctacccaatagctgagagagtcggaacaatatggcgggaaataacgcaacgagaaggctattacaaccgctgcgaatacaagtccacttatgacgtcagtattgataagccagtgaactacgatgataccgaagccatcgataacctgcgctacatcatcagctatctcaccaaagaagagcaaaaacacggtcactatcactacggagccagtgaagtaccaccgccaagcggactggggcgtcctcgcacgctgtaa

SEQ ID NO: 179855 - DNA, 225 bp, Klebsiella oxytoca
atggaatacagcatcatgacagaacaaatctctttgcttgatgaccaactggtggatatgcgcttcatcaccaagcttacagggctgacggacaagtggttttacaagctgataaaagacggccagttcccgaagccaattaagctgggccgcagctcccgctggaagcaaagtgaagtcgaattatggttacagcaacggattgccgattcacgcggtcattga

SEQ ID NO: 179856 - DNA, 609 bp, Klebsiella oxytoca
atgaaagttacatggaccgtcacgcctgtggggtatcagcgcattgcgaaacgatgcccttcttgcaagattaaacgggacttcacggcgtcaggtgcatttcgggttaattctcaaaagaagcttctggatgtatggagtatctataaatgcacgcactgcgattacacctggaatatctccctgttttcgcgtctgcacgtcagcaaaattgaccgccagctttatcatcggctaatgacaaacgatgccgccacggttcaacattttgcctgtgatatcgcgacgctgaagcggaacaacgccgagctatcgggtcggcctgattttaccgttcaggagcgctggccgttaagcatcaccgcccaccagcgggttcgcgttagtgtcaggatctcccgttcatttcaggtaagtctgctgtcgattttgaagcaacagctcatgctgagcgctggtgaaattctgagagggttggagtcagggcagatcagcggcgttacgatgaagatgcttaaatcgagaaagctaaaggcagcggaatatgaattccagctgtctgcggaaacgttatatgccaggcgcaggattgttctgacgcatcgttaa

SEQ ID NO: 179857 - DNA, 393 bp, Klebsiella oxytoca
atgttttcttacgtgatgctgggtactaacgatctagagcgcgccataaggttctacgatccgctgatggaattgcttggacatccaaaggcaggccgtaatgaagaaggcgcatcctgggggacgttctgcaataaccataccatcggattgtgcgtcggcaggccctttaaccagcaaccagcgagcgttggtaatggcacgatggtcgcactgaatacccactcgtttgaacacatccagcagttgtacgaacttgctatcagtctgggcgccagggatgaaggtacaccggggcacaggccacaatacggacagggattccatagtgcctatgtacgcgatccggacgggaataagctggcgtttgtgttctatgccgatgagggttga

SEQ ID NO: 179858 - DNA, 477 bp, Klebsiella oxytoca
atgcaaataatatcgtcaagatgcatcattcgaccatttcagtcacacgaaattgaaagttttatggtgtatcgtaatgatgctgagtggatgaaatatcacggatttaaggggctaacaaaagaggactatgaagcagagttgctgggagttcttacacctgctcgcggtattcaattggccattgtcaacaagctgacgcaggttttgattggtgatatttatttacgtcagcaatgcgatgtgttttggctcggctataccatcagtcccgcttatgctcgccagggatatgcaattgaagcaattaccgccacgatcgactggataaaagagaacggtttttcactcatcaaagccggtgtgaatccggaaaataccctttcaataaaattacttatcaggattggcttcaacttttcaggcatcgaagagggtgagcatatttatgttctggatttaacaaaaggagaataa

SEQ ID NO: 179859 - DNA, 258 bp, Klebsiella oxytoca
atgaatttatcccgtcaggaacaacgtacgttacacgttctcgctaaaggtggacgtattgcgcacgtccgcgattcttcaggccgcgtcacttccgttgaatgctacagccgcgaagggctgttgctgaccgactgcacgctcgccgtcttcaaaaaactcaaaaccaaaaaactgatcaagtccgtcaacggtcagccgtaccgcatcaacaccaccgggctgaataacgttcgcgcacagcttgataaccgttaa

SEQ ID NO: 179860 - DNA, 1638 bp, Klebsiella oxytoca
atggatatcagcacccttatttcctcatcccggcacattcaactgtcggcggaggagagcaaaatcccctgggacgaaccggccttcagccagcggatgctggcaaatcatttgtcgcaggatcacgactgggccagccgcaggcaggaggtcattgagcagcaggtcgaatggatcgccagccagttaccccctggcgcacatatcctcgatctcggctgcggccccgggttttatacccaccgcttagcggaacgcggattttactgcaccggcgtggatttctcaccggcatccgtgagctgggcccgtcagcaggcgcagaataccggattgaatatcgactatgtccagcaggatatccgcgcatactggccggataaatcgttcgatttcatcatgatgacgttcggggaactgaatgtgtttagcacggcagatgcgcgctcactcgtcagccgctgcgcgctgtggctggagccgggtggcaggctgctcactgaagtccatactttcgacgaagttaaacgtcagggaatggctgaaccgagctggcaacgctgtccgaacggattgtttcttgacgtccctcacctgttgctgacggagcatggctgggatgaggaagcacagaccagctcaacgcagttctgggccatagaggcaaacggtcacaccacccgtttcggcagccagatgacggcctggcgcgatgacgagtacgttagcctgctcgacaatgccggatttcaccagcttcctcctcctgaaagccacgactggccagtcagcgaaacatttgaaggaaagctgtttgctctgctggccgaaaaagcaaaaacctcagaggaacttcctcttaatactcaacgcaataaaaggaattccacattggatatcccacgtatttttaccatcagcgaaagcgaacaccgcatccacaacccgttcaccgaagagaagtacgccacgctgggtcgcgtgctgcgcatgaagccgggcacccgcattcttgatctcggcagcggctcgggcgagatgctctgcacctgggcccgggatcacgccattaccggcgtaggtatcgacatgagccagttattcagcgagcaggccagacgccgcgcggaagaactcggcgtcagcagccgggtgcagttcattcataacgatgccgcaggatatgtggcagaagagaaatgcgatgtggccgcctgcgtcggcgcgacatggattgccggtgggtttgccgggacggtcgaactgctggcgcaaagccttaaaccgggcgggatcatgctcatcggtgaaccttactggcgtcagcttccggcaacggacgagatagcccaggcctgcggcgtcagctcgacaagcgatttcctgacgcttccagggcttgtcagcgcgtttgacgacctcggctacgacgtggtggaaatggtactggcggaccaggaaggctgggaccggtatgaggccgcgaaatggctgaccatgcgccgctggctggaagccaatcctgacgacgacttcgccgccgaagtcagggccgagctaaacatctcgccgaaacgccacgtaacgtacgcgcgggaatactttggctggggcgtgttcgcgctcatcgtcaggtaa

SEQ ID NO: 179861 - DNA, 390 bp, Klebsiella oxytoca
atgtacgccaaatcctatatcgctttcgacgggagcggtcgtctgaccggtgcccgtactgcgcagccccccccttacgatcgtaatacctgccacagcagtagcgtgctgcaataccatcctgaatacatcaccgaacgcccgtggtttgaacaccggcccgatgatctaacggagaacaggcgacagcactgcccgtatgtaaatcctgtggaaaaggaagtaagacgaattcttaagttgcgccgttacgtggcggatgctcaacccgtgatactcaggactgactggtactgtagcgactgcggcaacaattaccacggtgaacgttattgcgtgtcatgtggtactggggacttgagccatatgccggaagaggcctcacgatga

SEQ ID NO: 179862 - DNA, 657 bp, Klebsiella oxytoca
gtgagaataaaaaaagtatttagcgggtttctggcgataatggtcatggcgcttctggggcaacccgcgtttgccgcagagaattcatccacaccgtctcgcacgctgattatctatttttcccagcccgaggaaatgaagactgatgctgtggacggtttttccggggccagcgtattacaaaaatacacgccggagaccggcagtacgcagtttgttgcgcagctgattcagaagcagactgacggtgacctgtatcgcattgaaaccgccaccccctaccctcgccagcatgatgcactgttacgctttgccgaaaaggaacagcaaactagcgccagaccatcactaaaaacaccgttgcccgatcttagcgattacgacaccatttacgttggctatcccatctggtggtataccatgccaatggtgatatatagcctctttgagcaaaatgactttgccggtaaaacggtcatcccctttaccacccatggcggcagccggttagccgactccctgcgacaaatagcccgcatgcagccgcaggccagattagtcactcgtgcgctatcaatctcgcgcaatgatgtttcaggccctgacgttcccgcgcaggttgagcaatgggtaaaacaaattcagccacagcgttaa

SEQ ID NO: 179863 - DNA, 651 bp, Klebsiella oxytoca
atgacgttacttctgctggtgctgatggggtttcaccttcacggtgaaatcgtgcatgaatgtgcagggattatttttacgctgctcatcatgttgcatttataccttaaccggcatcgactatggtcactgtcgccgactattccattaacaatgctgagagttaacagggtcattaacgcagtgacattcgctgttattctgaccgctattgtctctggcatgatgctgtcccgacatattcttctggcgctaccgttccacaacccggcgaactgggtcagaaaagtacacatgacgtcggtccactgggggatgctcattctggcgctgcatatcgggttgcactggaaaatgctggcctcttttttctgccggatcctgaatatctccggcaactcacacgttgcaaatgtcgttatgccgggcgttttttcactcatcgcactactgggtttgtacggattactgcgccaggactatctcgattatttgctaataaaggtagatttctcttttttcgattacgatgaatctgcccctcttttttatttccgctacctggccattattgttttatttgccttaatgacgcgctttttgctttggttatttatatttagaaaatgcaaagcgatgtcaccacaatag

SEQ ID NO: 179864 - DNA, 927 bp, Klebsiella oxytoca
atgaaaagtgatgtagtcgttattggtagtctgaactatgacattctagtccagcaggatcggcttccggaactgggcgaaacatttactggcaatgaattaatgctcatgccaggtgggaagggggctaatcaggcggtgcagtgttctagacttggactgaacgtcagcatggttgggtgtgtcggaaatgacatttatggtagcgagctgatcaactctttacgtgagaataatgtatcggtagagaatgtaaacaagcggggtaccaccacaggtatcggtatcgtccagatccttgaatcaggtgactactgcagcaccattatcaaaggcgctaattaccttatcagtgaagatgacatcactgagtcactcttcgaaggacagccactggttattcttcagtcagaaattccggcccccgttgttgagtatattatcggcgttgccagcacccaccattgccgcattatccttaataacgccccggcacgggatgtctccgcccacgccctgagtctggtggactacctggttgttaatgagacagaagccgccttcatgagcggtgccgatgtatcttcgattgatgacgctcattcttgtgcaaccggactgcataaacgagtgaagggacaggtaatcattaccctcggtgaaaaaggggcggtattgtcccaggaacatggcactcgacatttcccggctgtattctgtccggatgttgttgataccaccggtgccggcgattcatttattggaggtattgcctactgcattgttaatggtttttcgctgacggacgcgatcccctttgctgctgaaattagctcttgttcaatacagaaatatggcgggcaaaactcttttcccatgctaccggacgtttctcatgcccttaaaaactccagcttgttagattaa

SEQ ID NO: 179865 - DNA, 882 bp, Klebsiella oxytoca
atgcacagcaggctgaagggtaatgaagtatttttacttgcgagaacgctggctcctgaactaggtaaaaaagagagagctatcgcccgctttatagatgataaccctcagtccctggcacgtatgtcaatcacagaaattgctaattatttgaaggttagcgtatcgagtataaccaaagtctccaaaaaactgggatttaccgggtttcatgatttgaagttaagcgtctctaataacatgaacgccgttgaaaacactgttgacattccggttgttcccgattcggaaaagtatgttgaaagtgttcttgaaagtacttttcttaattctgttcttgccctgcaagaatcgttaaatgtcattgattgtgccgtcatcaaatcggttgcatatctattcattaataagcctgaagaagccagaatatttattgctggctgtggcggttcaagtgcaatctgtgatgatttcaatcataagctactaaaaattggtatcttctcatcagtatttagtgatagtcataaacagctgatgactgcatcgctgatgcggcaaggtgatattcttctggccgtgtcccactctggacaaacgtcggatattatccagatggtaaatatggcaaatgagagcggcgcagaaacgatttgtttaactaattatccgaacagtccgcttagccttattgcccgacattcaattatttcggcagtaaaaaataacccgatcacgggcgagaatgctaccacccgaatagtacatctgaatattcttgacgctatttttaccattattgccagtaaaaccagtgacaaaagtaaaaatagcttactcagcaccagaaatgcggtagcgtccaagcgtaccgccagttaa

SEQ ID NO: 179866 - DNA, 1092 bp, Klebsiella oxytoca
atgattttactggaaatgaagtttttatgtctgagcggtataattttatttatttgcagtaatattttcccgcttctatttactgagatgaaattcaatcttataaaaacacctggaatacaaaacaaggtgactgcaatgaaattttcctcccgaattaattctttccgttcaagacctgaactattcgatgcgaaaaacaaaatggatacgtgtgatctcattacccgtatgggtagtgtggaaggattaacacatatcgaacttaactatcctgagcattttattggccaggataaagaactgattaaaaaatgtattgctgataatggtctgcaggtaggtggtattgcgctgcgctacaataaagactttattgatggcgagtttaccaacccgaatcctgcgttgcgcagtaaagccattgagacgacgctggaagccgctgagatgtgtaaatttctcgagggcaataccgtcaccttatggtttggatatgacggctatgattacccgttccagcaagattacttccgcgcgtatgagctgctcgttgatgccttacgcatcgtgacccaggcacatggggatatgcagttcagctttgaatacaaaccttatgagccgcgtactttctcctttattggggatgtttcctcaaccttgatgttgattgatgatgttggcagtgacaatctgggtatcaccctcgatttctgccatatgataatgaagaaggaaaatccggccttctccctgttccagtcagctcgtaaaaaccgcctcgtcggtttccatcttaatgacggctacggtcatttcgatgatggcctgatgctgggttccgtacatctcctccagactctggaatatatcttctacgcgaaacgcgttggttttagtggcctgatttatttcgataccttcccgagccgcgaagatccggtcgcggagtgcgctcagaatatccgtatgtacaaagcactgtctgactttattgaccgtctcagcattcctgaaattgagcaaatgatccaaagccaggacgccctgaaagtacagggtatgttactgaaaatgatcgccgaataa

SEQ ID NO: 179867 - DNA, 1236 bp, Klebsiella oxytoca
atgtttgaaaagataggtttacccaggaatttattatggggatatatcggcctgaccatctttatgattggcgatggtgttgagcaggcgtggatctcaatctggcttgtagagaaggggctgtctgttgcacaggcatcctacctgatcaccgcgtatggtgttactgttacgctggcagcctgggttactggcgttctggttcagacgctaggtccgcgtaaagtcatgttttacggtctggtaacctttatcattggcagtatcggttttatcagtgttggccttaaacacatggaaatggcgtggatgcttcctttctacgcattacgcgggattggatatcctctgttcgcttactcattcctgatatggattaactacagcacgcctgttgcgcgcagggcgactgcagttggctggttctggtttacgttctcattagggctgagtgtgattgggcccttcttctcttcgatggcgttaccggtgctgggtgagatccacgtgctctgggtcggcttactgtttgtcctggtcgggtctgttctcgggatctgggtcaaccgtgatgttgttcctgcttcagaaattcacccattcagcgcgggtgaattactgaaagggatcaccattctgcagcggccggtcatcgcgatgggcctggtggtgaaatccgtaaacggtatcgcgcagtacgggctggccaccttcctgcctctgtacctgatcagttatggctacagtaaaacagagtggctgcatatgtggtctgcagtattcctggtggctatttttgccaatctgttctttgggttctttggtgacaaatttggctggcggaaaaccattatgtgggtcgggggatttggttatgccgctgttctcattctggtgtgggcggtcccccaggtactgggtcataatttctatgtgatggcatttgtactttgcctttgcggcgtgaccatggcgggctatgttcctttgtcagcgttatttccgatgcttgccccggacagtaaaggagccgctatgtcagtactgaaccttggtgcaggcctgggagccttcatcgctcccgctattacagcattgttctattcatctcttggcgcaggtggtgttctaggcatctatgccggtttatatatcctcagtggcgtgcttacacctttcctcaaaacgccggaggagcttaatcagcaggctgaactgaaagataaggtcgcataa

SEQ ID NO: 179868 - DNA, 852 bp, Klebsiella oxytoca
atgcaaactgtaaaactgaacaacggtattgaaatgcccctgctgggctttggtgtgtttcagatgtctgatgccgctgaatgcgaaagagccgttattgatgcaatcgatacgggataccgcctgatcgataccgccgcgtcttaccagaatgaaacccaggtcgggaacgcactgaaacaaaccggtattgcccgtaacgaactctttgtaacgaccaaactttggctacaggataccaattacgaaggcgctaaagcacagttcgaacgatccctgaatcgactgcaacttgattacgttgacctgtacctgattcaccagccttacggcgatgtccatggggcctggcgcgccatggaagaactgcatcaggcaggaaaaattcgcgccattggcgtcagcaatttccatcctgaccgaatggccgacctcatcgccttcaacaaggttgcccctgcggtgaaccagattgaagttaaccccttcaaccagcagctacatgccgttccatggaatcaaagccatggcattcagccggaagcctgggcaccgtttgctgagggtaaaaatggcttgttccagcatcccgtgttaacggcaattggccagaagtacggcaaaagcgtgggtcaggttgtgctgcgttggatcttccagcgaggcatcatttcactggcgaaatcggtgcgcaaagaacgcatggaagagaacatcaacattctcgattttgaactcagctctgaagatatgctgcagatttccgccctcgacaccgcaaccagcgccttcttctctcaccgcgacccggcgatggtggaatggctgactggccgcaaacttgatgtttaa

SEQ ID NO: 179869 - DNA, 189 bp, Klebsiella oxytoca
atggagaattgcactactgtattctcaatgctgagctctgtgtgtaagtatccgctgaagatgcggatggatagccagcgcaactggggctttggtctgtgttatttgtacctgcgtaatgtaaaaggcctacggttcaaccacaaaagggtgtaccgggtttactgcaggttgtctctgaacatgtga

SEQ ID NO: 179870 - DNA, 1848 bp, Klebsiella oxytoca
atgagtgagatagatatccagggtgatgacgctttggttcaactgctgttgaacgcagacaaaggcgatatagatctgctgatcgattatgtcactaacaccggtaagcttggtttttccatgtcagacagtgtgaagaatgtattacaggaggccaaacgccaggatatacctgatgacgaaactctgcgtctgcttattcgggagttgcagcatttcggtggtaatacgttcgtgaatctgtttcgtcgcaacggcgtcaactacagcgaaattgtagatgacgttgccagccatctgaagatgaaagtcccggctgatgcatcggtagaagaaaaagaagcgctgattattgactgtgtatttacctcgtcatggaaaaaaatgtcggatgatgagcgccgccagattctgcgtgagatgggcatgaacggctctgccagtatggatattcctgtctggcagagagcggcactcgttgccaatagtcttgcacaaacgacagcaggcaaagtactgcctttaattgcagggctaggtatcgggcgtgttttgggcgtattaaccgggccggttggcctggctattactggtctttataccgcctatgacatctcaaaccccgcgtttcgagtgacactgccttgcgtggtgcaaattgcctggattcgcttaaaaaactcccgccagttccggcttgccacccagccatcaccagcctcgatgcctgctctcacatacgatcaacgctggggttttggtcatgatattcaccaacctgcgcttacggttgcgacaattccaccttcggaaagtatcaacaccggtgcgatgcaggagcaggatataaccagtatttcacggctgagcccgctgttgcaaacattaccctcactggcgacctctgcacatgttgccagccatcaatatatggaagtcattattaatggtcctctggcgagtgtaaaagatggccctggtttccgaggcttcagcctgggagaaaaagggattaaagaacatgccgttctgctgaatcctgacaaactcaatcaacttgttaacaccggtatgttgttgaatgttgcttctgctgtgttggcacaaaaacatctggcagatatcagcaagaaattgacagaaattgttgaggcggtgcatgaggtatctacattccagaacaatgaacgtaagtcagagatcattggagccattcagtatttgcagcaaattacccctgtggtactagaggggcaatgctcacccgcaatacgccaaaaactggaggatattgaagtccagttttccgccctgcaggatcacttactgacgaatattactgctgctggcaacaaagtggcagcgcttaaagaccgtgggctctttggcagtacggagattacgaataagatccagacccaacaaaagatccttgatgagcgaatccatgaatgggacctggcaatgaaggttcgtgcgcaagcgttgcatcttctgactcatactgaaggtgacacaacgctcgtcaggcaccgtcaacaaaccattgcgggtacctaccagcagtttggcagcgttattgaaaacgttgaacgtcagctacagcagagaatacaaaatattagcgcattggcggaacagagtaatacgacaaatgccaacaaagtattgctacggaaatggacgacaacgactttaatgcagcaaaagatggctattgaagaagcccatttatcgttcggacaattccaacaaggattgttggctgagcaaccgcaatctgcacgattactggtagaagtgcatgatgggaagccggtgaggtgttttgaattgccgcttgtttaa

SEQ ID NO: 179871 - DNA, 2916 bp, Klebsiella oxytoca
atggcaacgcaaagcgaatacgagttagaagcgcagctggtggaacagctggttgacatgcactacgaacgggtaaatgtcactgatgaagccagtatgaaagccaacatgcgaaagcagattgaaatccataaccgactggaatcctcaccgctaacggatagcgaatttaaccgtattttcttgcacctgacaaaaggcaatgaggtcatcgatcgcgcaaagatcctgcgcgatcgctaccagttattgcgtgatgacggcaccgagaagtggctcagctttatcaataaagaggaatggtgccagaacgaatttcaggtgacgagccaggtgaagcagttcaatgccgagcaaaacacacgcaaaacccgcttcgacgtcacgctgctgatcaacggcctgccgctggtgcagatcgagctgaagcgtcgcggtctggggctgaaagaggccttcaaccagatcgatcgttaccatcgggatgcgttctgggtcggtagtggcctgttccagtatgtgcagatctttattattagcaacggcgtggataccaaatattacgccaacaaccgcgccaaccattttgagcagaccttcttctggaccgatgaaaagaataacccgctcaaagcactggagaaattcacagacgcatttctgaaagtctgtcacatcgccaaaatgatcactcactacacggtgctgaacgaaacccgtaagtgcctgatggtgatgcgcccctatcagttttacgcctgtgaggcgatgatccaccatgtgaaggacaatctccacaagcagggacggccggagaacggctatatctggcacaccaccggctccggtaaaacgctgacctcgttcaaagccagtcaggtgatcatggaaatgccagaagtggatcgggtcatttttgtggttgatcgccgggatctggattatcagacggcgaaagagttcaacggctttgcgaaagacagcgtggacaccaccaacaacaccggtacgctgataaaacatctcaagcaaagcagtaccaaactgaccctgaccaccattcagaagctgaataacgccatcacccatgaagggtataaagcgcagctcgcacacctgcgcaaagagcgcattgtctttatctttgatgaatgccaccgcagtcagttcggtgatacgcataaagcgatcgtgaatttcttcgagaatgctcagctgtttggttttaccgggacgccaatctttgccgataacgtcaatatcaccaatggggtcaaacagaccaccgagctgttgttcgataaatgcctgcataaatacgtgattgtcgacgccatccgcgatgaaaacgttctgcgctttgccgtggaatatgtcggcacttacaaacgcaaagagagcagcaatgagatcgatatcgatgtggaagatatcgacaccaaagaggtgatggaaagcgatatccggttaggcaaagtcaccgactatatccttgcccatcataacgccaagactcgcaatcgcgagttcaccgcgatgttctgcgtcgggtcggtcgatatgctgatcacctactacaaactctttaaagaaaagcaggctgtactgcaggcggcggatgccaactacaagccattaaaaattgccaccatcttcacttatgccgccaatgaagcggacaaaagtgataaagaggcggtaaacggtctgctggatgaagaggatattagcctaccgcagggctcgaaagtcgatacctcgagtcgcgatcatctggatagttttatcaaggattataacgagctgtatggcaccagttactcagccaatgattcaaagagcttctacaattactacaaaaatattgctcagcgcaccaaagagaaaggcattgatattcttctggtggtgaatatgttcctcaccggcttcgacagcccggcgctgaacacgctgtacgtcgataaaaacctgcgttttcacggcctggtacaggcgttttcccgcaccaaccgcattctcaacgaaaagaaaagccacgggaatatcgtctgcttccgcaatctgaagaaagccaccgacgatgctattgccttgttctcgaacaaagatgcctcttctaaggtgcttgtcaaaccctttgaggagtacttcggggattatcagaacgctgtcgatcgcttgttaacgctgacaccaacggtggaaagcgtggacgatttgccagatgaggaagcacagctggcgtttgtaacggcattccgcgatgtgatgcgtttgaaaaatatcctcgaaagctttgccgactttgacgatgcggcgaaaccgctgtcggaccaaacgctggcggatttcaccagtaaatacctcgatatccacgacaaggtgaaaaagcactccagcaaggagaaagtctcgattcttgaagacgtggattttgaagtctcgttgattcatcgcgacgaaattaacgttggctacattctgcgtctgctagcgggcatacaggcgatgccgccaaaagagcagctggagcagaagaaaaagatcatggatattgtcgacagcgacgtcacgctgcgtagtaaacgtgagcttattgataattttatcgaaaaaagcctgctgcatgcctcgcatgatgaagatatcactcaggtgtttgaagcttatgtcgaacaggaaaaaggtaaggcgctggcagccttgtgtagcgaagagcgactcgattcgatcaaactgaccggcttactggataactacctctttaccgacgtgatgccgcgagaggatgaagtggcagaaacgctaacctggacgccgaagattctggaacgcaagaacgtgcgggcacgtgtctacgaccgtgtgcgcaatgtgattgaaacgtttatcaatgggatgcgcgggttttaa

SEQ ID NO: 179872 - DNA, 1230 bp, Klebsiella oxytoca
atggagccgaaattaagatttacggggttcaacgatccatggagtgagacttcgctaggtaaaatatcatcatttattaccagtggttctcgtgattgggcacagtactattctgaatgcggagataaatttattcgcatgacaaatctcgtaagagatggaattacattgaacttgtcagatttaaaatttgtccgcttgcctgaaaattcgaatgaaggtaaacgaacagccttgcagcatcatgacattttgatttctattaccgcggaactgggtaaactgggatgggttccagatgatttgggaactgcatatattaatcaacatactgctttagttagacctgatttatctatagtctcatccaagttcatcgcaaatcttttatctacgaaaaaatacaattatatattaaatcagcagaatgatgctggcgctaagtctggactcaatttaagcacaattaaaaattttggattttacgtacctaataaaatagaacaaacaaagatcgccgattttttaacctctgttgacgaaaaaatcacgttactgaacaagcagtacaacttgctgtccctgtacaaaaaaggcatgatgcagaagatttttagtcaggaagtgcggtttaaggatgagaatggggaggagtttcctgagtggaattcttgccaattaaaagacgtagcaactcgtgtaacaagaaaaaataaagaaaacaaccaaacaattctaactatatctggtcgagatggattagttgatcaaatgtcttattttaataagcaaatagcttctaaaaacgtgattggttattatttgatcaataatggtgagtttgcgtataataagagctactcacaaggttacccaatgggtgcgataaaaatgttgactaactatgatagaggtgtggtgtcaactttatatatttgtttcaaattaaatactaatcaatctaacagtttctaccagcattacttcgagagtggtcttcaaaatagatctatagaaaaagttgcccaagaaggtgctagaaatcatggcttgttaaatattggggtaaatgatttttttgatatagaactgcaaataccgagcctaaaagaacaaataaaaatttcggattatctttctgctctagacgataaaatcgccgcaaaaaaaacagagctggacaagttaaaagcctggaagcagggcctgctccagcaaatgtttatataa

SEQ ID NO: 179873 - DNA, 1608 bp, Klebsiella oxytoca
atgtctccccagattgaagcgcaaaatttaagtgaactgcaaggccgcctgtggaatatcgccgataccctgcgcggtaagatgaatgccgatgaattccgcgactactgcctaggttttatcttctacaaatatctgtcagaaaaatttgtcgcgtatgcgaacaagattctggcggaagatggcattcagtacaatgaactgactgcggaacatccagcgtatcaggacatcgttgatgcggtaaaagaggacagcattcagacgctgggctacttcctgccgccaaccgatctgttccacaccatggcggaacgcgtggccaaagatcccaaaggcgcaggccccggttttattctgcaagatctcgccacgaccatgcgcagcattgaacagagtaccttgggtaccgactccgcggatgacttcagtaacttgtttgaagacctcgatttaggctccagcaagctcggcagcacggcgaaagcgaaaaatgagctgatcggcaaagtgatcaccgagcttgataagctgagttttaacctgagcgaagcgagttccgacattctgggtgatgcctacgagtacctgatcggccagttcgcctcaggtgcaggtaagaaagccggggagttctataccccgcagccggtttccaccctgttggctaaaatcgtcaccacccacaagttgaagctgaaaaacgtctatgacccgacctgtggctctggctctttgttattgcgcgtgaagcgtgaagcctcgtcggtgggtaaaatctacggtcaggagatgaaccgtaccacctacaacctagcgcgtatgaacatgatcctacacggggttcactatgcggattttgagatcattcaggaagatacgctggagcatccgcagcatacgcatctgaaatttgacgccatcgttgctaacccaccgttctccgccaagtggagcgccagcccgctgtttatgaacgatgaccgctttgcccagtacggcaaactggctccgtccagcaaagcagacatggcgtttttacagcatatgtttcatcacctggaagatgacggcactatggcagtggttctgcctcatggggttttattccgtggcgcagcggaaggccatattcgtcagtttatgattgagaagctgaactgcattgatgcagtaatcggcctgcctgccaacattttctacggtaccagcattccgacctgcgtactggtactgcgcaagtgccgtaagcgcaacgacagtattctgtttatcgatgccagcaatgactttgaaaaggtgaaaactcagaaccgcctgttgccggaacatatcgacaagattgccgatacctataacgactggaaagcgctcgagaaatacagtcatattgcgactctgaaagagatccgcaacaacgattacaacctcaatatcccgcgctatgtcgatactttcgaagcggaagaagagattgacctcaatgccgtggcgcaggaaatccgcgatctgaaagggaaagtggcagagattgataagaccattgctgggttctgtaaggagctggggattgaaacaccgtttacagtggtggaggacgttaagtga

SEQ ID NO: 179874 - DNA, 573 bp, Klebsiella oxytoca
atgctgctcacctacaaggaaatagctacgtttacggcaggctcgcacatcagccgtatccagcaaagtgcagatgggcccgcatttcgtttctatgcgaccgaacagtttctagtcgatgactggcagtcagctattgtgtcagcagagaaagagcaatgggttaaaacacatcaggatgttgtgattacgctgaaaggagatgttgtcatcagcctgatccatggcaaggctgttcgtgtgagcaccgaaaatgccgggcgtatcttaggtaataactacgtcaaagtggatgtggataccagccggattgatgccgcgtggtttctctggcatttcaatgaaagcctggagggacgacgtcagcgtattcagaccacccagggttctaccgtcgtacaacgtatcgctgtgaatgaactgaaaaattttaccgttacccttccgccactcgcgcagcaaaaagcgatgggggggctctatctggcagcgcgagaaaaacgcttttatcagcagcggattgccgccctgagcgaacaacagatcctgagcctactcagtggtatgatttga

SEQ ID NO: 179875 - DNA, 777 bp, Klebsiella oxytoca
atgcatttgagaaagctggcagtccgtaatttcagaaggctgcacgatgttgttatcgatcttgcgtcagacatttcaattttcgtaggggcgaataacagtggtaagacttctgtcggtcatgcacttcaactattcaccggtaaaagccgattcaatattcatgacttcaatgctgaatgttggactgacattgtcacatttggagaaggggcggatgctgcgtcgctaccttcactggaacttgatatttggttcgaagtaacaccgaatgatgttcatcgtgtagtctatcttctccccagcctatcgtggtcaggttctctggttggaatgcgcgttgctttttcccccattaatcctgaagaaatccgttcgcgcttcctcgcagtacgtcagcttgctatcgatgccacagctaaagatgaaaatggaactcccaaatacgatccttcccctcgtaatctgtgggaatatcttcgcgatagactcaatgacgaatatgaactccgctattttgttttcgatcccacacgtttcaatgcggaaatgatatccgaggaaggctatgagcctaatccgctcacagggcgcgatcatagtggtcgcgaaatactgaacagtgcggcagggatgtacagcctgatcggtagctgcaaactcaaaggtatcgagccggaggcctaccttcgccatatcctgagcgtactgccggaatggcccagcaacaaagtggcggaactgctgccatggaacgtggttcttaccgataaataa

SEQ ID NO: 179876 - DNA, 1677 bp, Klebsiella oxytoca
atgtcgtgtctgtcctcttccaggtacgggcttctgctggccagtctcactgccacagccctccctgcagcacccctgagccctgcggaccagagtgccattgagcagcaacaaaaggcattgctggaacagacgcaacagcagcgcgacatgctccgccatgccacatccgcaccctccctcccggaagcagccccttcagatccgaccggtcagtgttttacactgcggcatatccggctggagaacgtcacagtgctcccgcgctctgccttgcgaaaactgacgaccattccggcaccgggctgtatgacgctcccggatatccgggagcgggtgcggaatgtcacccaggactatctttcccggggattcatcacttcacgcgcctggctaccggaacaggatatttccggcggaacgctggtcattgccgtcacagaagggaaggtggaagccgtcacgctggaggggcatgaggaaaatgccatcagtatggcttttccccgggcggagggccgggtgctcagtctccgtgacgctgaacagggtctggagcagcttaaccgcctgaactcacgtccactgaccgtagatattctgccggggagccgggagggtttttcccgggtagagctggtaccggtcagtcagcgttttcctgtcagtcttgatgtgggtgcagataacagcgggcagaaaagtaccggcagcggacagctgaatgcccgcctgacagcagacaatgtgatgagactggcagaccagtggacactggccgcaggcagggacagtgagtttcaccatgacagacgcagccgcagtatgcaggccggcgtaacggttccttacgggtactggctgttcagtgcgcagtatgcatggtctgatttctatcagatgctttctgttggcgggacactgcagcgctggcgctatgaaggcaccgtgcagtcacagcgactggccgccagccggacgctactgcgtgacggtaagcaacgtctggcgctggatgtcgctttgtcccgccgggaaaccgaaaaccggctgggcggcgtacgtcttgacgtcagcagcccgacgctcagcagcgtgacggccgggctgagctacagccggagtatcggtggtggctatctcacactgggcccgtccctttcccacggcgtcccgcttgcgggcgcgacccgggatgaccctgcgcatcccggccagccacgcagcgaattccggcgcttcagcgcaagtgcaagctggttctacccgatgacatcctctgtgtattggctgacttcagcttacgggcagaccacgcctgacagactttatgccagtgagcaactgtctgtcggtgggcagtattcggtcagggggtttaaagagcagtatctcagcggtaaccgcgggggctactggcgcaatgaactgacatggcaatggatgacggtgccgggcgtgggggcattctcagcaacgggggcgctggataccgggcatgtcatgcgccaggaaggaataactgacggcgggacgctggccggggcttccgtcggactggagctggctggccgctggctcagccagtccctgacgctggggatgccgctgtcgtatcccgacagactcagtccggataaacacgtggtttactggcaggccaccgtttcactttaa

SEQ ID NO: 179877 - DNA, 5346 bp, Klebsiella oxytoca
atggataaactcgcacatccgctggcccgtggggccagctggctgctgatatacctgaccgccgttcagcctctgcatcccgccattgccgcgggtatcactgccgcgaatggcaacactcaggtcgtgatgaaacccgggaacgttccggtggtgaacatcgccacgcccaacgcggccggtatatcgcacaacacctaccaggattttaacgtgggaacgccgggcgcggtgctgaataacgccacgcagggcggaaaaacacagctcggcgtcaccatcgacaacggcaatgccagactcaagggtaaaccggccgaactgattattaacgaggtgaccagcggcaaccgttctgaactgaaaggccggctggaagttttcggcaataaagccggcgtgatgattgccaacccgaatggtatcacctgtgacggatgtggttttatcaacaccccttcagtaaccctgacaaccggcaaaccgcagtttgacaaacagggcgcacttgaggccctggaggtcaaaaaaggcgcggtgattatcggcggaaacggtctgaatggcgccagtaccgaatatgttgatgtcatcagccgggccactgaactgaacggcaaaattaacgcgaaaaccctcaccctgacgcagggagcgaaccgggtcagctttaaggacggcacgataaaacccattgcaggtgagggggcaaagcctcagcttgctgtcgatacaaaggcgcttggcggcatgtatgccggtaaaatccgcctggtcgccaccgaagccggggtcggcgtcaacctgagcaatatgacatccactcagcgggacatctccctgacgacggccggaaaaatcaccctcagtaacattaaggcgcagactgacctgaacgtcagcgggcgagatatcgtcacgccagccgggttcagcgtgcgcgctgaacgtgatatgacgctggcggcgaccacagtggataaccggagcagcaccactgcccacggggatatgcgggtatttgcgtctacggtgcgcaatactggcaatggcgcatcattacacagccataaaaatctgtggatacagaaggatgcccagggtaataaagccagtctggtggagaaccggtcggcgacgataaaaacgaacacgggtgacctggttatccggactgacgttctgaataatgtccgggaacgtcttatcagaaaggagcaaaacacaccggccacatcacaggaaatagaccggagcctgggaagtttaacccctgataattcaaaagtggctgcggatacggaccgccttgcagtcatcctggatccgggagttcagaagtggtttggtcgtgtagactttaagataagcccttacgtcaacgtcaggagagacagtatttcttatgatgtctctgaacccggcgttgtttcttcaggtgcgaacgcttatctcagtacaggctctttgctgaatgatgcatcggtaattaaatctgccgacaatctcatcatgacaggagcaacattaaacctcaaaaattacagttccggaacactgaacacttatgcagtttttgatgtgcccgaaataggccatgcgcctcgtggaaaatatttaactcgggacactgtcgtttataaaaaaggtgaagttagtcggttcgagccctcgggtattacctcttatcttcttagtgccgggaataacctggtcgctgatttttccgggcggatagaaagtaatgaaccctaccctacaaatgtaccctactcaggtgttgtggcccgcccggacacgatgacggctaaaaatatcctgctgcgcgccggaagtatcattaccaccgatgtgatgaaggcatcaggggatattaccttacagtcagacagcggcacgaaaatggcgctggcgctgatgacggccggaaaggatatctcggttctggcgggcggaaatgttgagtcctggcagagtgagctgaaggggcagaacattaccctggtcagtcgcggtggtgacgtcacctctcataccagcgagtggcccaactatttccattccaatggcctgcgctggctgggaagtctggaggcgtcacgtgatttatctgtgaccgcaggtggcaaaattctgctcaggaacacgcgttttcctgttctgagccagaatatttctctggttgcgaacggggatatcacgtttgataaaaatgaagccatgctcgggcatgagcggccaggcgttgtcctgacccaggcccgcaaacaggaactgtttaaccggatgttgcccggagagccgcttcgtgcttcaggtgatatcaccctgagcggccagcgtctgtctctgtatggtgcagggctcgacgccggcgggaatatcagcctctcatcggcagccaatactgacctgaacatgcggagcctgagtgaccgctacagtgagttttttccggacagccggatacccgaattacgcagcaatgtgaaagcaggaggaaacctgcttatcagctcagcggcagatatcggcgtgcagggcgctcatattgtcgccgggaaaaccgcgacgctgcaggcagggaaacttctctggctgggcgcctacggatatggtgtaacggacagtggtaatgacaataacagggatgaactcaacgtactgacccgtctgcacggagcgaagagcctgacactggcggcaaacggcggtattcaggccaacggcagtacgctgacctcagacggtaacatcacgctgacatccggcgggaatatgcagtttcagtccgcgcgggggacgatgtatcgcgagtccgggaacagctggacggaaagcgtcagccagacaggcgtcacgctgaattcaggtggtgcactgacggttatctcgggtggcagcatccttttccaggcatcgcgtttactggcaaagggggcgatggatgttgctgcaaaaggcggctggctctatgcccaggcgatggaagagtccagtcattacgaacgggaaaccacgaagagaaagtggtggggtaagaaaaccaccgttaagcaaacgaaacacaccaccaccaaccgggtgacggagtttattgcgggaggcaatctcagcctgctgagccgcgatgacagtacctatgaagccagtaaaatcgaggcgaaaaagaatgccacgctgaccagtaccagtggaaaagtcagtttcctggccgtgaaaaacaccactttcgagcagactgtcagcacctcgaaaggcttctatatcaaacaggcaaataaaggctacagcgaaggaaaatgggtgcttccgtctgttcatgctggcggaaaactgacggttaacgcggccagcggcatcagtgccgatatcaaagcgaaaaatggtcaggctttgcagggcgcaattactgctctgggcgcgctacccggtacagagtggctgaagggactgaatacccgcagcgatgttcagtggaatacggttaaggatgcttacgacagctggaattataagagtcagagcctgaatccggctgtggcggcagtaatcgctgtcgctgcagctgcggccaccgcgggcagtacactggcggcgaccgttgcgaactctgtaacgtccaccgtgggtggcggcgcagtaacgaccggggcggttactgccgggatgtcttcgctggctgcacaggccgccgtggcactcgtggaaaatcagggaaatctgtcaaaaacgctgtcggcactgggaagcagcagctcggtcaaatcgctggccacctctatggttatcggcggcgcgctggcgggctttgataaggtcatgaatgttgatgttccgcccgataaagcaaaattgccggcgctggtcaaaaacgaaggctgggggaaggtggtccagcgtgtggccggccagtcggttattagctccagcctgaacaccaccatcaatggcggcagttttaaggacaaccttacgaacgccctgctggcgaatattggcaaccagattaatgccgaaggggccggtctgattggcgataacggcgaggttctgggtataccgggcaaatcgctgagtcatgcggtggtcgcgggtatcagcgctgaaattggtcgtggtgacggaaaaggggccgctgccggagcgctggcagcggagctggccggggttatcatgcagagttctttgtttgaaccggctaatctgaatgaacgggaacgtcagttactgcgactgcaggaagccttaagtggtaacgaggcaaaagagcagacggcacgcgtgattggcgcactgaccggggcactcattacgcacacaccggaaggtgtgtacggcggtgcggacagtgcccagaacgtctatcgctacaacatgacggaacatatgctgcagcagtatgccctggataatcagcgggatattctggcagcgagtaaaggtgatacggcggcagcgaagcgtgttcaggctcggagagaagctgcggtaatagttgctacagttggcggtggaggtctggtgcttacagcaggaggaatgacactcattactgcagcaccagacctaatgctagcagcacgattagttattagtagctgtaaatccaacccggcactgtgtctcaaccaagccgggatccatgctattgatatggtagcaccagaagctgctataggcactaatgcattgaccgctggaagcgtatgggttctgggtaagagtgaaacaagtgttcagggactggcacagaaattactgagtacatctgatgaactgtatcgctctggccgaattaatacatcaccactagctgaattcattaagggagaaactaatacctccattaatctcccggtgaaaactaaagactatctcttatcaagaggaatgacagcatatccaacaggaatagcattcgagattggtcagccagagcacctggctcaggttgtcggctattcacagaaaaaaggtatcacaggagcccataatgcaatcatgtttaatgatgcagttaacaagtataatttaaagattatttctaaaacaaaagggaatgctaatggtattgaatacattcaatatcaaataccatcaaaagatcgagagggtaagatcaccggttacaaaaatgaaatttttaagaaaacagtttataaccctgctatctttagtgatcaaaagatacttgacttgggtctgcaggctgcagccagtggttataaggccgcgatatcttcaggaaagagagagtttgtggccacctctggtggtgtaaatttccagatttatttagatacgaaaactggggttgtacttaatttttttccggtgaattga

SEQ ID NO: 179878 - DNA, 357 bp, Klebsiella oxytoca
atgagtgaatatatatttgaaaaagttgattgtgataacgaccctgaatgggtggtcaaggagttttttaattctttgaacttgtcagggaatttacactttggtgttgaacgaattgttgataaatgcgggtttggaattgaggatacctattgtcactttccagaccttgagggttcagatcctgacttttattttcaggggattatgtttggtgtttgggggggggaaattgtagtagatgagttgacaggctataaatatacattgatggcaagtgagaagtactgtcttatacatcccgaagaaaagcataaatttgaaaggttaatgaacaagctcacatactgtagttga

SEQ ID NO: 179879 - DNA, 462 bp, Klebsiella oxytoca
atggatgaaacttacatcagagtcaggggacagtggaaatatctgtaccgggcggtcgataccgaaggtcagaccatcgactttttgctgacggctaaacgggataccgcagcggccctgcgcttcttccgcaaagccattcgccagcatggcgaacctgaagtggtgaccatcgataaaagtggtgccaatacagcggcactggccacagtcaatgccaacaaatcagaagaagaaatcatcaccatcaggcaaaacaagtatcttaataacctgattgagcaggatcaccgaaatatcaaacgacgaatacgtctgatgctgggatttaagtcgtttggtcgggcacagacgttgctggctggcattgagctgctccacatgatacgtaaaggacagtatcaacacccacaaagtgatggattgtcacccgcagaacaattttatctgttagctgcctga

SEQ ID NO: 179880 - DNA, 225 bp, Klebsiella oxytoca
atgaacaatcaaaatactaccgctgacatagattttactcacgataaactggtcgacatggccttcatcacatcctataccgggctgacagacaaatggttttataagctcatcaaagacggagaatttccgaagccgattaaattgggccgcagctctcgctggactgaaagtgaggttaaaacgtggttaaaacaacgtattgaagcttccagagggcattaa

SEQ ID NO: 179881 - DNA, 633 bp, Klebsiella oxytoca
atgactgacagaaaagatgacgtatacagagttaacgagaaccatggtgagcttaataaccggtatcttgaaaggctcaaaagggtgacggaaagtgcattagaagaaaatgcccgtgtactggccttcagagtcgatttacaccttccaaaagataaacaagagcaatacagcaatgcggtcattaaacgcttcatcgcgtccctcaaggcccagattaacacctatcaaaacaggaggaggaaactagggaagcgtacttatccttgccgtctgaactacgcgtgggtgagagaattcggagagataaatggagggaagcactatcacgtgcttttactggtcaatcgtgaagtatttcataaagctttccttatctataacaaattaaccaggaagcatggttacctaataagaatgattatggatgcatggattagagcgctacgtgataaaggacctgatgataatgcagggatacatttacccggtgtgtcttatgatcttaaccggaaggatggaatacacacggctggttatcaggactttatataccacatcagctatatggcgaaagagtacaccaagcaacgcggagacggagagcgtaacttcggctgcagtgtgaagtga

SEQ ID NO: 179882 - DNA, 123 bp, Klebsiella oxytoca
atgagtgatggcagtgcccttacgttgctatacctgataaaaaaaaaggaatgtctgcattacttgtttgttttaatcaataaaaaagtaatgtccttttttatcgtttttatgaaaaagtaa

SEQ ID NO: 179883 - DNA, 825 bp, Klebsiella oxytoca
atggcttttaagaaaggggttacagtttattttactgatgaaggtaagtatgaggcgtttctgaaagatcacgaaatgtccggaaaaacaaaatctaaatttgtactggaccatcttaaccataagaatgaaaaccataaggctgtaaatgctaccagtcagctaatgggcggtttttattctttctacccattaattgattattatgacgcttcttttagcttgttatctgatatgcctctaggtttgttcggtgaatctaaattaaaaaaacaactgctgaaatctgttgatgagtatataaggaaagatttttcagagcgcctatctaagggagggggagggtattttggggggtgttaccatttaataaaaacaaaaatcacactgatgtatacacgaaacaaaattgatggtattgaatgtatctccggaacatgtttatgccggtatggggttgtaactatcaacgaacctttatggagaaagtacgatggcctttatgacttcacgaaaataacttatcagaaatacatcgatatattcaggttgccaaagaaaaataaacagcttgccctggtcctggagcccgccttaccggatgatatggtcggcggttttttcatttcagtctatccggaaggtaaaagttaccccagagatttttcgaaatgtggatttgaggaatatcctgaattgccatatgctaaagtgaaaatatctggagtaagtgagcaccaaaacataaacaggatatcttatcaggagcattctcgcattggcggtggcggcgttcgcagtacagagaagacaaaaataaaataa

SEQ ID NO: 179884 - DNA, 825 bp, Klebsiella oxytoca
atgaaactagccagtcgttttggacgggtaaatcaggtacggcgcgaccgaccgttaacccgtgaagaattgatgcattacgtccccagtgtttttagtgagaataaacacgaatcccgcagtgaccgatatacctggataccgaccatcactattcttgagaatctgcagcgggaaggttttgaacctttctttgcctgccagacccgcgttcgggaccagcgccgacgggagcacaccaaacacatgttgcgcctgcgtcgtaccgggcaacttaccgggcatcaggttcccgaaattatcctcctcaattcacatgatggctcatccagttatcagatgctgccgggattgtttcgtggtgtctgtaccaacgggctggtctgtgggcagtcattcggtgaagtgcgggtgccgcataaagggaatgtggtggagaaagttattgaaggggcttatgaggtactggggatattcgaccgggtggaagagagacgtgatgccatgcagtcggctctgttaccaccaccagcgcagcaggcgatggcgagagctgctctgtactatcgttttggtgaagaccaccagcccgtcactactgctcagatactgacgccgcgtcgttacgaagaccgcagtgatgacctctggacggtgtaccagcgggtgcaggagaacctgatgaagggaggactggcggggcgcactgcacaagggcgaagtaaccgtacccgtgctgtgaacggtattgatggcgatgtgaaacttaatcgtgcgctgtgggtgatggcagagaatatgcttgacctgctgggacaggcataa

SEQ ID NO: 179885 - DNA, 231 bp, Klebsiella oxytoca
gtgaacaccgaaacccatccgcaacttccctccggcccgtttacccgtgagcaggcctcaggcatcgcagcgcaatatgacaacgtcgccattgaagacgaccaggggacgcattttcgcctggttatccgttgtgaaggtgtgatggtctggcgggcatggaactttgaacctgaagccggagtgatgctgaatcgctacatcgcacgttatggcatccgcaggtcctga

SEQ ID NO: 179886 - DNA, 444 bp, Klebsiella oxytoca
atgaacaacgcattaacggataacaccattccgacagacactctttgtgccatacctgttaaagatgaacagcgccttcgtttctggcctcagcattttggtcgtatcccgcagtggataaccctcgaaccccgcatctttgcctggatggaccggttgtgtgcggattacaacggtggcgtctgggctttttacactctcagcaacggtggcgctttcatggctccggaagagagtgacggtccctggtcgctgttcaatatcctgaatggtaacggcgctgagatgagtgctgaagctgcgggtattgccgcctgtctgatggcttacagccaccatgcctgccgcgcggagtgcgatgccatgacggaacactattaccgtctgtgcgactatgcgctgaaccaccctgagtgcaacgccattatgcacatcatcgactga

SEQ ID NO: 179887 - DNA, 480 bp, Klebsiella oxytoca
atggaaaaacagttaccgttgtttgcatatgcactgacagcctccgcacaacagactatccgtgaggcgctggccctgctggagcgccagttacgcgagcccggcgcatcgtttacctccagcagctcagtacgtgactggttgcggctccagctgaccatggaggaaagagaggcatttgttctgctgcttctggataaccaacaccggctgattacgcacgaaacgttgttcaaaggcaccatcagccataccgaagtccatccccgggaagtggtgaaagcctccctgaaatacaatgcggcagccgtgattgttgctcactgccatccctcaggccatgccgaacccagccaggctgacagacgggtgacagagcgactgaagaacgctctggaccttgtgggtgtgcgtctcctggaccacctcgttatcggcggaatggatatcgtctcgtttgctgaacggggctggttgtaa

SEQ ID NO: 179888 - DNA, 798 bp, Klebsiella oxytoca
atgatacagaacaacatcaaacagcttcgtactcaactgtcgattacgcagcgcgagctggcgtatatggtcggcaccagccaacagcaaatccaacgcatcgaaaccggaaaggtcgcagcaaagctgggcattgcacaggcaatatgcaatgctctggataagcctttaaacatcgtattcccggaaagcgatcagttgattaatgactttcacaagaagcgccgtaaaaccgatgatgatcttgaggcgatagctataagcggtattgaaatggatagcggtctctggaccgtaaaactctggctacaggggcagcaggattatttattattgcccatttctgctgcggataagcggaggttttattattattttcaggaaacagttatcccgaatgtagagcggttttttgtgtttgactcggaccagtatcgctatgcgttaaatatgcgtgaagtagtatttcaccagttcttgtctgatggtctaccgccaatcgttgctgaagaggatgatgattacgaagatgattattttaatgtccatatcgccttggtgaacggtggcccagtgattcctctgagcgttgagcctgatgcaccgcaaaacgaagagacggatgatatcggtcagttgaatgcgttctttgaaaagctggactgcgagcctgaaaccacagatcgttatatgttaaccgatgaagacggtgaagatgcttttatccgtattggttctattgccatggtgcgagtcgtacttgacgcgctggagcctgtggaagaagatgaagagtag

SEQ ID NO: 179889 - DNA, 846 bp, Klebsiella oxytoca
atggccggaaataatgttaatgaatccgaagtgttaaccgggcacactgatgtgatttgctccaccagcattgaacgtatcgtcactggccgtaatgccgcgctgacacggattgaaagccttattcgtgaacttgatgatatctccattctgacccgcgacatcggcggtggtacagcgcaggagtggggaatgcgggaggggcatcgctatgattgctggtttacggaaaaaaccgataaagcgatgaaagcgatgacccgcaatattgatcgccgcatctggcgagagctgatgaataaatcaggtatgctgagcctgatggatgctcaggcgcgtgacgagtggcacaaaagcctggataaagacgatatccccgcgatctctgaagacaatatcctcagtactttccgtcaactgcaccagagtaaaaaggaggtatttgaacggggagttatcaacgccttcaaaaatctcagttgggattacaaaaccaataacccctgttattttggcaagaagattatcgttaacaatctggtgaagtacgacaaatggggttacagcctgagctggggctggcggcgtgaccagttggccgatctggagcgcatgttgtttctgctggatggtaaaaccattcccgataatcggcatgatgtgactatacggctgatggacttcatacgcgataatccgcgacagcaggtatttgaagatgatctcttcactgttcactttttccaaaagggcagtggtcatatcacgtttaagtgtatggatctggtagagaagatgaacgatatcatcgcgaagcactatccggggatgctggctgctaagtga

SEQ ID NO: 179890 - DNA, 588 bp, Klebsiella oxytoca
atgtccacaataaagcctgatgcagtctggtatcctccgcagtttccgaaacagggacgatggttcacacgccttgtttttatcgctgtggcgatattgctggctggttgtgacaggtctgccagagaagagagtgtcagcggcggcagcggcaccatagaagcggttaaccatacccactgggcgataaatcatttcagcgtagacgggcagtcagggctggatattatcggcccctggcaggggggcggcggtggctgctgttacggcgtgccaacgaaatggaaaccgggaatgacggtgaaagttgaatggcaaaccggagaagcttccacagatgattttccaggatatgaacattgggataaatatctggaatgggaaaaaaaaataaaagaaagtcatcgggagcatagccgaatagtccctgttcctgattataccaggcaaaaaacctgcggaataaaggttcactttttaccctgcgatcaaataaaagtcaccaccagctgctacgactacggcaacccaaattatccgattaaagatccaatcaaaatggaggaacccaaagtatgtccacaatga

SEQ ID NO: 179891 - DNA, 654 bp, Klebsiella oxytoca
gtggccggtgaacccgcgcacattgccgccatcgcccccggtctggcggaaaagcagtggctcgaaggccaccgcacggtgctgatttacggcggcactctgtcatcggcgccggatactgaacgcctggccgccctgcgcaagctgcgccgcagccgtccgctggacggcatcgtgctggcgcttgatgaggcgcaggcgaccagcgctagcctggataaccatcttcgcaccctcgggcaggtcggagaggccctgcgctggcagccgccggtgtacctgtggcaggtgactgacagcgcctggccgcaggatacccgcatcagccagacggtgggggcgctgttcccgcccggcgccacgccggagggggtggcgcaacaactccgcgccattctgccgtccctgggggaaaggggaatgcagcagctgtgcgctgacccggcccatgattatctgctgcgcttggggcgcacgcttgaggggagcggcattgcccgctggcgtacgctgctgacgccctggctgacggagcgcctgcagcgcgttccgctgcgcggcctgatgttcagcccgccgctggcgccggacacgaccgccggggagacgccacatcctcaccgctggtccgctccggcgtctggcagggagtga

SEQ ID NO: 179892 - DNA, 987 bp, Klebsiella oxytoca
atggaaaacgacattcactttatcggcattgatgtggccaaagctaaactcgatgtcgatatgttgcggcctgatggccgtcaccgcagcaagaaatttgccaacaccccaacaggacatgacgagctcgtcagctggttgcggggacatcaggtcatccatgcccatgtctgcatggaagcgaccgggacgtatatggaagatgtcgccactcatctctctgatgcggggtatccggtctctgttatcaatccgatgctcagcaaagcgttcgtccagagtcagggaatacgcagcaaaacggatacggtggatgcccgccagctggcgtatttttgccgggagaaacgcccgccgatatgggaagctccccatccggttgaacgcgccctgcgggcgctggttctgcggtatcaggcgctgacggagatgcatgttcaggagcagaaccggcgggaaagcgcgcgtgaggtacagttgccaagcatagacatgcatctgctgtggctggagacggaactgaaacgtcttgaaaagcagataaaagacctgacggatgatgacccggatctgaaacaccggcgcaaactgctggacagtatcccgggcatcggccccaaaaccgcggcggtgctgctggcttatgtgggtctgaaagacaggttcagggaggggaggcagttcgccgcgtatgcgggtctgacgccgcggcaacatgagtcaggcagcagcatcaggcgggtaagcaggatgagtaaaatgggccatgtgtcgctgcgtcgtgcattgtatatgccggcgatggtgacgctgtataaaacagaatggggtcgggtgttcagggaacggctggaaaagaacggaaaaaatgcaaagctgataatcggtgcgatgatgaggaaactggcccaggtggcatacggcgtcctgaaatcaggacgcccgttcgatgccacactgcatacgaaaaatgcttgcatggcataa

SEQ ID NO: 179893 - DNA, 360 bp, Klebsiella oxytoca
ttgtcgaagaaaaccacactaacaacgcatgatatcagtgagccctggtgggggctcagacgcagtgtctccccgtgttttggggcccgtctggtccaggagggaaatcgcctgcattacctggctgaccgcgcgaactttgatggtaagttctgtgatgcggatttgcgccatcttgaccagtctttcccggtattgttgaaacagctggagttaatgctcaccagcggtgaactgaatccccgtcatcagcactgcgtcacgctgtatgcaaaaggtctgacctgcgaggccgatacgctcggttcgcatggctacgtttatatcgcgatttatcccactcccgtcaccacagaataa

SEQ ID NO: 179894 - DNA, 294 bp, Klebsiella oxytoca
atgacggtgaaagttgagtgggaaaccggtgtgggagggtctaaaggttttcctggatttgctaatacagataagtacttagaatgggaaaaaaaaatcaaagctcaaaaccggaaacatagccagacagtatctgttcccgattataccgggcaaaaaacctgcggaataaaggtccactttttaccctgcgatcaaataaaagtcaccaccagctgctacgactacggcaacccaaattatccgattaaagatccgatcaaaatggaggaacccaaagtatgtccacaatga

SEQ ID NO: 179895 - DNA, 495 bp, Klebsiella oxytoca
atgttgctggctggttgtgacaggtctgccagagaagagaatgttagcggcggcagcggtaccatagaagcggttaaccatacccactgggcgataaaccatttcagcgtagacgggcagtcagggctggatattatcggcccctggcagggcggcggcggtggctgctgttacggtgtgccaacgaaatggaaaccgggaatgacggtgaaaattgagtggcaaaccggcgcgggggacatggaaggatttccaggctttggagatgataccaaattgtttgcatgggacaaaaaaatgaaggctcagaaccgggaacacaaccagatcgtacctgttcctgactataccgggcaaaaaacctgcggaataaaggttcactttttaccctgcgatcaaataaaagtcaccaccagctgctacgactacggcaacccaaattatccgattaaagatccgatcaaaatggaggaacccaaagtatgtccacaatga

SEQ ID NO: 179896 - DNA, 147 bp, Klebsiella oxytoca
atgcacgatgcgtggcgtgggctcggcgtgcagatcctgcaggcgccggtgacgctggagttcggtcacaccttcgtcggggcagatcctgatggccaccgcctgcgtgtgtacagccgcgccgagggcatggtcgcgcggaattaa

SEQ ID NO: 179897 - DNA, 414 bp, Klebsiella oxytoca
atggctgatcctgtttctttagccgctatctctggcacgcttgaacttgttaataaatctgttgatttggttcgtaatctgcgtaaaaaaggagatgaagagctaacatctgctgagatgcgtttaacacttctcgatctgcttgatgacctactagaggtaaaaagcgaatttttgactttaaaagctgtattgttgagcaaagaagaacagattcaagatcttaaagctcagttagaaggaaagaactcattagaacatgatggtcagctttattggaaaaatgaagataaaactccattctgtccaatttgttatgaaaaggattcctcttctattcatttaacctatatcgatgatcgtacttggtactgtcttgtctgcaaaaatactcaaaatttagagaggatgtaa

SEQ ID NO: 179898 - DNA, 345 bp, Klebsiella oxytoca
atgagcaactatctattcagcaattatcaaggcatttattttgaaggggaatttgaggatgaaaatgcagctttgaaagcatttagggaccatcggtcagtacctaagtgggatccagtacagaattgccaaacatatatgtttcctgagtatgctggggtgtatgcaccataccctatagatgagaatgatgatatcgaagtgatttttaatgattcgagttatatcgtgtcatttgtatgtgatgatcaatatactaacttaaatagtaaagatgttattgaattatatgaacagggaaaaattcatcctgctcaaaaaataaaagtaattaatcataagtaa

SEQ ID NO: 179899 - DNA, 552 bp, Klebsiella oxytoca
atgacaacgactattggatacgttagggtatctacctctgaccagacagtagagaaccagaaacagcagattaaagaagctggttatcacattagtaaatggtatgtagatgaggctgtaagcggttctgtgagagccgtagagcgttctgggtttagtgaactactcaactacgtccgagagggcgatacgctggttgtagttggtatagaccgcctgggacgtaacacgattgatgttctctcaacagtagagactttacaggccaaaggtgtgaaggttatcagtctccgggaaggtttcgacctgtcaacgccagttggtaaagcgatgctcactatgatggcagggcttgccagcctggagaaagacctcatcgcagagcgtagaaccgctggcattaaacgtgctcagtcagaaggggttcactgtggtagaccaaataaagcaacctcagaacaggttcagcagcttctttcacagggaatgtcaccaaagcaggtgctggacgagttacagattagtaaagccactttctatcgtctgaaataa

SEQ ID NO: 179900 - DNA, 207 bp, Klebsiella oxytoca
atgaaaaatctgattttgttgggtctacttgttctcagtggtcaggctatggcaactaaaatcacaatgacggatccacaggaagaacagacggagaacggtaaaacgctctgcatctatgagaacagtatctacacattcacttacatcactaaaggcgcttgtccctatgccaaaaccttcaatgcagaggattcagaagagtga

SEQ ID NO: 179901 - DNA, 228 bp, Klebsiella oxytoca
atgaaggagtggcaggggcagccaaccaccaagaagcccgcccccgccgtattcaacattaccaacggagagaagggaatgccgaacagcagcattatggcgttaccgctcgcgctatgcaacgtagagcaaggtcaagcggttaaagtgccagcaatggacgggagtaatttgcatcttgccattttcaaaaccttacatttgtgtgattttgaaccatttttttaa

SEQ ID NO: 179902 - DNA, 1203 bp, Klebsiella oxytoca
atgacttacaagcgtgacagatatctgattctcgaccattgcggggtttacatggtgcgaatcgttataccgtcttacatgaagccttacttcaacggtaagcgctactacatgaaatccacagccaccaaagatatcaggcaagcaaggcttttcagggatgctgtagcggtagagttcatcaagctaagggaacagcttaagccaaaacaaaacggctcaaaggttgagcagataatcaatgaactacgtggtatcagcaactttgcaaaggaatcaccagtgaattacggggctaatatcgagcgctgtcctacactgatacaaatacgtgacctttatttgctgcaatatagcgataaacgcaaactaacaacgctttcaaagataactaaagcagttgagttaattctttctcacataaagcaacgtgattcacagcttcaggatattaacagaacagtagtgaccggatggcttgaccaactgaagaaagagaaagcaactcaaacgctacaaaactatataagcgcactggctcaactattcgattttgcaaagaatcgctatcacgatgcacctaaagataatcctttcagagggcacaggttagaggccaaaagttcacatgatagttatgaacctttccttatttctgagttaagcaaagtctttaggttactcaatgaagaaatgaaacaggtaaccttaatcggcctttattcagggatgagattgaatgaaatttgtagcctcaccactgatgatattgttacagaggaaaacgtaagatgtttacgcatctcaaaaggcaaaacaaagaatgcagctcggttagttcccgctcatccttcaattaacgttcttattgataagttgattcaaaaccatacggataagtttcttttcagacatgcagcgttaacagacagggctgatggtaagcgctctacatggcatacacagcaattcaccagagcaaagagaaaggctttaggcgagaaggaaacagagaggaaggtctttcactcgttgcgtgggatgttcatcactgagcttgaccgcctcaaagtgcctgaagaccggatagcgcttcttgtgggtcacgagagggggagtacagagtctttcaagacttacagtcaaggggcttcactaaaagagcttgttcagtacgtgaaaaaggtcaattttgacctgtaa

SEQ ID NO: 179903 - DNA, 1035 bp, Klebsiella oxytoca
atggatgatggtttgaaggagtcggtaactctggctctcaaagagaggctatccaacccgttatggggttatatattactatcatggacagggttcaactggcagaacatcgcaaagttgtttatgagcaagaaaacagtagaggagcgaataactgatattgtatctcaagattggttttatgttcattttcttgttgcgcctctgatgctgggtgttttgttggcgattatttcgccttacttgaaacaatggctttccgcagctcacgcatatgcagatgaaaaacaaagaaaagaccaaataaaaagagccatagacaaatatgatgatgagattgcaatagcagagaagaaagttgaagccaataaagcccaagaacttgctgaggaaaaggagcatacaaaggtcattcaggagcaagaaaaacaaaaaagagaagttctcgacacaaaggcaatagaagaaaacctcaagcaattggaaaagagaaaatacgaaattgaatccgcaataaaaaaactagaagagcatggggaaaacagaagatatgagattgaatcctcaataaaaaaactagaggagcaaggagagaaagtccagaaagagactgatttctggagaaacagagtgttcaaagttatcaaattagttaatggcttcaataatgtttcagacagccgctcactgaacagtatcaaagacgagctttccagcctattcagtgatgaagagttagagattgctggctatgtcgtagagtatcaggaagagcgaaataaaatcctcatggaaaccatatcaaatgccttatcccttattaaggacatccgtgagtcgtataaccaagaacttgattatggcgttaccacgaatatcagcagacacaaagaaatggatttgcttatcaatgagctctcatcgacactgaaaattatcaacaaaaatgtttatatgaataactcaaagaaaaacaagaatataattaacaatatcaaaaacagggctgtaatttcagggacaacagccggatga

SEQ ID NO: 179904 - DNA, 624 bp, Klebsiella oxytoca; identical to SEQ ID NO: 162759

SEQ ID NO: 179905 - DNA, 291 bp, Klebsiella oxytoca
atggatgacgaaaaattacacacctaccttaaagctattggtatggggtgctttgtgacgtattacagcaagtttgccaacaccaccatttcacgtgctgacctcattgaactgctgcatactcaggaaggatacacagaaaaaagctgtgggagccgcaccagtaaagcgagagcaatcatttccgcaggggcaagtgaagaagcactaaggctaattattgcgtctaatcgtgttaacgatgatttaagggatgaggccagaaaattactgatgaaaatttttccgtaa

SEQ ID NO: 179906 - DNA, 522 bp, Klebsiella oxytoca
atgaatagtcctacacagaaacgaattgaaatcgaatcacatttcattcccaaaattaaagctgcactggaaaatatcgaagatgcaaaggatatttacaacgcagacagcctgaataaagatactcttattgctatcaagactaagcaactaatgtctcagccagtcgaagattatggattcagaatccgacaggttacacacccagcgatggtacagaccattattcagaacatgatgaatgagaattatattgtgtatgaaatgggcgctggatttatcaagtttgtaccattacagcagtcaccaaaacataacccgcttgctgagattgaaaaggcatgtaagaaagccgctgagaaatttgttgatgcaggaatcactgagaaagcgaataaggtaaataaggctacccatgctcacaacgtattggtgaaacaggctgaagaagcgttatcgggaattaaaccgcttgaatcgtatctatctgtgattgtcgctgatgaggtgggtaatgactaa

SEQ ID NO: 179907 - DNA, 336 bp, Klebsiella oxytoca
atgactaacaaagtcactgaggccgcttacaaggctcagattgccactttacaggctcagttaatgcaacgtcatacagtgactgctatcgacgctgtacagcctttctgtgaagctataggtatcaatcccgctgattacgttaaggccaccagcgctatgagtaaccagcataaagcgttctgtgacgggattctgaaagcagcgtcttcaaaggtcacccgcttgcagcgtgatgcaactgtacgaatcctcgaagcacagacaaaacgaaacaaagccataacagcagcctcagaagcggctgaagttgctcagtcgatgggagggctttaa

SEQ ID NO: 179908 - DNA, 177 bp, Klebsiella oxytoca
atgcatcatctcttcaatgcttatggtcagaaagtaagttgtaatcttctgatgacgctgcatccatcgcttatcacaaagctggaaaagctttctgaacagattggtcaaggcgtggtatcagaagaccagcgtttaacactggcaatcggtgagatgctcaggaggtttgaatga

SEQ ID NO: 179909 - DNA, 204 bp, Klebsiella oxytoca
atgacgctttatccctgtaatcctctgaagtcacaaggggatgcaattccgttaactcaaaatctcgccctgaatattcctgtcccaatgctacagaagctggacagagtaggttatgaacttgcgggacattacaaattgggcggattatcagagcagcgcgtgagattgctggcattggctcacctgattgaatcggcatga

SEQ ID NO: 179910 - DNA, 312 bp, Klebsiella oxytoca
atgccggggattaaagatatggcaatattttatcagattaaaacggtggatatgctgggcaaaggaaaagtggatgaagcctatgacgcgattaatgccgggattgatctggaaatgtcgtggatgaattacgtgctgctgggcaaagtctacgaaatgaaagggcagaaccgggaagctgccgatgcctacctgacggcgtttaatttacgcccgggtgagaatacattttactggattgaaaacgccgtattccagacctccgtgacccgcgtggttccgtatctcgataacttcctcgcttcagaataa

SEQ ID NO: 179911 - DNA, 684 bp, Klebsiella oxytoca
atgatgaaaaaaatccttgtcatcggattatgcggactgtggatgccgcccgcgtctgcggtgtactttgactctattatctatgatatggatgccagtaaagattttatctcccggccaatagtcaatgatacaaaaaacaacaatttgtataccatatcggcttataaaatctcccgaccgggcagcggagatgaaagacccgttccaggccaggataaagatctggtctggtcgccgctgaagttcacggtacaggcgaatggccaggaatattttaaactctattatcgcgggcctaaagatgccgttgagagatattatcgggtaatttttaaggaaaccccggttacgattttcccctggcgtcaggaccagaaacaaatggatgtcgttccctcagtgtctatgagcaccattctcatcgtgcgcccgcgtaaaacgcagttcaagtatgagataaacgaagaaacaggcactattaaaaataccggtaacaccttttttagagttgttatccagaaaggatgcaatggtgatgatgaaagttcgacgcaattttacatgctgccaggggaaagctggaaagatcctaaggctcaatacggtaataaaaaatttattgtcgcactgggtaaataccatcgcttaggaagcagctgctttaccgatgcctctgactaa

SEQ ID NO: 179912 - DNA, 507 bp, Klebsiella oxytoca
atgactacaaaaagacaggctcagagagccgctgagagcgatttacaggcattcctgaacgaagccgccgaccgattcaaacccgacgccgccgtattagctgcgcgtatagataccgccgtccaacgttacgaagtaacgagcaccacacagcgtttcaacgctccagcgccgctggcaatgcagcaactccaagagaggatattggaaggctggcggtacgatatcggcatccctcaatccgtttacgttgccggtactggaaacatgagcatcaccctccgtaaaccggcgtcgctggtggaacaggagatagctgacctgaaaagacaggtggaggatgcatatcataacgagctggccgccgcgatcgagagagaagtggacaagctggtacaggacgccgccaacgaagcccagcaacgtgcagaggaggcagcagcagcagaacacgacgctatgcgccagcgtctccgcgatatgctgctgaatggggcgactgtatga

SEQ ID NO: 179913 - DNA, 147 bp, Klebsiella oxytoca
atgaccaagaccaagagcgggccaccagcgcccgcctatatcgacccggacgcgctggagcgggctatcgctgtcgctcgccaaattaaagaggccaacccggaacgctacaaatcgctgcctgtccagccggaggttaaacgatga

SEQ ID NO: 179914 - DNA, 198 bp, Klebsiella oxytoca
atgaaaatttacgatatcacagtgacaggaacaaccgccgactggctgaccgccacgcgcgggaatatacctctgccggtgttcgtccgtaagctgttggctgagatcgccagcaacccggaaaaatataacgacctgacccaaacccttaacgactcagtggagtgcaaatgccaaacccgaacaacgaaaaaataa

SEQ ID NO: 179915 - DNA, 1296 bp, Klebsiella oxytoca
atgccaaacccgaacaacgaaaaaataaagaaacagattctcagcgcctttatcgactacctgaaagatcacggatgggtgatgaaagcgacaaataacctctcagtcctgttcaacatccgtgatggtgtcaccctcaacgctgacagcatcagcgggctgttttaccagtgggcaaaccggaactcacatactgagattgagtacgaggaagaatggtggaacaccatacgccgccggttaccgtttgtcgttagcgaagaattcagaccagcggtagacccggaattatttgtgccgttgagttccggcgtcctggcaatcaatacgtacaaacgatacgagaaggacgaacccgccaacggttttaaccctaacccggccccgtggattgaatttatcgagcgcctgtttccgcaagacactgaccggaaaatagtgtgcgactggatggcacatatgctccagcgccccgatcagcgtccgtcatggcacctgttattcacgggtgatactggcaccgggaaaggcgtgctttttgagcatattctcacgccgttactatcagggcaaaccgcctcgctggactcattcgccaaactgacggagaaacacagcacaacgctgacctccaatatgttgatccacctggatgatgtctcaaccaacagtgacagccagatgacccggttaaaatccatcctcagcgaagaatggcagcggatacgcccgctttatgagccagagcgtagcgcacgggtttacgcaaggatcatactgtcgagcaaccagccccggcccctgcgcctggatgagaacgaacgccgctggtatgccccggagtttatgacgcacaaagctgaccggcaggagacacaattattcatccagaaccggctattgccgtgggtatccagcggtgggttggacgtgatttatgagtggcttatggcgcgtgacctgagccagttcaaccataaatacgtgccgcagtccgattgcctgcgccggatgatatcggattcagtttcaatcctggaaatgcaagtccgtgaatgggtggcagaaaacccggcattccgactggagacgctacaggcccagttctccgatctccgaaactgccagatagcttccagctacctgacggcgatgaagtaccggaagtgccagccgtaccagagaaacccagatccgaccggcaaaacgtcaaaacaatggtggtggatacctgatggctggacacccgccagcttgcgggagcaccttgcaaccgtcgaggagttcacattctga

SEQ ID NO: 179916 - DNA, 633 bp, Klebsiella oxytoca
atgacatctcgtgtttatgcctacctcagagcctcgactaaagagcaggacgcatcacgcggcagagagcagcttgatgagttcgctcattctaagggtatgaccatagccacctatttcacagagaacgagtcgggagcatctttgcagcgtcctgagttgttccggctgctggctatcgcacagaagggtgacgtattgctggtggagcaggtagaccgactgagccgcttaaaggccgacgactggcagatactgcggcagattatcagcgacaaggggatcagggttgtcgcgttagacttaccgaccagccaccagctgatccggtccggtgatgagtttactgaccgtatgctggaagcattgaacgggatgatgctggatatgctcgccgccattgcgcgtaaggactacaccgaccgtaagcgtcgtcaggagcagggaatcattaaggcgaaggcggcgggcaaatacaaaggtcgcccggaagacgcccagcgcaacgagaagatcgccaggttgctgaaagcggatatgtcatacaccgatatcatgggaacggtgaactgttcccgtgcgacggttgccaaggtgagcaagagtctgaaagtgaccggaatcaccgactaa

SEQ ID NO: 179917 - DNA, 507 bp, Klebsiella oxytoca
atgaggttattttccagtgtatctgatttttttgagaatgccgcaagccaatgggatatctttaaagaagatgtcgcagaggctacaaccaattttcaaaaagccaataaagagtttgtttctgaaatgagcgatgatatcgctgagttagcagggaagacggtagattttgttaaagaaaaccccggtaaaacagcccttattgttggtgctacagttgtgaccggaggtgctgctggtgcttttgctacagctgcggggccagttatagcgtctgctttagggtctacgggaattttaggcgcaacagcgtcaggtacagccatcagttctttatccggtgctgcattaacaaatgcttctttggctgcaattggtggtggaagtctcgcttctggtggcgctggtgttgctgggggtcttgcggttatatctacaactggaacagttgcgggtagtgctgtggcggcaacaggtgcaacttatgtagcaacgaaagagtcctga

SEQ ID NO: 179918 - DNA, 1800 bp, Klebsiella oxytoca
atgaaaaagaaactttattcctatattcgctggtcatctgcacaacagaccgcagggacatcgcttgagcgccagactgctgcggcgcgtgagtatgcaaaagcccatgatctggagttcgtcgaaatcctcgatgctggcgtcagtgcattcaggggtaaaaatgccacagacggcgctttagctgagtttattgcagccgttgagaacggtgcgatcccttctgactcatggttgtacgtagaaaacctcgatcgtttgagccgcgcgaccgtaagaaacgcgttaaaattattactgcatatcaccgatcttggagtgacagttgttacagggatggacgggaaaatctattccgctgaaactatggataaggattttaccgaccttatgatctcgttgttgttattcagtcgcgccaacgaagagtctaaaacgaaatccgaccgtgtaaaagaagcctctatgaaggctctggcgagggttcaggcgggattgcccgccactataaaaggtggtggtgctgatccgttctggatacaacgcggagatcgggagacatcaccaacacaacaccccacccactggctggcgataaagaagatcgttgagctatccctacagggggtcggctgcaaccgcatccgccaggtactgaatgatgatccaacgttatacccaccaccacgccaaaaagacacaccacgccgccgggcattacttgatgctggtttagctccaacaggttggaatatccaccggattgaggatgccagacgacaaccatcactctacggtttgaaaactataaccctgtccgggcatacatatagtctggagggctattaccctgcggtttgtagcgaggaggagttccacctgatacaaaatatctctgccagcaaccggataaaatcaggagatatacgcaataccataaccctgttatccgggttgaacctttgtaaatgtggttcctgtggcggatgggtgacaacgttcagaaaaaacggaaaacttacctatcgctgtgacgccggacatcgaaaaatacatcactgtcctacaaggtggtctttgaatgcgaggatcattgagtccgccaccgtcagggcgctgatagcgggcgtggctcacaacattatagaggacagtcaggatctggaatctgtcgctggtgagattgataacaggcgggcggaagtggcggatattgatcgcaaacgtgaacgtctggctgcacgtatagccgaagaggatgatgatctgctcatgcagcaattacggcagtacaacgccagaaaacgagatctgttaacagagataggcgcgttaacgcaacgtgaagcgcttcgcagagaaggacagaatgttgctgagagattagcagaggcccagcgattgcttactgctgatatggtcaacgacatatttacatctgatcgtttagcggttcgtgagttgatacgtaaatcaatgcgtcaggtcactatctggaaacgacaggacaaaagtcttaaggtcgagtgcgagtttatcagcgggtggcgctatacctttgagggagtgatgaaagagggtaaaaaatcctttattgaatacaggacatctccagacggcattaatatgatggagatttacgacaagctgaacgcaatcacagctaaggcgtttaaacatgtgctggatgtggatgataatgtgatgccccctactctgagccatgttcaggcatatcacgatatggcggtgagattggggcattccccgcttactggcagtcaatttttctggcggtag

SEQ ID NO: 179919 - DNA, 2877 bp, Klebsiella oxytoca; identical to SEQ ID NO: 178817

SEQ ID NO: 179920 - DNA, 3093 bp, Klebsiella oxytoca
atgctcacattttttatccgtcgcccgcgctttgcgatggtgattgccctgctgatgacctttgtcggcgcggtctcgctgaagctgatcccggtcgagcagtatccgcagattacgccgccggtcatcaacgttagcgccagctggccgggcgccagcgcggcggacgtggcggaagccattgccgcgccgctggagacccagctcaacggcgtcgatcatatgctctatatggagtccaccagttccgatgaggggacctacagcctgagcctgacttttgccgccgggaccgatgccgatttagccgcgatcgacgtgcagaaccgcgtgtcgcaggcggtggcgcagctgcctgccgacgtgcagcagaacggcgtgcaggtgcgtaagcgggcgacgaacctgctgatgggcgtgagtctctattcgccgctcggcacgctatcgccgctgtttgtcagcaactacgccagcactcaggtgcgcgaggcgctggcgcgtctacccggcgtcggggaagtgcagatgttcggcgcgcgcgactacagcatgcgcatctggctgcgccccgaccgcatgaacgcgctgaatatcacaaccgacgatattgcccaggcgctgcgcgagcagaacgtacagggcgcggcggggcaggtggggacgccgccggtatttaacggccagcagcagacgctgaccatcaacggtatcgggcgactcagcgacgccgccggcttcgggcaaattgtggttcgcagcggcgaacgcggccagctggtacgcctgtctgacgtggcgaccattgagctgggcgcgcgcagctacagctccggcgcgcagctcaacggcaaagattccgcctatctcggtatctatccgacacccaccgccaacgccctgcaggtcgccaccgcggtgcgcgctgagctgacccggctgcacgcgcgtttcccggcggatctcacctgggaagtgaagtttgataccacccgctttgtggcggcgacgatcaaagagatcggcgtgtctctggcgctgacccttatggcggtggtggtggtggtttcgctgttcctccagagctggcgggcgacgctgattgtcgcgctggcgatcccggtgtcgcttatcggcacctttgccgtgctttatgcgctgggctacagcgccaataccctgagcctgttcgcgattattctcgccctgacgatggtggtggatgacgccatcgtggtggtggagagcgtggaaacgaaaatggcggaggggctggatcgcggcgccgcgaccgccgaggcgctgcggcaaatcgccgggccggtgatcgccacaactctggtgctgctggcggtgtttgtgccggtagcgatgctgccggggatcgtcggcgagctgtatcgccagtttgcggtgaccttatcgacggcggtgacgctgtcgagcgtggtggcgctgaccctgacgcccgcgctgtgcgcgctgctgctgcgtccgcggccgcagcagccagccgccatctggcgcggttttaaccgcggtctggatacggtgcgcgatggttacgggcgtctggtcgggaggatgaatcgtcgcccctggctggcgctggcggcgacgatggcggcggccggggtggtggtgtttagctttatcaccatgccaaagggttttctgccgcaggaagatcagggctacttctttgccagcgtgcagctgcctgaagccgcctcgctggagcgtaccgaagcggtgatggcccaggcgcgcgagctgctgttgttgaatccggcggttgaggatgtgattcaggtctccggttttaatattctcaacggtaccagcgcttcaaacggcggatttatctcggtgatgctgaaggactggcaccagcggccgccgctggaggcggtgatggaaaaggtgcagggccagctgatggggctaccggaggcgacgatcatgacttttgcgccgccgacgctgccggggctgggcaacgcttccgggtttaatttacgcattctggcccaggccggacaatcgccggcggagctggagcaggtgacgcatcaggtgctgcggacggctaatcagtacccgcagctgagccgggtatttaccacctggagcagcaacgtgccgcagctgacgctcaccgtcgatcgcgaccaggcggcccggctgaacgtaccggtggcgaggattttcagcagcctgcaaaccgcgtttggcggcacccgcgccggcgatttcagcatcaacaatcgtgtctaccacgtggtgatgcaaaacgagatgcagtggcgcgagcgggcagagcagataagcgagctgtacgcgcgcagcgacagcggcgagcgggttcgcctgagtaatctggtgacgattacgccgacggtaggcgcgccgtttattcagcagtataaccagttcccgtcggtatcggtgagcgggtcggcggccgaaggcgtcagcagccggacggcaatggcggtgatggagcagattttacaagcgaacctgccgcacggttatgattacgcctggagcggcatctcctggcaggagcagcagaccggtaaccaggcggtgtggattgtgctggcggcggtagcgatggcgtggctgttcctcgtcgcccagtatgagagctggacgctgccggcgagcgtgatactgtcggtgctgttcgctatcggtgggtccctgctgtggctctggtgggccggttacgccaacgatgtatacgtgcagataggcctggtgctgctgatcgcgctggcggcgaaaaacgcgattttgatcgtcgagtttgcccgggcgaagcgcgaagaggggatgtcgatcgtcgacgccgcccgcgaaggggcgacccgccgcttccgcgcggtaatgatgacggcggtctcttttatcatcgggattgtgccgatgatgctcgccaccggcgccggggcgcagagccggcggattatcggtaccacggtgttcagcggcatgctggtggcgacggtaatcggcattttatttattccttcgctatacgtgctgttccagcggctgcgcgagtgggcccaccgccggatgtag

SEQ ID NO: 179921 - DNA, 258 bp, Klebsiella oxytoca
atggttaattcagcgataaaagataatgatattatgtatcaaaagaagtatccgagaggttgtcagtttaaatcgcttcagctacgaactaatttaaaagcgaaacctgatatttaccgcgtggaaatgattaatcgcagtggtgataagattttgatgggaggacggcaaacaacacaggaggcgatttctctttatcaggatattgcgacacttagcccgtcagaagtggagacggcattcagtagtatggtctga

SEQ ID NO: 179922 - DNA, 882 bp, Klebsiella oxytoca
atgatgctcagtgatttactgataatggttgaccgccgtgctcaggcggtcagcttgcgtgagaaaacaattattaacgaacgtcacgccgtccgtatgcttgagcctgttttatctcttggggtacgcgctgcaagcgtacctgatacgtgggtaagatatgctgaccgttgcattgataatgggttggcggcgtctacggttcgccagcgcatagattgcgttgcggcggttgtagcctgggtgattcatgctgacattaagtttaagccagccgcgccgggttctctgggtcggatgcttgatgccatgcgtacagcggcaagagctataggaaagcggataaagcgtcacagggcattgagcaggccagcccgcgtaagcgttgacgagtattctacggtagtgcgcgatattgagtctttgcgggatccatacagggccgcagcccgtatgatgctgtgttttgggatgagggcaacagaaacgctttcactatctccatcatcaattatttcaggtgggaggttgtttgttcctgaccgcgagactaaaactcattccgatttacttttacctttgccagttaaatacattcctttaattgaggggtggctaggcgtgataggtgagtcggaaataaagtacaacacgcttgtaacgacgatttcccgtgccgggattaaatggcgctgccatgatttaagaaaattatttagaacttccgctgccgtacgtggcgaggattatcttgcaacagaattgatattaaatcacacggtgaaggacgttccgagtgtttacttgcaatctccaccattcgcggcaatgaggagagttttaaacaattcgattgaagagtatttacaggttaaagggtaa

SEQ ID NO: 179923 - DNA, 360 bp, Klebsiella oxytoca
atggacaaaattaagaccaaaagaagcgagcgccgtttgtcgcgtgacctgatagaagaagggttaaggctggtggcagaacgtagtgagcgggagggagtgaacaaagataccgctaaacgtcatgcttcagccatcaggggcgtgattccggcgctgggtgtagtaaagagtaaggttgtgaagccgggagtttgggtttcgctctatacccgcagcgatgctacatcgaccgtcatcagcaatatgaagtttaccgccgtcatatttgagtgggccggacagcaggaatatgaagattcggcattttatgctgctgttgcaaatgccatccggacagcgctagccgtcagggggtaa

SEQ ID NO: 179924 - DNA, 309 bp, Klebsiella oxytoca
atgactgagctaaccaaaccagccagcaaaggcaggaatgacggtcagtgcgaatatctgacctcagatgatgctcgtttccttgtgatgcgcggtgactatagcgaagccgatattatccaagcatcagttaatcaatgcatgattgatgccgatagcgcggagaatttcacatcgagcgctcgctattaccaatgctggtacaaagttagcccaatcggcgggcaggaaggttattcaggctggcattatccgcgtaacacgccttgtcgtggggcgtactttgcgtcagttttgcaatgggattag

SEQ ID NO: 179925 - DNA, 345 bp, Klebsiella oxytoca
atgaggaaatcactaaacgcacggtgtatccgccgctggcaggttgaatttaaagaccgctgcgactcgaaatttagcacggtatggcgcaagcgtgatctgcgcggttatatccgtgaatccgggatgattactgcctactgcatggttgagagtatggctgagcgcaacgccaaagttgatttcgacggctctgctgttgactggtcgccagagttctcggcctggtgtgacgaacgcagggagcagtatctcaaggaggcgcgcgactttctgaacgaagaagcgaccaccgaagaaatcgacgaagagattcagaacgaactggaggcttggaatgactga

SEQ ID NO: 179926 - DNA, 195 bp, Klebsiella oxytoca
atgaccatgaaatctggatgggccaggcccatcaacgccagaaagcatcacttctttttagaggatgaagccaccagtatttgcggccgctggatgtattttggcacagaccgcgagccggatacgttcgaaagccctgatgactgcgccgcctgccgccgcaaggtaaataagaatttgggagtgaaagcatga

SEQ ID NO: 179927 - DNA, 270 bp, Klebsiella oxytoca
atgtcgaatgaaacagtaaaaaaggtcatggcagaaaagcgccgtatgaccatcggacagttaacagaccagcttgttagcggtgctttacgccgtgagttaggcatggataaaaccgaatttgccacgctggtttcagttatgcgatccactatccggcgcattgaagggctagaggcaacgccacgtatggggcttattttcaatacagccgccgtgttacgcattggtattgacttcccaatcacagaggaaagggcaaaaaaatga

SEQ ID NO: 179928 - DNA, 723 bp, Klebsiella oxytoca
atgaaaaaaagaacacaaataatccagtttagagcagatgaagatacctatcatcgtgcgcaggagcgggcgaaagaaggaggtgtgcagttcactgacatgatgagagcggccctgaaatccgttgccgatgcggatgtttccggtttggctgacattatcaacagtgctacatctggcagtgaagatatcaaccaagcatggctctatcaaaagtgtcatgaactgtttgagtatcgtgaaggcacgttgtttcgtaaatcaagaaagggaatgggtgagcaaggaactcctgtatatatcagggttcgggaaggtgaagaacacgtattaattcagggcaatcattacccgcttaaagatatcatttggcttatggcaaacgggagtattggcggagaggtgacatataaaaacccttatagggtaaacctcaagcactctatcgagaatctaatggttgaagcggtggcagaaaaagaaatatgccttattaaatatttaaagggatccgaaaagatcaatgttttaaaagttaagcagcgggcattcctgtttgatactaataacgacgaaattgctaaagatgcaatagagaaattaattaacaacgaaaagacaatcccgttacttttgcgcggtgatgatggttgggttgcatcacgaaccgccattcacgctttcaaattgggtgataaccagtacgtagtaagcattacataa

SEQ ID NO: 179929 - DNA, 522 bp, Klebsiella oxytoca
atgcgcgattttgctctggtatttcgtcatgcgtgggaactggcaagaaagggcgctgataccttcggtggttcggcgcgtcagtatttccgcgaatctctcatgctggcctatagcaacctgaagcgtaatgtaaccgctaaagacctggtcaaaataatgcagggtcgcaggctgtctatgagtcaaattcgggaggaagtaaacgccaaatttaaaaaacaaacagcaaagaacatcgcccgcagaatttggaatatgtttcgttcgccatacgtagaaattgagaagatcaaatgtcaggcgacaggaaaatatttatatcacctgaagaacgcgcagaagaatttttttgttagcggggctattactcgcgctctcaaatcagcaagaccagaaaagaaaaagcctgtaaagcttcgcccggctatgtctagggatgaaattaacgcttgccggatggcaaacgcatttcatcaagccttatcaacaggtgtttatgttgcacctactttaatttga

SEQ ID NO: 179930 - DNA, 879 bp, Klebsiella oxytoca
atggagaagaagagagccacgctcattggattggccgctatcgtcttgtggagcaccatggtcgggctgattcgtggcgtaagcgaaggacttggtccggtgggcggcgcggcgatgatctacagcctgagcggccttttgctgatctttaccgtcggcttcccgcaaatacgccagatccctcgcccctatttactggcagggagcctgctgttcgtcagctatgaaatttgcctggcgctgtcggtcggattagccggtagccgccagcaggctattgaagtgggcatggttaattatctgtggcccagcctgacgattttattcgccattctgtttaacggccaaaaaagcagctggttggttattccgggattatttctcgctttattcggcgtcacctgggtattaggcggtgagcatggtctgaatgtagatgaaattatccgcaacgtggtttccagcccgctgagctatattctggcgttcatcggcgcgtttatctgggcggcctactgcacggtcaccgctaaatacgcgaagggcaaaaacgggattaccctttttgttctgcttaccgccctgaccctgtggctaaagttcctgttcagcgaacagccgcccatggtctttagctggccggtgatagccaaactgatcgcgctgtccgttgccctgggattaggctacgcggcgtggaacgtcgggatcctgcacggcaacgtcagcctgctggccgccgcctcctactttacgccggtgctctcctcggcgctggcggcggcactgctcagcgccgcgctgtcgtggtcattctggcagggcgccggaatggtgtgcgccggctccctgctttgctggcaggcgacccggcgctaa

SEQ ID NO: 179931 - DNA, 1491 bp, Klebsiella oxytoca
atgtctcggcaatggttgacgctgatggcgattttgttggtttatattccggtggcgattgacgccactgttctccacgtggctgcgccaacgctcagcgtagcgctggggaccagcggtaacgagctgctgtggattattgatatttattcactggtaatggccggtatggtgctgcctatgggcgcattgggcgataaaatcggctttaaacggctgctgctgctcggcagcggtatttttggcaccgcgtcgctggcggcggcgttttcgcccacggcagagacgctgattgcatcccgcgcgctgctggcggtgggggcggcaatgatcgtgcctgcgaccctggccgggatccgcagcaccttttcgcaggcgcaccagcgtaatatggcgcttggtctgtgggcagctgtcggttccggcggcgcggcgttcggtccgctggttggcggcatgctgctggagcatttttactggggatcggttttcctgatcaacgtgccgatcgtcctgctggtgatagcgattaatgccaaagtggtgccgcgtcagcccgcgcggcgcgagcagccgctgaatcttttccaggcgctaatcctgatcgccgccattttgatgctggtctttagcgccaaaacggcgctcaaagggcaaatggcgctgtggttaaccgggctggtggcactatctggcgccgcgatgctgttctggttcgtgcgcaaacagctctcggcatcgcgtcccatggtcgatatgcgcctgtttacccatcgcattattttaagcggcgtgatgatggcgatgaccgcgctgattacgctggtgggttttgaactgctgatggcccaggagctgcagtttgtgcacagcaaaacgccttttgaagccgggctgtttatgctgccggtgatggtggcgagcggtttcagcgggcccattgccggcatgctggtatcgcggctggggctgcgcgaggtcgccaccggcggaatgctgctcagcgccctgagcttcctcggcctgtcgatgaccgatttcagcacccagcagtggcaggcctggggactgatgacgctgctgggcttcagcgtcgccagcgcgctgttggcctccagctcggcgattatggccgccgcgccgaaggaaaaagcggcggcggcaggggccatcgaaaccatggcctatgagctgggcgcgggactggggattgccctgtttggcctgatcctgacccgcagctacacctcgtcaattgttctgccgggtggaatcgagggcgcggcggcggagcaggcgtcatcctccatcagcgaggcgattaagctggcgcagtcgctgcccgccataccggcgcaaagcctgcttgaagcggcgaaggcggcgtttattcattcgcacagcatcgtgctggcgacggctggcgtcctgcttctgctgctggcggccggcatctggcgtagtctggcaaaagcgcctgagctgaattaa

SEQ ID NO: 179932 - DNA, 3741 bp, Klebsiella oxytoca
atgagtaaactactggatcgctttcgctactttaagcagaaaggcgagagctttgccaacggccacggtcaggtgtacaacaccaaccgcgactgggaagacagctaccgtcagcgctggcagttcgacaaaatcgtccgctcaacgcacggcgtgaactgcacaggctcctgcagctggaaaatttacgtcaaaaacgggctggtcacctgggaaactcagcaaacggactacccccgcacccgcccggacctgcccaaccacgaaccccgcggctgcccgcgcggcgcaagctactcctggtacctctacagcgctaaccgcctgaagtatccgctggcgcgcaagcggctgattgccctatggcgcgaagcgctggctcagcacccggacccggtgcaggcgtgggacagcatcatgcaggacccggtcaaaaccctcagctacaagcaggtacgcggcaaaggcgggtttatccgttcaagctggaaggagctgaaccagctgattgccgccgccaacgtctggaccatcaaaaactacggcccggaccgcgtggcgggcttttcgccgatcccggcgatgtcgatggtctcttacgccgccggcacccggtatctgtcgctgctcggcggcacctgcctgagcttctacgactggtactgcgaccttccccccgcctcgccaatgacctggggcgagcagaccgacgttcccgagtccgccgactggtacaactccagctatattatcgcctggggctccaacgtcccgcagacccgaaccccggacgcccacttctttacggaagtgcgctacaagggcaccaaaaccatcgcgattaccccggacttttcggaggtagccaagctcagcgaccagtggctggcgccgaaacagggtaccgacagcgcgctggccatggcgatgggccacgcgatcctcaaaacgtttcaccttgataacccgagcgattatttcctcaactactgccgcacctacaccgatatgccgatgctggtgatgcttgagcgtcgcgaggagggtttctacgttcccggcaggatggtccgcgccgccgatctggttgacgatttgggcgaaagcaataacccggagtggaaaacagtcgcctataacagcgctggtgaactggtggcgcccaacggttcgattggcttccgctggggagagaaaggcaaatggaaccttgaacagcaggccgccgggcaagccattgaactcagactatcgctgctggatagccgtgacgacgtggtgacggtgggctttccctacttcggcggcaacgaaaacccgcactttcgcagcatcaagcaggatccggtgacgctgcatcagctgccggttaagcagctcccgctggccaacggtgaatccggcctggtggttagcgtctacgatctgattctcgccaactacggactcgatcgcggtttagacgatcccaacgccgcgcaggacttcagtgagatgaaagcctataccccggcgtgggccgaacagattaccggcgtcccgcgccagcacatcgagcagatcgcccgtgaatttgccgataccgcgcataaaacccacggacggtcgatgattatcctcggcgccggcgtcaaccactggtaccacatggatatgaactaccgggggatgatcaatatgctggtgttctgcggctgcgtcggccagagcggcggcggctggtcgcactatgtcggtcaggagaagctgcgtccgcaaaccggctggctgccgctggcgttcgcccttgactggaatcgtccgccgcgccagatgaacagcacctcctttttttacaatcacgccagccagtggcgctatgaaaagctgaccgcccgggagctgctgtcgccgctggccgatgccagccaattcagcggccatctgatcgactttaacgttcgcgccgagcgcatgggctggctgccctccgcgccgcagctgggcgtcaacccgctgaccatcaaggcgcaggccgccgcggccggactgactcccgccgactacaccgcccgggcgctgaagtccggcgagatccgcttcgcctgcgaacagccggataacggcaaaaatcatccacgtaatctgtttatctggcgctccaacctgctgggctcctccggcaagggccacgagtatatgctcaaatatctgctgggcaccgacagcggtattcagggcgatgagctgggcgccagcgatgacgtgaagcccgaagaggtggagtggcagaccgcggccatcgaaggcaagctcgacctgctggtgacgctcgatttccgcatgtccagtacctgcctgttctccgatatcgttctgccgaccgccacctggtatgaaaaagacgatatgaacacctcggatatgcatccctttatccacccgctctccgccgccgttgacccggcgtgggaggcgaaaagcgactgggaaatttacaaagatatcgccaaaaccttctccgaggtctgcgtcggccacctcgataaagagaccgacgttgtgctggtgccgctgcagcacgactccccggcggagctgtcgcagcccttcgacgtgctggactggcggaaaggggaatgcgagctgacgccgggtaaaaccgcgccgtcgattgccgtcgttgagcgcgattatccggcgacgtatgagcgctttacctccctcgggccgctgctcgacaaactgggcaacggcggtaaaggcatcacctggaacacccagaacgaggtcgacttcctcggcaagcttaactacgtcaagcttgatggcacggccaaaggtcgtccgcgcatcgacagcgccattgacgcctcggaagtgatcctcgccctcgccccggaaaccaacggccaggtggcggtcaaagcctggcaagcgctcggcgagtttaccggccgcgagcatacgcacctggcgctgaataaagaggatgaaaaaattcgcttccgcgatattcaggcccagccgcgcaaaattatctccagcccgacctggtccggcctcgagagcgagcatgtttcctacaacgccggctataccaacgtccacgagctgatcccctggcgcaccctttccggccgccagcagctgtatcaggatcacccctggatgcgcgcctttggcgaaagcctggtggtttatcgtccgcccattgacacccgcagcgtcagccagatgaaagcgattccgcctaacggcttcccggaaaaagcgctcaatttcctgacgccgcaccagaaatggggcatccactccacctacagcgaaaacctgctgatgctgaccctgtcgcgcggcgggccgatcgtgtggatcagcgaaaccgacgctcgcgagctgggtattgaagataacgactggatcgaggccttcaacgccaacggcgcgctcaccgcccgcgcggtggtcagccagcgcgtaccgccggggatgaccatgatgtaccacgcgcaggagcgcctgatgaatattccgggctcggaagtcaccggacggcgcggcgggatccataactcggtcacccgcgtgtgcccgaaaccgacccatatgattggcggctacgcccagctggcttacggtttcaactactacggcaccgtcggctccaaccgcgacgagttcatcatgatccgcaaaatgaaaaatattgactggctggatgacgaaggtcgcgatggggtacaggaggcgaaaaaatga

SEQ ID NO: 179933 - DNA, 684 bp, Klebsiella oxytoca
ttgcgcctgtccgggctacccgatgccgcaactcccgtagcctggacagtggtagcccgggtaaggcgtttacgccgcgacccggtgagtgtgccggggctgatgtatccgctcagcttcttcccggctcgcgctgcgcttagccgggctacgtattcaccgtcgtctgcggggccggtagcccgggtaaggcgtttacgccgcgacccggggagtgtgccgggggtgatgtatcagctcagcttcttcccggctcgcgctgcgcttagccgggctacgtattcaccgtcgtctgcggggccggtagcccgggtaaggcgtttacgccgcgacccggggagtgtgccgggggtgatgtatcagctcagcttcttcccggctcgcgctgcgcttagccgggctacgtattcaccgtcgtctgcggggccggtagcccgggtaaggcgtttacgccgcgacccggggagtgtgccgggggtgatgtatcagctcagcttcttcccggctcgcgctgcgcttagccgggctacgtattcaccgtcgtctgcggggccggtagcccgggtaaggcgtttacgccgcgacccggggagtgtgccgggggtgatgtatcagctcagcttcttcccggctcgcgctgcgcttagccgggctacgtattcaccgccgtctgcggtccggtag

SEQ ID NO: 179934 - DNA, 2259 bp, Klebsiella oxytoca
atggcgattctttctccccgcaaaacggctctggcgttggctgtcgctctgttttgcgcctggcaaagcccggcgttcgcccacggtggcgaagcccatatggtcccgatggacaaaacccttcaggattttggcgcggacgttcagtgggatgactacgcgcagatgtttaccctgattaaagacggcgcttacgtaaaggtaaaaccgggggcgaaaacggtcatcgtcaatggtaaaaccctggagctgcaggtgccggtagtgatgaaagacggcaaagcgtgggtttctgacacttttatcaacgacgtgtttcagtccggtcttgaccagaccttccaggtggaaaaacgcccgcatccgctgaactcgctgtcagcggcggaaatcagcgcagcggtcgctatcgttaaagccgcggcggatttcaaacccaatacccgattcaccgagatctccctgcgcgagccggataaacaagcggtgtgggactttgccctcaacggtacgccggtcaacgccccgcgcgctgccgacgtgatcatgctcgacggcaaacacgttattgaggcggtggtggatttacagaataaaaaagtgctttcatggacgccgattaaagacgcccacggcatggtgctgctggatgatttcgccagcgtgcagaacatcatcaacgccagcagcgaatttgccgaagtgttaaaaaagcacggcatcgacgacccgagcaaggtgattaccaccccgctgaccgtcggctacttcgacggcaaagatggcctcaagcaggacgcgcggctgctgaaagtggtcagctatcttgacgttggcgacggtaactactgggcgcatccgattgaaaacctggtcgcggtagtcgacctcgaacagaagaagattattaaaattgaagaaggtccgacgatcccggtacctatggcagcccgcccctatgacgggcgcgaccgcgttgcgccaaaggttaaaccgctggatatcattgagccagagggcaaaaactacaccattaccggcgatatgatccactggcaaaactgggatttccacctgcgcatgaactcccgcgttgggccgattctctccaccgtgacatataacgataacggcaagaaacgtcaggtgatgtatgaaggttcgctgggcgggatgatcgtcccctacggcgacccggacgtgggctggtactttaaggcctatctcgattccggcgactacggtatgggcaccctgacctcacctatcgtccgcggtaaagacgcgccgtctaacgcggtcctgctggatgaaaccatcgccgactataccggcacgcccacgaccatcccgcgcgcaatcgccatcttcgaacgctacgccgggccggagtataagcatcaggagatgggcaagccgaacgtcagtaccgagcgccgcgagctggtggtgcgctggatcagcaccgtcggcaactacgactatatttttgactgggtattccacgaaaacggcaccatcggcattgatgccggggcgaccggcatcgaagcggtgaaaggcgtgcaggcgaagaccatgcacgatccgagcgccaaagaggacacccgctacggcacgctgatcgaccataatattgtcggcaccacccaccagcatatttacaacttccgcctggatcttgacgttgacggcgagaacaacacgctggtagccatggacccggaagtgaagccgaataccgccggcggtccgcgtaccagcactatgcagatcaatcagtacacgattgatagcgagcagaaagcggcgcagaaatttgacccgggcaccatccgtctgctgagcaataccacgaaagaaaaccggatgggtaacccggtgtcgtatcagattatcccctacgcgggcggcacgcatccggtcgccaccggggcaaaattcgcgcctgatgagtggatttaccatcgtctgagctttatggataagcagctgtgggtcacccgctatcatcccaccgagcgcttcccggaaggcaagtaccctaaccgttcgattcacgacaccggcctcggccagtacgcgaaagatgacgagtcgctggacaaccatgatgacgtggtgtggatcaccaccggcaccacccacgtggcccgcgccgaggagtggccgattatgccgaccgagtgggcgcacgcgctgctgaaaccgtggaacttctttgacgagacgccgacgctgggcgagaagaaacaatag

SEQ ID NO: 179935 - DNA, 159 bp, Klebsiella oxytoca
atgcagcaggcctccttgcgggaggggagaatgaaggcgagccagggacacgaaccgcatacggccccgacttttatgttgcctatctgcgcgatcctgacgggcataagctggcatgcgtttgtcagcattattctcctgaagcagataagttcgtag

SEQ ID NO: 179936 - DNA, 798 bp, Klebsiella oxytoca
atgattattgaaaaattagtcggagctgatatttgtaaaactgttaatgcaggttccgtcccgttggattcatacactttcgcatcacctgcactcacaaaaaatgcaggtggtaattttatggctgcgagtaacggtgatactgagaaggaagcccaattccgaatgaaccaaacgggaaatatattttatgtgtctactacaccggaacttactcacaggactaaagatctatttgatagtgtcacagtattgttcgctgccatgaccgcagcgcttcatgagacaaaaaaatcattattcgattatgaagcatggagtaatttaatcggtggatctggattttttgttgaagtgcaaaagaccagaaacatgatgaccattaaaaacagcggtgttaccgttaacactcagattattcagcagcttcttcctggtttaagtggcggcagcgctatggagattgcaaaaggtgtactgagtgcagtaaatggtgagtttcaggcggttgagcgcgatgaaaatgccaaacttggccacatccttttcatctgtgaagagcttttcggcgctccaagcgtgaccgtacgcttgttctttgcgtcaaaaaaatcgcacagtgcaatcacacaatcgccgtgccacaaatctgtcactacaacctttgaacaattgcaggagtccaatacgttcctgtttgtatcaccggacactatagctaaatacgccaaactattcactgagcaaccggaggaatatacgaacttaatcggtcgccttaaagaattgattaaataa

SEQ ID NO: 179937 - DNA, 366 bp, Klebsiella oxytoca
gtggcgctggacaccaacagcctggccgataacgtcgacctggacgatgcggttgtcagcgtcgtcccgacccacggcgcgattgcccgtgcggagtttaaagcccacgtcgggctcaagctgctgatgtcgctcatctataacggaaagccggttcccttcggcgcgctggtcaccccggccggtagccagggcagcagcatcgtcgccgataacggccaggtctacctgagcgggatgccgctggccggcaaagtcctggcgaaatggggcgaaggtccgaacgccagctgcgaggctgactacagcctgccgcccgaaagtaagaaccaggcattgagccagctgttggcagtctgccgttaa

SEQ ID NO: 179938 - DNA, 504 bp, Klebsiella oxytoca
atgaaatggattcatgccgggtggcttctggcaatcacgctgaccgcattttccccggtgctgcaggccaccgacattactattaccgttaacggcaaagtggtggccaaaccctgtaccgtttccaccactaacgccagcgtcgatctgggggaactctataccttcagcctggtatcagcaggttccgcgtcggcctggcacagtaccgagctcgatttaagcaactgcccggagggcacttcacgggtggtagccacttttagtggcacagcagacagcaccggctattacaaaaatcaggggactgcgggcaatatccagctcgaattgcaggataacagcggcacaacgcttaataacggaaaacagaagtcggttgaggttaacgatagctcgcagtcggtgcgttttccactgcaagtccgcgctttatcaatcaacggcggcgccacccaaggaactattcaggcggtgattaacgtcacctatacctacgcctga

SEQ ID NO: 179939 - DNA, 903 bp, Klebsiella oxytoca
atgaaaaatgtccttgttctttttactaccctgcttctaataggctggtcgctgggtgccgcggcattcacctgtaaagttgtcaattcagggcaaacgctgcctgccggctcggcgagtgtttacgtcgctctgaatccttctattggcgtggggcaaaacttgattgtcgatttatcctcttcaatagactgtaaaaatgacgacttaagcaactcaattattgactacgttaacctcaccagcggtactgcatttggtggggcattggcagcgtttaccggtagcatttattgggataaaaatagttatccattacccatgaataatgattcatcagtgtattctatcacccataaggactatcgcgggttgccgttgcgcatgtatcttacggcaacaggcaccgcgagcggcgtcgtgattaatgctggcgaactcatagcgagacttaatatgcataaagttgccagcgacggaaaccccagggattttacctggaatatctacgctaataataatgttgtcgtccccactggcggttgcgacgtgtcaacccgagatgtcatcgtcacgcttccagactacccgggcacaatggctgtccccgtcacgattcactgcgcacaaaatcaaaacatcgcttattacctgacggggacaacggcggacacgagtaattccattttccgcaacactgcttccgcctcaccagcgcagggaattggcgtgcagatggttcgcaatggtaccgtcatccctgccaaccgtaacgtctcgctgggtaaggtaggcacctcatcggtgaacctgggtctgaccgctacctacgcgcgcaccagcggcaaggtgaccgctggcaatgtacaatcaattattggggtaacatttgtctatgagtaa

SEQ ID NO: 179940 - DNA, 777 bp, Klebsiella oxytoca
atgaaaggtatctgtaagctatgccttgaagagaaagatttaatggaatcgcatagcattccgagaagttatttcaagcggttgaagaaaaatgactctcaattgattatatttcaaaaaggaagcaaaccaaaacgagaaaatgtagaccctaaagagccgctactatgtttcgaatgtgagcagtttatcagcaatgagtatgaatcgtatggaacaaggttattgagaaaccatcataatattcgtaaaaactctgaccatataatcatcaactcatttgattataagcgattctatctattcttgttgagcatactatggcgagcatccatctctaaaagcgttaattattcaaccgtgaatggcgttcctgagttggatgacttgatgagacattgtattaaaaacaagcaagttcgtataaataaattaagtcacttgaaggtggataatttcattcgaatttgtgtttttagattgattgacaccacgaacaacgttcctgaccatgttattaaatctattcttagcaattttgcatttataagaaaagatgaagcagatagtgtactttggtattttgtagtagaagggtttgctatattctatgtgttctccgcttcaaaagattaccatgaagttatgagaatgcgattaaaatcacaattgacctctggcagtcatcagaagatctttaaaattgatatttttaaagacgcactcttttccgaaatttttattgatttgcttactgctgctaatgaaaataaataa

SEQ ID NO: 179941 - DNA, 573 bp, Klebsiella oxytoca
atggcatggtggaaagaccttagcaaagacagcatatcgggtgttatcgttacacttgtcactggcggtagtgggattgccgttattgtttggctatggaactacattaaaaagttcttccattggctggtagatatttttgtttaccctgtaacattgcctgtttgggctttacttctcatttctatttccctattagttttattgccaactgttggattcgtattgcggcggaaagtcacatcagaagcgaataatcatttaaagagttttttggactacaaaaccgataccatttttgggattttagtttcttggcgctgggtaagaagattagggagtcagaattattcgttagactctctcacaatgagatgtccagtttgttcgggaatgctggttcagcatgcaaatgatctctataatttaaatccgtacccgcttataaaatgtcaaatacatggttgtgattggaagatatcgcgtgattttgaacgtttaacttatggagatatgcgtattaaattagagcaagaaattgatcgacgttgttttcaacggtttggtgactaa

SEQ ID NO: 179942 - DNA, 438 bp, Klebsiella oxytoca
atgagtagattccagaaagcatctcatgtgcactggtgttgtcaatatcatatcgtatggacacccaagtaccgatttcgcatccttaggaacaatgttggtaaagaggtctataagcagataaggatctcaagtgagcagcttgggatagaagtagtggagctgaatgtccagatagaccatgtccatttgctggtaaaagtgcctccacggctttcgatttcccatgtaataggccacttaaagggtaaaacagcccttcgattgttcagtaaatttccctacttgcgtaagaacaagctgtgggggaatcatttttgggcaagaggttattgtgtcgacaccgtaggtataaacgaagaaatgataagaaagtacgtgaagtatcaggaaaaacatgaagttgaagagagccagcttccactgaaagaagtgtga

SEQ ID NO: 179943 - DNA, 717 bp, Klebsiella oxytoca
atgttctctaaaaagtcgctttctgcgctgtgcgtttgcgctgctattgtttctgctgcgggcgccaatgccgccacggatgccaatcttacggtaaaaggaacctttactccgggagcatgtactccggaactaagcaatagtggcatcgttgattatggctccatgagcaactcagttcttgagaagacaagtagcgataattctttagttcagctgggtaaaaaaaacattactttaacggtaagctgcgatgcggcgaccagcgtaggtattattgcgcaggataaccgtgcgagttctaaagtcacgctttcaaattcggcctatattgcagactatgtaccgggtcagaatatgtcgaacagtaatgcagtatttggcctcggcacagttaacaacgtgaacattggtgcttacaccgttacggcaacgaaggggggatcaaccgccgatggcgcagcagtggatatgatagtgaaagatacggatatagcaggttccggatggaggagtgcgaacggtggcgggttatattatcctgatagtacccgtatcgttaccgtcgctgaaatcggcaaaaccaccccaatgctgtttaaagatttagttatgccgctggatattgtttctgccgttcaggataatagtattttgggttctggagcgaaaattgagctggatggtaatgccacgctgagccttgtttatctttaa

SEQ ID NO: 179944 - DNA, 2163 bp, Klebsiella oxytoca
atgtcatcagttaaaaacagaactgtcgagaaagagacggatgaaatagatttaggtcggttagtcggagaacttattgatcatagaaagctaattatatccgttacatctctttttacgctaattgctcttctttatgcattatttgcaacccctatttatcaggccgatgcgcttttacaggttgagcaaaaacaaggaaatgcaattttaaatagcttaagccagatgttacctgatagccaaccccagtctgcaccagaaatagctctattacagtctcgcatgatcttagggaaaacagttgatgatctcaatctgcaggcaagaatagagcaaagccattttccattattgggcaaagggtgggcacgtttaacaggtgataagccgggtaaattgactgtaagtagactttatttgccatcagacagtgattcggatattcccaagttgaagctaactgtaaaggataaaaatcactacagcgttgtttttaatgatatagagatgataggtgaggtcggtgttttgcttgactctaatggtatctctcttaaagttgataatatcgaggcggaatcaggttcagtatttggcatatcttatgtaagtaagttgaaagcaattacagatttacaagaggtactttcagttgccgatcaaggtaaagatacggggatgttaagcttatcattaactggtccagacccaattttactagagaatattctgaatagtatcagtaacaattatcttgcacaaaatgtcgctaggcaggcagcacaagacgctaagagtctggagttccttaacgagcaattaccaaaagtgcgtaatgatttagacattgctgaagataagcttaaccagtatcgtagacaaaaagactcagtcgatttgtctttagaggcaaagtcagttctggaacagatagtcaatgttgataatcagttaaatgagctgacatttagagaatcggagatttcgcagttatacacgaaagagcaccctacctacaaggcactaatggagaagcgtaagactttgcaggaggagaaggcaaagctaaatcaacgtgtttcaggaatgccaaaaacgcagcaagatatattgcagttaagccgtgatgttgattcaggacaggcggtgtatatgcaacttttgaatcgtcaacaagagcttaatattgctaagtctagtgctataggcaatgtaagaattatcgataatgcaatatcccaacctaaacctgttaaacccaaaaaaataataataatattagttgggattgttttaggtggaatagtctcagtaggcctagttttactgcgtgtatttttgcgacgtggtattgaaaaccctgagcaactggaagagataggcattaatgtctatgcaagtattccagtgtccgagacctttgccaaaaaagctagcaaggcaccgggcttacgcaaaaaaaatgtgccagaataccaaagtttccttgctttggaaaatccggccgatttagctattgaggcgattcgcgggctacgtactagtctgcacttcgctatgattgaagcgcggaataatgtattaatgatctccggtgctagtcctaatgcgggtaaaacttttgtcagtaccaatctcgcagctataatttctcagacggggagtagggtcttatttattgataccgatatgcgtaaaggatatacacataaattatttgagcgtagtaatgaaaatggtttatccgatattctctcgggaaagatagatatttctagggcaattcaaactgtgcctgctgcaggatttgattatatctctcgaggtatagctccccctaatccagccgaattattaatgcacagacgatttaatgagttaatgacgtgggccagtcaaaattatgatatagttattcttgatacgccacctatcttagctgtgacggatgctgcaattattggacattatgtaggtacaacgctgcttgtcgctcgttttgagcaaaatacagttaaagagcttgaggttagttttaaacgttttgaacaaagtggtgtgcaagttaaaggttgtatattaaatgggatagtgaaaaaagcgagtagctattatggttacggttatacacactatggttattcctacaaagagaaataa

SEQ ID NO: 179945 - DNA, 1284 bp, Klebsiella oxytoca
atgaaaactacagtaaagctgtcattcatgatgttcattgagtggtttatctggggcgcgtggtttgtccctttatggttatggctgaataaaagcggatttaccgctggtgaaattggctggtcctatgcctgtaccgccattgcggcgatcctttcgccgatcctcgtaggttcattgaccgatcgctttttctcagcgcagaaagtgctggccgtactgatgtttgtcggcgcggtattaatgtatttcgccgcgcagcaaaccaccttcagcggcttcttcccgttgttgctggcctactccctcacgtatatgccgaccattgcactgaccaacagcatcgcttttgccaacgtgccggatgtcgaacgtgactttccccgcattcgcgtgatgggcaccattggctggattgtctctggcctggtctgcggctttctgccacaaatgatgggctatagcgatatttctccgaccaatatccctttgttgatcgctgctggcagctcggtgctgctgggtatttttgcctttatgctgcccgatacgccgccgaagagtaccggcaagctggatttaaaagtgatgctggggttggacgcgctcatcctgttacgtgataaaaactttcttgtgtttttcttctgctcattcctgttcgctatgccgctggctttctactacatcttcgccaacggctacctcacggaagtcggaatgcaaaacgcgacaggatggatgacgctcggccagttctctgaaattttcttcatgctggcactaccgttcttcaccacacgctttggcattaaaaaggtattattacttggtcttatcaccgcggcgattcgttacggatttttcgtctacggcggtgcagatcaatacttcacctatgccctgctgtttcttggaattttgcttcacggcgtaagctacgatttctattacgttactgcctatatctacgttgataaaaaagcaccggtacgcatgcgtacggcggcgcaagggctaatcacgctctgctgccaggggtttggcagtttactcggctatcgtctgggcggcgtaatgatggagaaaatgtttgcttatcaagagccggtaaatgggttgaccttcaactgggcaggaatgtggggcttcggcgccgctatgatcgccgttatcgccgtgttgtttatgattttctttcgcgaatcggatacagagatcaccgctattaaggtgcaaaacgacgattgcgatgctgcactgaaacaagaggaagttaaatga

SEQ ID NO: 179946 - DNA, 1005 bp, Klebsiella oxytoca
atgaaaacggaacgtattctcggcgcgctctacgggcaggcattaggcgatgcgatgggcatgccgtctgaactctggcctcgctcacgcgttaaagctcactttgggtggattgaccgtttcctgccggggccggctgaaaacaatgcagcctgttactttaatcgtgccgaatttacggatgatacatcgatggcgctctgcctcgcggatgccatcattgaatgtcatggcaaaatctcaccagaagttatcgggcgcaatatccttgcctgggctgaagggttcgatgcgttcaataaaaacgtgctgggtccgacttctaaaattgcgctcaatgccattcgcgacgcagtaccgatcgatgaactggagaacaacggcgtcacgaatggggcggcgatgcgcgtctcaccgctaggctgcctgctcgcaccaacacagctagacagctttattgatgaggtggcgctggcttccagccccacgcataaatccgacctcgcgattgcgggtgccgtcgtggtggcgtgggcaatctctcgggctatcgaaggagatagctggcaggctattgtcgactcgctgcctgctgtggcacgccaggcgcaggaaaagcggatcaccacttttagtgcctcgctggctgcccggctggagttggctttgtgcgtggtacgtcaggcagatggtattgaatcagcctgtgaggggctctatcagcgcgttggcgcaggcaccagtacccttgaatccgttccctgcgcaattgcgatggttgagctgactggaggcgaccctaaccgctgcgccattctgtgcgcaaatctcggtggcgataccgacaccatcggcgcaatggcaactgcaatttgcggtgcactgagggggatttctgctatcgacgccaccctgaagcaacagcttgatgaagtgaaccaactcgactttacccgctacgccacggcgcttgcacactaccgagagcaacgggaggcatcatga

SEQ ID NO: 179947 - DNA, 957 bp, Klebsiella oxytoca
atgaatctgatgcaacgattacccaccttaggcaacaagcgtcccgtcaccatcgtcggcgcggcggtcattgatgtgattgctgacgcttacgccctcccctggcgaggctgtgatattgaactgcaacagcaaagcgtcaatattggcggctgtgccctgaatattgcggttgccctgaaacgtctgggaatggaggccgataacgccctacccgttggacaaggcgtatgggctgatatcatccgtaataacatggcccgggaagggctttccagccgcatcgacggcgtcacgggtgacaacggctggtgtcttgcgctggttgagccggacggcgaacgcacgtttatgtcgtttagcggtgttgaaaaccagtggaatcccgcctggctggcgcaactaactgttccgccgctaagcctggtgtcactttctggttatcaactggcatcgccctgtggggaggtgctggtgcactggctggaatccctgcgtgatattacaccgtatattgatttcggcccgcgcatcgctgatattcccgagacactaatgcagaggatcatggcctgtaagcctgttatttctctgaatcgccaggaggcggagatcgccgcagagcgctttagattacccgtggcaaccgaagcgtttggtcaggcctggctaaagaaattcacaatgccgttgattgttcgtcatgacgaagagggtgcgtggtacttcagcgcggaagaacagggactggcagcgccgttccctgtggcggtaatcgatacaatcggtgcaggtgacagccacgccggagggacgctagccggactcgcctcgggatggacgctgggcgagtcggtactgcttggtaatgcggttgcgtcctgggtggtaggacatcgcggcggtgattgtagcccaacgcgcgaagcattactcctcgcacacaaagacgtatag

SEQ ID NO: 179948 - DNA, 747 bp, Klebsiella oxytoca
atggaacaagcgcataccctgttgatagcacaactgaacgagcgtattgcagcgccggataacacgccgctgtacctgaagtttgctgaaacggttaaaaatgctgtacgcagtggtgcgctggagcacggtaatattctccccggcgagcgcgacctaagccagttgacgggggtgtcgcgcattaccgttcgcaaagcgatgcggacgctggaagacgaaggggtggtgacccgagcccgcggctacggtacgcaaatcaataatatctttgagtattcattgaaagaggcgcgcggtttttcgcagcaggtggtgctcagaggaaaaaaacctgacactctgtgggtcaacaaacggatagtgagctgcccggatgaggtggcgacacaattggcgattgccccgcaaagtgatgtatttttgctcaagcgaattcgctatgtggatgatgaggccgtgtccatagaagagtcctgggttcctgcccaactgattcatgatgttgatgctatcggcgtgtcgctgtatgactattttcgcagtcagcatatcttcccgcagcgtacgcgctcgcgcgtcagtgcacgtatgccggatgccgaatttcagtcgcacattcatatggatgaaaaaataccggtgctggttatcaatcaggttgcactcgatcaacaacagcggccgattgaatacagcatcaaccgctgtcgtagcgatctatacgtctttgtgtgcgaggagtaa

SEQ ID NO: 179949 - DNA, 1977 bp, Klebsiella oxytoca
atgaaattaacaccgattatgaaaagtctggctctggcaggaattatctcgactctccctgtgaccagctgggccgaaacgtcgccgaaagaagccgctgcggcgaccaaacaggcaaacgacgcgctgtataaacagctccccttctccgacaacaccgactttaccaacgcgcataaaggttttattgccgcgcttcctacggaagtgattaaaggtgaacagggcaacgttatctggaacccgcagcagtacgcctttatcaaagagggggaaaaggcgccggatacggtcaaccccagcctctggcgtcaatcccagctcatcaatatcagcggcctgtttgaagtgaccgaaggcgtgtaccagatccgcaacctcgatctctccaatatgaccatcattgaaggtaaagagggcatcacggttgtagatccgctggtatcagcggagaccgcaaaggtcggaatggatctgtattacaaaaatcgcggcaataagccggtcgttgcggtgatctacacccacagccacgttgaccattacggcggcgtgcgcggcgtggtcgatgaagccgatgtcaaatccggcaaagtcaaaatctacgcgccttccggttttatggaagccgccgttgctgaaaatattatggccggtaacgtgatgagccgtcgcgccagctatatgtacggcaacctgctcaaaccggatgccaccggccaggttggcgcaggtctcggcaccacgacctctgccggcaccgtcacgctgattgctcccaccaatatcatcgagaaagatggccagaaagagattatcgacggcctgacctacgattttatgctggcgccgggctcggaagcaccgtcggaaatgctgtggtatatcgaagagaagaagctcattgaatccgccgaagatgtcacccataccctgcataacacctactcgctgcgcggggcgaaaattcgtgaaccgctaccgtggtcgaaatatatcaacgccgccattgtgcgctggggcgacaaggctgaaatcattatggcccagcaccactggccgacctggggtaatgagaacgtggttaacctgctgaagagccagcgcgacctgtatcggtacattaatgaccagactctgcgcatggccaacgagggcctgacccgcgatgagatcgccgccaaattcaagctgccggacagcctggccaatacctgggccaaccgcggctactacggctccgtcagccatgacgtgaaggctacctacgtcctctatctcggctggttcgacggcaacccggctacgctggacgagctgccgccggaagaagcggcgaagaagttcgttgattatatgggcggcgccgatgctatcctcaagaaagccaaagaagattacaaccagggcaactatcgctgggtagctcaggtagtcagcaaaattgtcttcgccgatcccggtaatctggaggcgcgcaatctggaagccgatgccctggagcagctgggctatcaggcggaatcaggaccgtggcgtaatttctacctgaccggcgcgcaggagctacgcaacggcgtcgtgaaaggcccgacgccgaataccgccagcccggataccgtgcgggccatgaccccggaaatgtttttcgactatcttgcggtccatatcaacggcgaaaaagccggaaccgccaaagcggtgttcaatatcgaccttggtaacgatggcggtaaatataagctagagctggaaaacggcgtgctcaaccacaccgccgatgccgaagccaaagacgccgacgctaccatcgcgctggatcgcgccacgctgaacaaaatcatcctgaaagaggaaacgctaaaacaggcggaggataagggtgaagtcaaagtgaccggcgacggcgcgaagctggacgagatgctgggctatatggataaatttgagttctggttcaatatcgtgacgccgtaa

SEQ ID NO: 179950 - DNA, 423 bp, Klebsiella oxytoca
atgtccgtttatcaccatgctctggtgctgatcaacagcagccttgacggcgttccgctgctggcgcacgccgcgaaaatggcggaagaaaacgctatgcgtattaccatcgcccatatcagcaccgactaccggtcgcttaattatgtctccgacagcctgctggatgatgacgtttcccgggaggtgattcaggccaaagcgctgctcaatgaactggccaccacggtcgccctaccggtgcagacgctatcgctggtgaccacgcgtcgttttgccgatgtcgaagcgtgcgtgcggcagcggaatgttgatttgatcattgccggtcaccacaaccggctgctgggcgttctcgcttcacactccctggagtacattaatcatctcaccgtcgacgtgctgattaagcatcttccctga

SEQ ID NO: 179951 - DNA, 2055 bp, Klebsiella oxytoca
atgaaaaagaaatgtctatttgatcagtatgtcgacactatattacacggtgcggattataatcctgaacagtggcagaattatcccgatattgttgataaagatattgcgatgatgcagcaagcaaaatgcaatatcatgtcagtcggcatctttagctgggcaaaactggagcctgccgagggagtctatgaattcaaatggctggatgtcattctcgataaactggccattgccgggatctctgtttttctggctaccccgagcggcgcgcgtcctgcgtggatgtctcaacgttatccgcaggttatgcgggtgagccgggaccgggttccggcactacacggagggcggcataatcactgtctctcttcgccagtctatcgtaagaaaacgttaaaaataaataccctgctggctgagcgttactctcatcatcccgcgatcctgggctggcatatctctaatgaatatggcggtgagtgccattgtggcttgtgccagcagcaatttcgtgagtggcttaaagaacgttacaaaacgctggatgcgcttaatcatgcctggtggagcagtttctggagtcatacctatagcgactggtcgcaaatcgaatcaccggccccgcagggagaaacttccattcacgggctgaaccttgactggcatcggtttaatactgcacaggccactgatttttgtcgtcaggaaattaaaccgttgaaagcggcaaatccgcagctcccggttaccaccaatttcatggagtattttaacgattacgactactggcaactggtggagccgctggattttatctcatgggatagctacccactatggcacggtgataaagatgaaatcactcttgcctgccatacagcgatgtatcacgacatgatgcgtagcctgaaaggggggcagccctttgttttaatggaatcaactcctggggcgacaaactggcagccaatcagtaagttgaaaaagccgcggatgcatatcctttcttccctacaggcggtggcgcatggcgccgactctattcagtacttccagtggcgtaaaagccggggttctatggagaaatttcacggcgctgtggttgaccatgtagggcatcttgagacacgcgttgggcaagaggtctgcgagctgggtgaaatattaagccggttgtcgggcgttgcgggatgcctgacggatgccagagtcgcgattattttcgatcagcaaaatcgctgggcgctgaacgatgcccagggaccacgcaatcttggtatggagtacgagagaacagttaatgaacattatcgtccattctgggagcagggcgttgcggttgatgttattgatgccgatggcgatttaaatcaataccaactggtgattgcaccgatgctttatatggttcgggacggttttgcagaacgagctgaagagtacgtggctgatggcggctatttagttacaacatactggtcagggatcgtcaacgaaagcgacctgtgccatttgggaggctttccaggcccgttgcgtaaacttctcggtatctgggctgaggagatagatgcgctcaatgatggggaatattgtcaattatcaggagtccctggcaataacgccgggcttaaggggccttacaaggctcaccatctctgcgagttaatccataccgaaacggcgcaatcactggcagtttacgacgatgatttttacgcaggccgaccggcagcgaccataaatcatttcggccaaggtaaggcctggtatatcgcatcgcgcaacgatctggcttttcagcgtgattttttcaccgcgctcattaacgaactggccttaacgcgagccattgaagaacgattcccgacaggcgttgttgccactgcgcgcactgatggagcgcacacctttgtctttatccaaaactatacggcctgtgcgcaattcgtcacgcttccttcaggctatagcgatgctttatcattgaccaccatcaacgagctcacgctggggccctgggattgccgggttatccgtcgacttgcgtag

SEQ ID NO: 179952 - DNA, 1251 bp, Klebsiella oxytoca
atgaaacgaaatcagctgattttatgtttactaatgtttttcttcttttttgcctggtcatcatcgcagtcgctactgtcagtatggttgaaccaaaccattggcctgcaggcaacgcagacaggtattattttttcggcgttatcagtatctgctttgtgtgcacaggtatgttatggctttattcaggataagctagggttaaggaaaaatcttctttggtatatatcgattatgctggcgctctccgggccggcatttattactttcggctatttacttaaggttaacctgatactcggcagtatattcggtggcctgtatattggactcacctttaatggcggaattggtgttcttgaatcatttactgaacgcgttggtcggcatgacaattttgaattcggtcgagcgcggtttggtggttcactcggctgggcggtagcgaatttctttgccggtatgctgtttaatctggatccgcgatttaatttcctcgtggcttcagttggcggaatactgttttttgtggtcttaacgacgctgcgcgttggtgagcgtgcggcgccatctgttgcgccgggaggcggccaggataacgcggcgcagagcagcagagtatcgctacaggatgcattgagcctgctgacgctacctcgtttttgggctttgattttttttgttatcggttcgtgcgtttataacgtttacgaccaacaattccccgtttattttgtggctcagttcccgaccaaagaagagggaactgccatgtttggctatctgaactctattcaggtttttcttgaggccgcagggttattttgtgctccgtggctaattaaccgtattggggcaaaaaatggtttgattttcgccgggatggtcatggctgtcaggatgattggatctggccttgtcgaaggacctgtgctcatttttattaccaaacttatccatgctgcagagctgccggtactgctggtttccatgttcaaatatatcacgcttaatttcgataaacggctgtcatcaacgctatatctggttgggtttgcctgtaccagctcggttattggcacgctgatatccccattggcaggctttggttatgacagcattggctttgcgccaacctacttaattatgggcagcgtcgtgttcgccacaacgtttacatcaatatttttattgcgctctggcggagattcttcggcagaacccgcgatgagccaggttaacgtagcgtaa

SEQ ID NO: 179953 - DNA, 162 bp, Klebsiella oxytoca
atgttcgtctatcagcacaaaagcaacgtatttaccccgcaaaacccagacgtcgcgaaaaccatccattttgacggcgtgttccggcggcgcaggctcgactcgcggcacgtagctaatgacctgacgattttgttggcgaagtggtttcatcacaaatag

SEQ ID NO: 179954 - DNA, 1050 bp, Klebsiella oxytoca
atggctagtgatgataagaccttgaatctattccctatagattatccttttgaaactctatgttcgcggatgaagtccaatcccatcaaactaaaattaaacccagattttcaaagaaagtacaaatgggatcaggatggatggctccgttcctcaaaattcattgaatcttgtttgatgcgtatacctcttccgtcctgctatttcgcagaagatgatgatggtaaccacatcgtaatcgatggtgttcagcgcttaacaaccatacaaaaattttttgatgatgagttcgctttagaagggatgactacctttaaagagcttgaggggaaaaagttctcagaattaggttctctacgttcagagcttgagtcaactacaataaggtgtattgttctaagaaaagagaatcctaaatcactaataagagaaatattttcaaggttgaaccaaggtgcggttaaactatcggaccaagaaatccgacatgcattatatcctggtggattcgatgatttgttagaagagttaggtaatattgatgcaatcaaaaactttggtcttgctgaaactacaaaagtcaaaagagatagtcgtgagccagatgagcaagtactacgattctttgctttttacgaagatgatttcttccaaaactttgatagcactttaaaagaatttttagatgatcaaatggaaaaatcttcaagtcttacaggcaacgaattggagatgatgaaagaaagatttaaatcttctttggctaagtgtgagaaaattttcggggatgatgtattcactaatcctacagtaagtagaaaaagaaaagggttagtacattatgatattttaatgcctaccattgggaagcttgatgataatattgtaaatgataaagccgaagaaattcgtaaagcctggtatgagctgtgttcgagtaatgaatttaaaagaacactatctggtggattacagaacaaaagttcagtaatgaaacgcagagagagctgggttaatatgcttagagatgttaccgatggaaaatactga

SEQ ID NO: 179955 - DNA, 582 bp, Klebsiella oxytoca
atggaaaatactgaaagctacgaaaggtatcacttattatttgaatccttgaggagtattatcaaggagacggagcaacatacaataaaccaagataatgatttttttaacaagaatgtcaatttttttgttaagtcttatctaattactctttgcacataccttgagtcttatttaaccgaggtcgccacctctcattgcaataaaataaacaacagacttaaaaatgcctgcttaccacataactttttagtttggagattaaaaaaggaattcaaggagaaggacttaaaatacagcaatgctgatttgagcgttgaaaaaaatgaaatatccgacagtatatctgggaacccttataaaacgataaaggcattttcttatttaggagtcaatctccttagctcagctgaatttaatttgaacaaagatctagttaacgcaatagttcttaaaaggaacaatatcattcaccataatgataacgcaaatgacatcagcttagccgatatacacagctatatagatttatttttaacttacatgctagcagtggaaaaagtaatacacgatagtaattaa

SEQ ID NO: 179956 - DNA, 1674 bp, Klebsiella oxytoca
gtgaaacccgtcatcactctgcgtatcggtagcgaaattgtgccggtggtgtctcagcatctggtgcttgagctgggcgggtgtgggcgtggttttatcacggccttaactcctgcagatatgaccggccaactggtgcgccttgatatgggctataacgagatagtttatcgctggtttactggctttgttgagcgcagtagcccggcggaaaatggtgcccggcgtctttttgtgcgcgagctggcgggcatctttgatggtcactggccggtttcattgcagcatccgacattacgcgatgtggtgaccgggatcgcccagcgtaccgatatggtgttttctcttccagataacgccgattataccgatactccgatccctcactttacgcacagcggaagcggttatcagctgctggcgaatctgggccgtgccttcagcatatcggattacacctggtttcagttacctgatggcaccatctatgccggtagctatgcacattcccgcttcgcagacgctccggttgagatcccgaccgaatttattcagagcgctgcagccgggaacagcatcacgctgccagttatacccgctattcgtccgggtgtggtcgttaacgggcagcgtatcactcaggtgcgtatccaggacgatgaaatgacactgacctggacgccgcttaacagcgagggtaaaccggcacataaaagcccggagcaacgccagatagacaaaatttatcctgagctcagtgccgggttacatctgccacgtctggcgcgggtgatagggccaagtgacagcgccgccctgggtgaccaggcggatccttttcgcccacgctatgcggtgaaccttcagcttcttgacgagaacggggaagcggccagaaatacacccgtttacagtgcggtaccattgccggtgccgatggccggggccgaaggggggttatttcagtacccaccggaaggggcgctggttgaaattggttttgccgatggcagacctgataagcccctgatacgtcagacattgctagaaggccaggcgttgcctgatatcaaacccggtgaacagcttcaacaacagcgcgccggggtgagccagcgcgtaacgcaggcgggatcgtggcaaagagaaactgaccaggcgattgaagagacaagcagccagcgtaaggtcagcagtgaacaggagaggcgatctgtaaccgaacgcacaacggttgttaaagcgaacgacaccacaaccgtgctgggtacagctaaactcatggccggtgctgtggtgcagctggccgatggagattacaccactggggcaaccggcaacatagtcagccactgcggcaaagacagatacgccagtattggccagaatgacaatctggcggtgggtggctcgcttacagagaaaatccagggcatacggcgcagcgtggcggcggctcaggaattactcgccccctccatccggctggggagcgaagaagtgaacgtgttaagcctgctgactgatacgctggacgtgctgcgacagctggccgaacagacagcacagcacacccacagtaacacaggcggaccgaccaatagcgatgcaataaaagcggcaggcgctaaaactgtagaattgcacaagaagtatacacacttcattgcctaa

SEQ ID NO: 179957 - DNA, 552 bp, Klebsiella oxytoca
atgacgcagataattgttctggcactggatggcgaagccattctgatgaaaaacatcctggtcacgccatcgatgcaaattcaggataaggatcagtccggccaggcgagcagcacggcaaacgcagagcaggggataaaagccaaagagctgcgcgtgtctggtcttatcccttttgcagataaagcacaattaacacgcctttttgcgctggctgaagccaaaaatgacagcggcggaatgaagcgttatcgcgttgcccatgaagtggcgcaggcgatcaaatttcgcgaggcgaccttttcaggcaacgtggatgcggccccgcaaactgatcgcatggcctggctggttaatttcacgctgaaagaatatttcagtgttgccgaacgtaaggcgatgcaggccgcaagcgccggggcggggtctgcaaccgcccagactgcgggggggaccggcagcgctgaagagtccgccgaaaagctgtcatggtttgaaggggtgctcaaaaaaatagataccgccattggcccggcagggggtgagcagtga

SEQ ID NO: 179958 - DNA, 705 bp, Klebsiella oxytoca
atgtggaagcaataccgcctttgcattcctgaaagcctgcagagggtgaactgttccaccgtcgtggcgcatccgtgggtttttgggctcggccaggaggaaaaatcaggtttctatctcagcccgccaaatgcagttaactatctgattaaccggctcgccggagccgatgttagccaggacgtaacagccatattactggccgcgccgacactgacggagtttgttaagcaactgactgaagcggccacggtatttccgctggccgcacttaatcagattaaaagaagggcggcgacggcaagcagcctggcaacaacccgaatgcagatacctgccactgatggcggtctgatgccttcggctccattgtcagccagcacaatcagcaagtctttgaatgcacaatctgtgataaatgcaatgggggcggctgcgataccgggtagccctgaaagcatcacctcaatgctggccgattttgccagtgaaagagccgcattgctgaaagaggcaaaagaggaactggcccagctgcaggccgggggggttaatgtgtggtcagtttcggcaaccggcaacactcaaaccgcaaccaggattatgtgcgaggaaatacctgaagctgacagggtattcactctggcgctgatgttcgtcggcgaagatttagcgccattgcgtgcgatgctgagggaaatatga

SEQ ID NO: 179959 - DNA, 1581 bp, Klebsiella oxytoca
atgtctcagagtgtcatcactaatgcattctccccctggctggcggcgcgccttgcagatagtaaaccggcgaggcctgacaggatggttttcgcctggatcgagggacaggatgaaaatgcagagataaacccggatgagcaactgccagcaaaaagcctcattacgcatactgccgatatcgttcactttggcacgctcaatgagcgggcctttgtatgctcggttgtgcttgatacaaccgtgggaaactggcgttacaactggatcggtctggttgacagtgaatcagataccctgttgatgattgtccacacggctgaacagcaaaaaatcaagaccgctgccgggatccagggcaacacactatcacgcaatctcatgatggagttttccggggctgcggcggcgtctcaaattacggtaacagcggaaacctggcagattgactacagcgccaggcttcgcagcatggacgaagcgggaaggctggcactggttgactattacgggcaggcggctttccggggcaacggctttttagtcacggttcaggacaatgttgccgttgttgagcctgggctcggctatgtttccggtctaagggttgagctgagcgaatcgcgatccttcgccgttgccaacgggtctggtgtgtgggttgatgcggtatggtcgggaacggttaccggcgcgtgggtgcattcgttcaaagtagttgcggctgtcaacctcagtgactatatcgacagcgcaggctttcagcattatgtcaccaggatagccagtgtcacggccaacggcgtgaaggatttacgcacaccgtttccgttgcaaaagctggagcaaacgatcgatgagctcgatgtatacagcaaaaccgaagcggatgagcgatttttgcaggcggagaacaacctttctgatgtagccgatgccgaagaggcccgcaaatcgctggatgtacacagcaaaaccgaagcggatgagcggtttttgcaggcggagaacaacctttctgatgtagccgatgccggaaaagcccgcaaattgctggatgtacacagcaaaaccgaagcggatgagcgatttctacaggctgaaaataacctttccgacattaccgatgccgaagaggcccgcgataatctggggctggctgacattgaaggtgcgggctttcgggccattattgatgctgttttctgggtgggccggacggtgatttcagacagtaacccgcagagccgctacagctggcagacctggaaagatttgagcgcggattataacgggcgtgtgcttcgcgtcagcaatgaggcaggggcaacaggcggcaaaaataaggtcaaacttgaagccgataaccttcctccccactggcaccgctctggcgacagatcgccgggggcgacgtgggatccgaccacaacacatggcacggataaccagaaaagcggcccgcttgcccttactgagggaacttacattgatgcggcaggccagacggaatcaacaaacaaagaggtagacgtggccaacgagtatgtcaccgtgagagcgtggcggaggactgcttaa

SEQ ID NO: 179960 - DNA, 1182 bp, Klebsiella oxytoca
atgaataagccaaacccagattatgaggctatcctggctgaccaggggatgccaacaacagaaactcagatccgcgatgagttcaacacgattgcggcaggtgagggactaattaccaatacctcgcgcatgtcgccgttctggcgtctgattacagcgatagtgaccacgccggtgctctggcttaaaaatgcactggttaacaccgtgatgaaaaatctgtttctggcgacagccgggggcttatttgttgatctcttcgcctgggcggtaaacctgacgcgcaaggatgctaccgctgcaatcggggtgattcgtttcacaaagattgatgctgatcgtgaagtcaccgtcccggcggggactgttattcagaccgaacgtattaacggtaccgtttaccggctgatgacctcttctgatgtttctgtttcatccggtgttaccagtgcgctggtaccggtcattgctgagctggaaggcagcggctataaccttgcaccaggttattttcgtattctgccggtcgcgctggacggcattgccagcgcagtgaatgaggaagactggttaaccacgcccggggctgatactgagtctgatgatgacctgcgcgaccgggtgaaaaatcagttcaatctgcccggccagtatcacattgatgcggtatatcggggactgattgccgggatcgccggactgacgactgatcgcattttctttgtgcatgatgccccgcgcgggcccggtaccgcgaacgtttatctgctgcttgattccggtatagccagccagccttttattgatatggtcaacgattacgttatggcccagggctaccacggtcatggtgatgatgtgttgtgcctgccgttacctgaaactttacatgaccttacggtaactgtgcatgtgtatgccagtagctacctgtctgaagaagagacatccacattactgcgcaatgccggtgatcttgtccgctgcgcctttcgggaaaatacggattacgatgttgccaaaacatggcctttcagccgcttctcgatatcccgtctgggtgaagaactacacgatgcattccctgatatcgaatcccttgagttctcgctgggcgatattgtcagcgatctgagtgttccgcgactgcgatccctgaatatggtgccggcagatgaataa

SEQ ID NO: 179961 - DNA, 345 bp, Klebsiella oxytoca
atgagtaacgggctgaagtatatcgatctcctgatctccgggcgtaattttacgcttgattcaggcaatgagccggaactctgcaacaaccgcgccagcatcgcgcaggatgtggttcacatgattattgaatcagggatcgttaaagaacttatcgctgaaagaagcccggttctcagggcggatatcatgatgcaaatggaattactggttgaatccgatgagcggatcgtaccgggcacggtcagcatcactgatggtcttaacggtgattattttattgaggctgacacctacgactttgggcccctttcactgacggatgcgctggaaaccgatgaataa

SEQ ID NO: 179962 - DNA, 2085 bp, Klebsiella oxytoca
atgaaagaactggcttttttgttgagtctcaaaaacaacctgagcgccccgctgggcaaggcgcaaaagtcggtggagagctttgccagaaagtccggcgacgcgttcagacaggtcgcaacgggtgcggctggtctgtggggggttgttcagggtgttaaaggtctgctgagcccggctaatgatgttcagcaggcgcttaacgaactttccacgcgcaatgttggcgcggattcgctggataaaatgtatcgatccgcccagcgtttcagcacggcttatgggaaatcggcagcggagtttattgcctccggcaccatcatcaaaagtgagcttgctgggctggctgacagtgagttaccccgtgcagcagtcgcgatcaataccctggcagtggcaagtaaatcgagcgctgagcaggcggcggggtatatgagcgaaatggcaaataactaccgctcgaccgtccgcgcgatgggtaatgtgccgtttgccgaaatgatggcgtcgaaaggcgcttatatggtgaagaactttggtacaagccttgatgagatccgcgagctggtgaaatccagtaaaggcactggcacccagtatggtgccgggatggacgaacaactggccgtactgggtatgctgagcaagacccagggcactgaggccggggggatttatgattctttcctgaaaagtgccgtggaaggtggcaagcaactgggcatgagctttaccgatgctcagggaaaattgctgcagttcccggacatacttcaaaagctacaggccagattcggtgacaccattgagggtaacgtaaaggcacaggccacgctcaataaagcttttggcgaaggggcgcaggcgctgactgctgcctgggggcaggctgatgccctgcgtaaacatatgcgtgatatgggcaacacgcagggcctggacagggcaacggaaatggccgcgaagatggcaaacatctgggagcgcgtggataaagtctgggaacgtgttcgcgtggcaataggtatgcgcctgatccccgccatccagccaatgattgattacgccattaatgccggtacccggtttgctaaatggctggatatgttcccgaatattgcccggtggattggttatatcacgctgggcacgctgggcctcggtgcagctggcgcggctgcaaatatcgtcgtcggggtatcaaagtttgtctggatggggctgacaggggtctggaaagcggcaaccattgccgcccgtgcactgtggtgggttatcaatctgaaagcgcgtgcgctgcagattgcccgcatcgccgctattgcctgcagcgccaccatgcgcgtattgcgggtcacgttgctggcaatcacgatggcctggcgtgtatcgactgcagccgcgcttttgcagcgcgcgggcctcatggcgacagcaatcgccatgcgtgcttacggtatggcgacgatgtttgccgccgtcgggacacaaatcctgatgagcccgatcactctggtgattgccgccgtggcggcactggccgcaggcgtctggtatgcagtacagcactgggacgagctcaaagcggccctgatgaatacacaggcttttcaatgggtgatgcagatcgctgctgcggtggggagcatattcggtgaagtctggcgactgattaaagtcggctgggaaagtgtcgttgcgttctttggcggtatgtcgccggtagccgcatttaccgggtttgttgatgcaattggcaacgtcttcagtggattgtgggactggctgatgcagtcctttggtaagacctggaactggattgtcagcaaactgaatatgatccccggtgttgatattgacctgaagccggtcgccgatgcggtgcctgatgtatcgggactggccgggcccgccgggttaaatgctccacaactggaacgcggtggcatagccagaagcatgaccagcggcgcgcaaagtaaggttaccgacaacagccgcaaaataggccaggtgaatatctatccgcaaaatgcagaaacgtttgatgcgctgatggagtcgcgggagctggcagcaggatga

SEQ ID NO: 179963 - DNA, 276 bp, Klebsiella oxytoca
atgagcaaagaaaatagcaacattctcacgttgtgcatcggtggtgtggatgtgaagtttgccccgacactgcaggcgtacaacaaatgcctgaacgaatcagcgcgggctgaagatgtggttggagccgtcgccacctatctgaagcgcatcgtggtacctgagtcccgcgaggcactggcaacgctgctactttcgccggggcttggtgcgcagatcgccgagaagattaacaaagtttatgcgccgtcggtcgagatcgaagtaaaggaatag

SEQ ID NO: 179964 - DNA, 378 bp, Klebsiella oxytoca
atgctcacgcgtctggcgggggtgtttcttctgggtgccgtcgccgggggctggtttgtggcgagctgtaacgacagggaagacgagcgccgggccggtcttcgtgacgagctgcaggcgatgattcagggtatctcgtccgagtcggcgcagctgcttgaggccagattgcaggaactgcacggaaatgaaattcatacagagcgcgtcatccataccgaaaccgttaaacctgtatttcgcaatgtttgcgcttctgatgagtatgtccggttgttcaacaacagtgttgaacaggccgaacgaaccctatcaggaaaacctgttagcacggtgcccgcaggatctgccgcgtctggcggggcccacgggaagtga

SEQ ID NO: 179965 - DNA, 339 bp, Klebsiella oxytoca
atgaagttaagcgaaaagcaacagttgtttacccaaatgattgcccagttgatcacctgggcgggtgatcacggtatgcgcctgacctttggggaagcataccgcaccccggaacaggctgcactcaatgccagaaagggctcaggcatccgtaacagtctgcacacccagcgcctggcggtggatttcaatctgtttatcaatggggtgtatcagaccgacagcgccgcttacctcccgctgggcgagttctgggaatccattggcggcagctggggcggtcgattcagtaaacccgacggcaatcacttcagccttgagcatgaaggggttcgttaa

SEQ ID NO: 179966 - DNA, 294 bp, Klebsiella oxytoca
atgccaaacggagaaagcacattcttaaagctgttactcattggggccgttatcggtctgggaaaagtactggccgatgatgcccggctgaccttcaaactggtattaggccgcatggttctgggctccgctgtatcactgatcgccggggtactgctgatccggtttcccgatattgatgagcttgccctggtcggggcagcgtcagcactgggaatactgggacatacggttattgagtcaatgctcaagcgctatgttgagtcgaaaacaaaagggattgataaatcatga

SEQ ID NO: 179967 - DNA, 456 bp, Klebsiella oxytoca
atgtcatcacgtattgggggcatggattttgatatcaccctgggaacggaaatcatccatgtgaaaaccatctcgctggatatcaccgacaacacaaccgcagcccagacgcgaggcatccctgacgggcatgtcgctggcgatgttgcggctgaaggtgaaatggagatggacactaaaaactttaaaaaaattggggctgtggcccgtgaggccggcagctaccgggctattccaccgacggacattcttttttatgccaataccggggatgaagaactcacggtagaagcgttcggctgcaagctgatcgtgacctcgccggtcgggtttgatccgaagggaggggagacggccagccacaaggttaagtatctggtgacgagcccggactttgttcacgttgatggcgtcccgatcctgtcagaaaacgacgtccgcgacctgattgggtga

SEQ ID NO: 179968 - DNA, 1164 bp, Klebsiella oxytoca
atgacatggcccaatgtaacgattaatcagctgaatcagcgccagggaaagattaatgaggttgaacgcaccgttttattcgtcggcaatgccgcgacaggtgacggtgatctggtcgcgcttaattcccagtctgatattgatacggcgctgactgatgccagcgaagcattacgcgaggttgtgcgtgcggcaaaagttaacgccggtcaaaactggcaagcctacgcgctgttagtggcggcaggcaatagcgcggcaacgtggccgtcagcgattgaaagtgtgcaggatctgatttcagtcgaaggtgtggtcgcggtcacgcagctggcagatgccagtgaaggacgtaccacaattgaagcatttttcgccctgcgtgaaaccctggtcagcaaactggggcgctgggtgtggtttgttctgacagccagcggcccgttaacgattccgggaagtggagccaagcccggcgtcacctgggcggattacctgaagtttcagtctgcacttgcaaaagatatcgcagcacatgccgtacagcttgtgccatcactctggggtaatgaagcgggcgtcctggcgggcaggctgtgcaatcgcagtgtcactattgcggacagccctgccagggtgaaaaccggggcaatcgtggggctgggaattgaaagcagcgatctgccggtggacagtgcaggaattgagctcgatttggcgcagttacgcgcgatgcacgatctgcgctattcggtgccgatgtggtaccccgattatgagggcatttactgggctgatgggctcacgcttgatgtgaaaggcggtgattatccggtaatcgaatatctgcgcattgtggataaagccgcgcgtcgtgtgcgtattcaggccattgccaagattggtgatcgctcgctgaacagcaccccggccagcatcgccagccataaaacctacttcagcaagacgttgcgcgaaatgtcccgcagcacgcagatcaatggggtgactttccccggagaggttaagccgccgcaggaaggtgacgtggaaatcacctggactgatacagaaactgtgcagatttacctcgtcgtgcgcccctatgaaagcccgaaatcaatcactgtcagcatcatgctggactcgtcgctggaggcgtaa

SEQ ID NO: 179969 - DNA, 705 bp, Klebsiella oxytoca
gtgaagattgacggcggactggataagcgccagctaaaggaattgcgccaggcactggcggcggctgaactcaagccaaaacagcgccagcgcctgttatggcgcatcgcgaagctggggatcattaatgccgccaggcgtcaccagcgaaatcaggtcacgccggacggccagccctggccgaagcgtaaacgaggtaaaggcaagatgttgcgccagttaccacggctgttacatgtgcgggagatgccggaaagggaagcggttcgtatttacctcaagggcggaaactaccgcaataacagcgggccagtatcggcgggattaatcggggcggtacaccaggaaggtgccgccatcccgatgagcgcagaaaagatgcccaggccagaccagcgcggaaaaccggcgctgatgagccaggccaaacgactgagggcgctgggttacagggtgtggaagaaaggccggtacgttaaagcatcgtcacgccagatcatggagtccatgagcatggcgcaggccgggctactgataaaaaaactcaggggcaagccgacgaaatcgacctggactattgatattcccgcccgtgtcttcctgggcgtcagtgataccgaatttaacaaaattcttgcccgccagctgcaggccatcggttttggctggaatgtaaacgcgcaggatatcaaggggaaacagtaa

SEQ ID NO: 179970 - DNA, 495 bp, Klebsiella oxytoca
atgagtcagattgagagcctcaccggctatctggaacagcatatgccagaccgcgcgatgcagtttttcgagagcgcgatggaggatgcaaccctggtgtattcagtaaaagcactggggctggggcaaagacgtttaggcgtgtttcgttattccgcccggctcagctgggacagatttccttatcgcctgtgtccgcctgcgctggtctacgcgatggtattcgcctgggctgataccagcagaaatcatctttatgacgagctgagcctaggtgagcctgccgtggatatcgagtttgatgaggaagaaaccagttctctttcaatcacccttgaactggccgatgagataacgatcaccccggacgaagcgggcgagatagtgatggccggtaagcggtggcggctggcttacccggatgttcatgttgccacaaaaggttacctctacgcagcggcgacgaacggcgcaccgttaggggaaggccagtga

SEQ ID NO: 179971 - DNA, 474 bp, Klebsiella oxytoca
gtggcatcaccaacactgggtttcagcggccgaacgattggctacagcgatatcccgatttctaacggtgtggcgttctggcctgatctcaatcttaaagagtttcagcaatcccgaacaatcccgccggacttgccacctgatacagcgggacgcgcggtactcgcagccattgcggaggtcaatgatgatctcgccagcgtcgtttcccgttatcaggagcagggctacgccactgcgcgcgatgtgcccggcgcaaagatgggcgatgaaaatcagcttacagcgcaatacaaaaaggcggtttatgcccgtgcaaaggcggatctgctcggcgagttcccgaccatcgggcggcgcgaaacgcatcccggccaggaaagcaccgatacccgcgaaacactgctggctgaagctgcgctggtgatccgcaatatgaaaggttaccgccgcgtggggatttatcaggtatga

SEQ ID NO: 179972 - DNA, 705 bp, Klebsiella oxytoca
atgaaaatgacaccttgccagcgccaccgcgcgcgtatacgtgcggagctggcgatcaggaaccgcgagccaatcacggatagcccggtcagcctgcatgtgcagatcaccgcgctcaatcgcgatgtggagcagttgcgcgcactcccgacaattgccgaccgcattgagatgaagcgtgatctgctgctgcccaaatggttgccggtggcagagcgttatctcagcgacggcaaggtgttcagtaacccggtatttgcttactgcactatctggctctttgacgtgggcagttttgatcaggcgctggactgggctgacattgccattgaacaaaggcaaaagacccctgaaaacttcaggagctcgttcgcggcattcgtggcagacacggtgctggcatgggctgaagaacaggcggcaggcggtcacagtattgagccgtatttcagcaggacttttaccagcgttcgcgaaaaatggcggcttcatgaagagattaacgccaaatggttcaaattcgccgggctttacctgctacgcgatgacaagggaaagccccgcgcctctgcgattaatgatgtggaggtattgcaggaggctgacagcctgctggcgcaggcacatgcctttgacagtaacgccggggttaaaactgcacgcgagcgcatcacggcgcgtatccgggcattaaccgcagcgtaa

SEQ ID NO: 179973 - DNA, 993 bp, Klebsiella oxytoca
atgttattgaccccaaaagctgaagcgctgatccgcaaatatgttgcgggcctggcgacttcttatggtgtaccggatacctcgcgtttttttgctctgacagatccgcgtgatatccagctgcgcaatgcgctgctgcagcaatctgaatttttgcagttaatcaatgcccagaccgtcgagcaggtacaggggcaggtggtcgccaccggtaaccccgggctgtttactggccgtaaaaaagatggccgtttctcccgcaaaatgggaaatagcggcaatgaatacaaacttgctgaaacggattcaggctcttatctggattacgccacgctggttacgtgggcgaatgcaggctctgaagatgagtttttccagcgcattcaggcgttcagcaatgagtctttcgccctcgatattctgcgtatcgcgtttaacggtacccacgttgccgaagataccgacccggatctttacccgctgggcgaagacatcaaccgtggctggcataccatcgtcaaagagcgcagccctgaacagattgtaaccggcaatgtaaccattggcggggcaaatgccgatttcatgggccttgatgcggcggttaccgaccttattcataccaacattttcgagcctttccgccaggatccgcgcctggttgtgctggtatcagctgaccttatcggtggcgatgcaaccagcatgatgaaccgcatcgaccggccaacggagaaagtggcggcacagctgattaaccgcgaaattgccggacgcaaagtatacagcccgccattcatgccggaagggcgtctgattgtgaccacgctttcaaacctgcacctgtatacccagcgaggaacaggccagcgtaaagccgagtgggtggatgatcgcaagcggtttgagaataactatctgcgcatggaaggctacgccgtcgaacatgatgagctgtacgcgggttacgacaaaatctccatgcaggagtag

SEQ ID NO: 179974 - DNA, 1074 bp, Klebsiella oxytoca
atgccgcaaaccaatatcacaacagactggatttgtattgccacctccgggcaaaccgttgatggtcgtatcatcgagcctcagtggttgcacgatgcggctgatacttacagccgtaacacctacacggctatgatttggccgcatcatccccagtttgaactcggcgaacgtgaattcacctgtaacctgggcgaagttgacgcgctgaaagtcgaagaggttgagggtaaaacaaaactctacgcgaaattaatccctaaccagtttctgatcgaagccaaccgaatggggcagaagttatttacttctgctgaattctgggaggatttcggcgggagcggacgggaatatttatttggtcttgccgtgacggatattcccgccagcctcggaactgaaaaaatcacacttgtatttgacggtgaacaatataacgccgcgcgcgggaatattgagacattcagcctggggaaaatgaaaaataacaagccgtccgtgtgggggcggctattttcaacccgcaaaaataaagtctttgcggcagatgacacccaacagcccccgcagggcgaggatgaaaacaagatggaagaattacgcgatcttattgaaaaaatgctcacgcgcattaaggcactggaagacgctgccaccggtaccactaccgatagccaggatgaagccgctgcagaggtgggggatctggcggaagaaatcgctgaggtggccgatgaagtggccgcgctggctgatgatgtagccgagaacccggaagacgaagttctggcggaagagttcagcgccgctaaagccaaaatggccgcattaacccgacggttcaacgcccagggctccactgacaaaggatcgcgccgcgccagccgtcgtaagggtaaacgcaccacgaatctggccgcgcaaaacaaagacagcaacgatgccgggctggctgagctgaaaagcgacatgaacgaaatcctgaaaaagttcaacgcgcttgagaatcagcccgcaacccgtttgccgggaaaagcgccaggcggctcaaaagcaccgtttgagtttctttaa

SEQ ID NO: 179975 - DNA, 1806 bp, Klebsiella oxytoca
atggcaaaatattccgacgaaacaaaagacgccgcacgcgccctttttattaagcgctggacgccgaaagatatagcgcgggaattatccattcctgagcgcactatttaccattggtctgataaagggcagtgggcatccctgatgccgctggaatcggtggaagagtcactggcgcggcgtattgatcagctgtcacgccgtgaaaagaaaacagcgcttgaactggaagaaatgcgcgacctggtggcgcagcacgtcaagctgatggcccagcgcaacaagcacgccgaaaaaatggcagaaattcaggcgcgcaatgtggcgaccttccacggcggaggggcggaaggtgaaccgggcgacggtggcaagcgacgttataagaaaaatgatgtgtcaggtattacggcggaaatgctggatgccaccgcccgcgaacacctgtttgattatcagctgcattgtcgggccaataaggaacaggatttccgctttctgctgaaaagtcgtcaggtcggcttcacctattattgtgcatgggaagccttcgaggatgctgtgttaaccggtgacaatcaggttttcttctcagcgtcccgcaatcaggctgaaattttccgtgaatacattgtccagatagcacaaaaacattttggtgtgacgctgaccggaaaagatattcgcctgagcaacggcgcggttttgcgctttctgtccaccaatgccaacacctcgcagggcttcaacggccacctgtatggcgacgaggttttctggatcccgaaattcacccggctgcatgaagtcgcttccgcaatggcgacgcataacaaatttcgcaccacctatctttcaacacccagcgccaaaacacaccaggcatacccggtatggacgggcgacgcctggcggggtgatgacccgaaacgcaaagccgtggtcttcccgaaggtcagcgaactgcgcgacggcgggcgactatgcccggacgggatctggcgctacatcatcacgatggaagatgctatcgcgggcggtctgggggtgctggtcgatatcgagcgactgcgtaataaatacagcaccaccgcgttcgccatgctctacatgtgcgaattcgtcgacagcaaagacgccgttttcaaattctcagatctcagccgctgcgaagttgaagcgggtatctggcaggattttgaccccactgctgcgcgcccgtttggtaaccgtgaggtctggggcggctttgatccgtcccgttccggcgacaactccacgtttgtgattgtggccccgccaatgtatgaagctgagcgtttcagggtactggcggtttaccactggcagggacttaacttcagctggcaggccgaacagatcaagcagctgatgcgacgctacaacatgacttatgtcggcattgatgtaaccggcattggtcgcggtgtgtatgacctggtaaccaaatttgcaccacgggaagccacgccaattttgtacagcgtggaaagtaaatcacgcctcgtgctcaagatgatcgataccgtggagcgccagcgcatcgaatggagcaaagacgcccaggatgaggtcagcaaagaacgcgcagagattatccccagttttatggcgatacgccgcaccactaccgccagcggtaacgcaatgacgtttgtcgccgaacgctcggaaacaaccggccatgctgatgtgttctttgccatcgcgcacgcggtgataaacgagccccttgattatgaatatgaacgccccagcacctgggcctttggaaaagccgcatga

SEQ ID NO: 179976 - DNA, 1065 bp, Klebsiella oxytoca
atgaaaaagaaccgacgcattcaacaccagaagcgccagcagccgggcgcagacaagaaattcaccccggcaccggggcgcggtagtgtgatcactttcggggagcctgagccgatactgacgaccggcaccgattatcacaatatctggtacgacaatgagagcgatcactggcgcttacctatcgaccgcctggcactttcgcaacttcccaacctcaacggccagcacggtggcgttctttatgcccgccgcaacatgattgtcagcggctatctgggcggcgggctgtcaaccgatgaactggaagcggcaatgtttgattatctgctgttcggcgacgtgcccttactcaaagtcaggaatgttttcggcaaggtgattgacctgatgcccctgccgtcgctgtacctgcgccgccgtaaaaatgatgatttcgtgattctgcaggagggtgagccgctgatttactcacccgaagatattatttttctcaaaatgtacgatccacgccagcaggtttatggcctgccggactatatcgggggtatccattccgtgttacttaacagtgaagcgactattttccgccgtcgctactaccacaacggcgcgcatatgggttttattctttatgctaatgatcccaatatcaccagtgaggtagaacaggagattaaggaaaaaattgagcagtcaaaaggcgttggcaacttcacaaacatgtttatcagcatcccgaaaggtaacccggagggggtgaaactcatcccaatcggtgaagtttctgcaaaggacgaatttgccaacgtaaaaagcatcaccgcccaggacattctcaccgctcatcgcttcccggcgggcctggcggggatcattccgacgaacggcgcggtaatgggtaacccggaaacagcgcggacaacctacggcaaagatgaagtgataccgctgcagcgcaaaatcatgaccgccatcaccagcgacccggagatccccgaacatctgcatttaaaatttgacctgaaagagcccggcaacgataacggacagggcgaaaaatga

SEQ ID NO: 179977 - DNA, 327 bp, Klebsiella oxytoca
atgagcgtaattaagttaaaatcccctccattgttatcaatggcgtgcgggatggtgaacatgcgagtttttaaaattaaatgcccggaatgcggctcaccggccatcattcgtaaatctgactggaaagataaaaaactggctgatttgtattgcgcgtgcactgaggttgaatgcggtcatacctttgtttttaatgcccagttttctcatactttgagccccagcggattgacgggcaataagctggttaaattcctgattgaccggctgaagccagaagaaaagcaattcgccctggatttactcagtagtcagactgcataa

SEQ ID NO: 179978 - DNA, 411 bp, Klebsiella oxytoca
atgttttatccaattgcaattgaagctggagacgacaagcacgcgtatggcgtaaccgttcccgatttgccgggatgtttttccgctggtgatacactcgatgaggcgatcatcaacgcaaaagaagctattaccgggcatatcgaattattagttgagctgggccaggatattccaccggtttcaactgtaggcgctctgaataacgatccagattatgctggttatacatgggcggttgttgatgttgatgttacccgtttgctgggggggtcagaaaagattaacgtcacacttcccaaatcgttaattgaccgcattgatcgctgtgttgccactcatcccgaatttaaaagccgttcggggtttcttgctcaggctgcgctggagcgtataacatccaagcgatag

SEQ ID NO: 179979 - DNA, 2625 bp, Klebsiella oxytoca
atgacagagatccggggccgttgtgcaccttcaccgcctccaccgtatccgggtagcgcgccagatgctacccgttacgattacgaatggcagaagccaaaagcagccatttttgttgataagactcccgctgttgatctcgttgaactgggtcaagagcaggagtttttcgcgtgggtaaaactcacgctttcgccgcttcctcgtttcattcgtctgcgcctggcatcccgcattgacagtattcacaccatgaagggcaggcacattgcccgtctggcgctgcgcgatatcatccgaagagatcttcctcccatcaacatggtgaaggaacaatatgctattgcgataagcgatgaggccaaatctcaggcggaaacagcattcaaggggttaaacccgctttaccacacgttcagtacccttcatggtctggtcgagcgctttaaccatctgccggactttacaccagaagagattgagttactggcgcaggacattgctatctatatgcggtctgtgttgagtgaagttcatgaaacggtagagacacaaagtgatcgtcgatatgccggatatgtctacaccgaagcggctgtcctcgcgcggcttttttttctgacgccgccgagctgggggaaatattgccggggcaagctgtttattgatgaagccactaccggtatcagcaagatgctggatgatcgctactggcaccgtaatttaaagaaatacgccacgcgctggcgtgaacacctgcatattgcttttggtgatgtgaagcggggcgctgccccctattgcagtaagcaccacgttgatgaatgggacgccaggcgtaaacgcagccgtgcaatcatggcgcgccttgagctggaagaccaggataccaaagaacgaatttcactcattgagcaaatcgacaaaagcatttccaaccctgctttgcgccgcgttgagctcatgacccgtatcggcggctttgagaaagtcgccactgaaagcggctatgcaggccagttttttaccctgacagcgccatccaaataccacgcctataccgtgttcggtcatcgtaatgccaaatggaacggtgccagccccagagcaacgcagcgctaccttaatcgggtatggcaacagatccgggccgagctggcccgccgtgaaattcctgtctttggtctgcgggtggcagagtctcatcacgatgggacgccgcactggcatggccttttgtttactttgccggaacattccgccgagttgctggaagtgatggaggactacgctacccgtgaggactcggaagagttacagggcaagcatggcaaccagccgcgttttgatatgaagccaatcgatcaggaaatcggcagcgccaccggctatgtagtgaagtacatcagtaagaatattgatggttatgcgcttgacggtgaaaccgacgacgaaagcggcagaccgctgaaagaaacctcaaggcacgctaccgcctgggcatcttgctggggcatccgtcagtttcagtttctgggcggcgcgccggtatctgtctggcgtgagctgcgccggttccgaaatcaggagcaggccgacaagataaacccactttttgccgagctgcaccgcgctgcggatgctggcgactggcagcaatacacccagttacaggggggcgcgctggttgcccgtcgcgatctgcctttgcgtatctggtaccagcagaaagaagagccgaatgattacggtgaatatctggatcttatcaaaggtcttgtgatgccggccgttcgcattccgccaattgaaacccgcctgcatacctaccgcatcgtgcgtaagaaaccggaaattttcgacgactccgggcaggccgttgattttgattttgaccttcggggcgcgtctgcgccctctaggactcgtgtcattaactgtactgaggttaaaaaacatacagattgcgggggggataaatcgcccccggatgagcctgaacagtatgaaatcggacaaatgacccgtgaacagaaaaaacggttcaacgaaaccctgagaaactacaaaccggaacggcaaaaatcacctgcagatgtttttgagtcccttgccagtgccattacctcttcagattttgatgaagttgatcaggcgcgcgctgaaagttatatgaaagtggcagcggctatccgcaaagaatcaccagcccgtaaaaacagtaccgcccagcctttaccattgacggaaccgcttaaatatcagctttctgcctggggcataaaatcggaacttgatatccatgctttgcgttgcggtgcggcgctgtgttttggtaatcagttgatctatctgaaagggggttatctggcagaaaaagccagagcatcttattgcagggcgaagcattgtaatgctgagttaaccctggatgataaagcctacggtaatgagggattatgtctcgcgtgtacggctaaattgatcggcgcgggggctatcgaacagcgcagaattgaagctgaacagaagcataaggctgaaaggcgactggaaaacgatgcacttctgagcaggcttaaggttgcgcttatcattcaaggccgaaacaggaaaggagcgtga

SEQ ID NO: 179980 - DNA, 966 bp, Klebsiella oxytoca
atgattcgttcgcttgttaaatggcctggcggcaaaagccgtgtgattcccgatctgcgtcgggttctgccaaaagctgattgccttgttgagccttttgttgggggcgcttcggttttcctcaataccgattatcggcgctatattttgggcgatatcaacccggacttaatcaatctctatcgccaggttatgcgctggcctgacgcggtgatcgatgctgcccgcccattattcaaggtgtacggcgacaaagaaggctataagtggatccgggatgatttcaacgcccgcgcccgtgattatttttcatcgcgtgatgtttttgataatggccccgatgtcggaaaggtgctgcgcgcagcccagtttctttatctgaatcgccacggatataacggcgttgtacgttataaccgcaagggcggatacaacgttccatttggtaagcacaaaaccccgccttatttcccggaagaacagatccgtttgttctctgaaaaagcgaacgacacaaaagctattttcctgtgctgcccgtttcagagcacactgaaagttatggtcggtagtgatgccgttatttactgcgatccgccatatatcccaacaagcgaaacagccaactttacccagtaccacaccgcgccattcggcgagaaagagcaccgcaagttagctgccgctttgctggatgccaaccgccagacgggtgcgccggtaatcctctccaatagcgataccccgaccacacgcgagatctatcgcgggttcatgttccaggaaatcagtgtcacccgctctgtaagcgcaaaggccgatacaaggggaacagccgaagaagtgatcggcgttctcaaggtctgcgccggttgtggccgtgccggtggtgggcgttgtcctgattgcggcccggtaggtgatatgacttacaaaaacatgtttgtgactaattgctctttatga

SEQ ID NO: 179981 - DNA, 390 bp, Klebsiella oxytoca
atgttgatggatgtaaccggtagacaacctggacgccgccagtttttagaacagcgggcccggctgcaggccagtttaaatgctgcccgagtaaacgacacggcaacgcgctttaaccgccttgatgaaacacgccgtaaagtcgtgttcatccttgcaaatgacgcggccagccgcgtagctggtctgccgcaacttacccgtcaccatcttaatttagcttatgaggatctgagcgaagcggagcaaaccagcctgatgatgggcatcaaacacctttcggagttcgcagcatcaatgccctgggaattcgaagacttcgccgcgccacgtgcagaaaaacaggcgcaacgcgataagccgccagagccagaaaaaccaaccgactaa

SEQ ID NO: 179982 - DNA, 231 bp, Klebsiella oxytoca
gtgagcatgacaacactcactgactgcccatcactcgccagcctgcttacccacggccagcaaatcacacaccgacaacaccaacgcggctggattgaaaccccggatggtcgtttctttcagccaaaagctaccgatgtgcaatttgttaaaaattgtcgctttccgtttatgtcgcgcccgcgcaataagcgccgctggtttgcccgtttaatgggcatcttcgcttaa

SEQ ID NO: 179983 - DNA, 363 bp, Klebsiella oxytoca
atgtgtgtagaaaatcattttgggaatcctaagtttcccgttgatatcccggccattgccgcggcagcggcgaagcaccacgtggcgctggaaatcaataactcatcctttgtttcgtcgcgcattggcagcgaagataactgccgtgccgttgccgcggccgtacgcgatgccggcggctgggttgcgctgggttcggattcccatacggcattcacgcttggtgaatttagcgaatgtcgcaaaatcctcgatgctgttgattttccggaagagcgaattcttaacgtgacgccgcggcgtctgcttaattttcttgaatcgcgtgggatgcctgcgattcctgagtttgctgaactttaa

SEQ ID NO: 179984 - DNA, 1464 bp, Klebsiella oxytoca
atggaacatatgctattaacagcgaacgccacgctgccagcttacgatcgcaacggtcttattccgcgcatcgttcatttgggctttggcgcatttcatcgcgctcaccaggcggtatatgccgatattctggcgacagaacacggcagcgactggggctatacagaagtgaacctgatcggtggcgagcagcaaatcgccgatctgcaacagcaggatttactttacaccgtcgccgaaatgtcggcggatgcctggaccgcccgcattgttggcgtggtcaaagaggcgatgcatgcccaggtcgatggtctggaaagcgtgctggcaaaaatgtgcgagcctcaggtcgctattgtgtcattgaccattaccgaaaaaggctactgccactcgccggccagcggtgaactgcagttagatcacccgttgattgttgccgatttgcaaaaccctcatcaaccgaaatccgcgccgggcgtggtggtagaagcgctggcacgccgcaaggcggcaggtctgccggctttcagcgtgatgtcctgcgacaatatgccggaaaacggtcacgtcatgcgtaatgtcgtctgcgcctatgctcgcgccgtcgatgccgaattagccgagtggattgcgcgcagtgtcactttcccttctaccatggttgaccgcatcgtaccggcggtgacggccgaaacgctggagaaaattgaacagctcaccggcgttcgcgacccggccggcgtcgcctgcgaaccgtttcgtcagtgggtcattgaagacaactttgtcgccggtcgtccgcagtgggaaaaagccggcgctgagctggtgtcggacgtgctgccctttgaagagatgaagctgcgcatgctgaacggcagccactcgtttcttgcctggctgggctatctggcgggataccagcatattaatgactgtatgcaggacgaaaactaccgtcgcgccgcgcgtgcgctgatgctggaggagcaggcgccgacgctgaacgtgcagggtgtggatctggcacgctatgccggtctgctgatcgagcgctatagcaacccggcgctgaagcaccgcacctggcagatagcgatggacggcagtcagaaactgccgcagcggatgctggattcgattcgctggcacctggcgcatggcggcgactttacgctgttggcaatgggcgtcgcggcctggatgcgctatgtcagcggggtggatgaccaggggcaggcgattgaaatctccgatcctttactgccggtaattgcgcaaaccgtacagaatagcgcagacggcgaagaacgcgtgcgcgcgctgctgggtattgaggctattttcggtgccagcctgccccaggagagccgtttcgtgaacgcggtggttcgcgcttatttatccctgcagcggcacggcgcaaaagcgaccgtagcggcctgggctcaggcaaactaa

SEQ ID NO: 179985 - DNA, 153 bp, Klebsiella oxytoca
atgcccactttccatgagcaacgctcgctgtccgaacgtctgtacgaggctcagggaatcaacacccaacagctgttagggcactcatcggaaaaaatgaccgcgcagtatcataacgatcgaggtctcgactgggtgaaagtgaaggtgtag

SEQ ID NO: 179986 - DNA, 918 bp, Klebsiella oxytoca
ttggaatttatattcgcattttggaattgcgcgatttcgccaccaggtattaaggagatgcgtgcgcctgccaacatggctgatgcggttgaagttattgtggatttatttaccagcaaaaaaataatgtttttagctttatgtgaggtaaataaggactcatttaatcatatatccagcgagcttggtaaacttgggttatcactttcagctcagtttttaccagacagaacattaactggagcagagtttgatgtcggttatatttatgaatcaggtgaaattagcgttatacaaggtatggcacataccgctagactaggaacatctatagtaaaagttgctcaacaattgattattgttattaatggggatgcttcctctgtcataaatatttttgtctcgcattggccaagtcaactccgtaaaattgcggatgactttagagacgaatgttctaaaggtttaagacgttatatcgagcgtttcattgagggggggcaactggttatattaatgggggattataatgatgaaccatattcacaaagtttgttcaaaaacatacgcgcaacaaacgatagagccttagtactttcagagcctaatttttggttatataacccgtactggaaggctcttgctgctagaatgccattcactatagatgagcaacaacatgactttgggacgtgttatagcaaatcaggtaatcgcaatcactggtctacgttcgatcagatcattttttcaggccattttctccattgtgggccatggtatcttaaagagtcttctacgggagtagttttgactgacaaactacgtgttgccataatggatagcaagcattattttgaccacatgccggttattggatgtatatgtaaaagagaggttaaaaatgtttcagtttaa

SEQ ID NO: 179987 - DNA, 492 bp, Klebsiella oxytoca
atgtttcagtttaaagaacttatcaaaactggtatgggcgaagcgaatagagttgagaaaaaccgcgagagcgtcgataaggttttttcctcgttaaatagtgagctggctgatgaaactgacggcctgtttaccattgaacgctacatacaaaaacctagtgcatttgcagaaatagcaaaaacttatgccattataaatcagagtgctcctccacttgtctcattagatagtaaaggttctactggaacattaaagatagttctaagcagtggtgggaatgcctctattgcccgttgggagcaagatcctgatgggtaccctttcacaattgaatttatgggtgaacgaacagactgctgggatcaggaagggttggtcaatgcgttaggaaaaattgttgtttctggacaactatggttaaaagttaaagaactacaatcaaaagccttaaaggcttcagagcaaaataataccgaaaaaaatgattag

SEQ ID NO: 179988 - DNA, 165 bp, Klebsiella oxytoca
atgggtatgaaattgatttttgaatcagcgctggctctggtcgcttcagtcattgacagcgtaactgcatatcttaatgccgcatgtgggattgcagatctcaaatggatagcggctatcgataatgatagccgcaatatgattatgctgtcaggcttgacataa

SEQ ID NO: 179989 - DNA, 1101 bp, Klebsiella oxytoca
atgcgaacagctcttgcaatgctaacattaataatacccgcatatgctaatgcagatacttgcgaaagtattatcgggttatcaaaaatcacccacataacggttcgagatcaaaactctattgagcaaaatgcagattatttctgcaaagaatatagcaaaggcacatcggtatccaataattctaaatttggtgccagttacagcgttctttcagctagtttcggaagttcgaatgctacagtaattcaagtagctagcagatattgctcagcagaaagtaactactcagaaagtcaagacgcctacaaacaatatatagaatccattgcgccaggtgcatatgatgcctacaaacaatgcaccgaagcaaaaaacaacatgacatataatgtagatagtatcctgccatcagaattttcaatgtctgtaggtttcgcatcgccaggctctcatgataagtcagcttcaattgcctattctgcatctaacggtgtttcatgtaagtggaatgactcagagaccaaatctatagttattccaacaggatctacagctattcttgagtgcagcagaaacgaacaaagtaaaaaagcttttgttaaaattgtaagaacagattcaacggtgccccctcctttaaccctatcttggcaggcatatgataatcaagacaatcctatagatgctctaacaacaatcgatgatcgtttaaaaaacctagaaatggagttgacaagactacaacaaaacagtgttgttggttttatgtcagatacctgtccttctggatggatacctgtgctaaacgcacagggcagattccttagaggtatagatagttcaggatctacaaaaatcgacccggcaggaatacgtatcccaggaagtatccaagaggatatgatcgcaaaacatacgcatacttatcaatccgggtttcattctggtgaatcaaataatgggacaggggctgaccctaacaagaaaaatgcggtattaactagtacagatgagggtaaatcaaaggatggagaattaggtcctgaaactaggccgaagaacatggccgttctattctgtaccaaagagagaaggtaa

SEQ ID NO: 179990 - DNA, 129 bp, Klebsiella oxytoca
atggctaatatatttcttctggtgtttgcggtttttttactgctggtctcactgatttctgggttttcgtattttcaagacagaaaaaagcaaaagttgagttttaaaagcaaacgtatgaagttctaa

SEQ ID NO: 179991 - DNA, 1455 bp, Klebsiella oxytoca
atgaacaattctaataataccattgacgttaaattagcatttcctctgcggaagggagtaattactttattatttggaataatactctggtttattccgccaccgtcaggtctttctgctaatgcatggcatatgtttgcaatatttgcgaccactatctttgcgattatcctgaaagtcatgccgatgggggcagtcactatgattgcgctcatcttttctgcacttaccggcgttactccgctttcagcaaagggggagacggtcggtgcgctttctggttttgctaatgcgacgatctggttgattggtatagcaatgtttatttcgcgtgctgttattaaaaccggactcggaaggcgcgttgctctatggtttatctctaaatgtggctcgaacatgcttggtgtggcctatggtctcgcgctctccgatctcgtacttggcccaggtatcccctccgcgtcggcccgcgggggtggaattatgtatcccattactcagtctattgccactgcgtataattcagagccaggcgctacagcaagaagggccggggcttttctgatgatctgtgtgtcacaaatagatgccatcgtctgcacgatgttcctgaccgcaatggcgggaaacccgttaatcgctgagctggccagaagccagggtatagaaattagctggacgacctggtttgttggggcgatcgttcccggtattgcttcactgatcctcattcctttaaccatttactttatatacccgccacagttgaaaaaaacgccagaaattccaggcattgcccgagaagaattaaaaaaaatgggtcctatgtctttggctgaaaaaatcctggctttcgatttcatgttattgattcttctatggaccgtaggtgacattttcttttctattcccgcgacactttcggcctttattggtctggcaatacttctgctgtcaaacattatgtcatggaaaaatattatagaagagaaaacagcatgggatacaatgttctggtttgccgtactagtgatgatggcgaatgctctgaataagtatggaatgatatcatggatatcaaaagggattgtaggatatgtcagccattttgaatggctgaccgtattcttaatgctggtactcatttacttctatacccgctattttttcgcgtcagcaatggctcatatttctgcgatgtatctggcatttcttgccgtcgcaatttccgtcggtgcgccgccgctatttgcagctctcgtgctcggctatacttctaacctctctatggggttgactcagtattccggcggaccgggtccagcactgtttggctcaggttacaactcaaccgggcaatggtggggagtgagttttgtggtttcgattgtatcgattctaatatggctgttacttggtggggcatggatgaaggctatcggatattggtag

SEQ ID NO: 179992 - DNA, 180 bp, Klebsiella oxytoca
atgcacatcttcaataaggcggcctgcgggctgcctcttttactgtcgctgatgtccaccaacggctgggcaacgacgctttctgaggccctgtcggcggcggaaaactactccgccgagctctccgccaacgatcatcaggttaacgctttgaagaatatggcggattctgcgatgtag

SEQ ID NO: 179993 - DNA, 1470 bp, Klebsiella oxytoca
atgaagcttaaatctgctcttacccttgtggcgctggccgtcgcccttgccgccgcgggcggctactggctgggttcgcgaagcgcgccgatgccctccgctggcggcggccaggcggaaacgggtcgcaaagtgctgtactggtatgatccaatggcccccgctacgcgctttgataaaccgggtaaatcgccgtttatggatatggatctggtgccgcgtttcgccgatgaaggcgcgggagaagacgccgggggcgtgcagattagcgcccgccagcagcaaaaccttggcgtccgtacggcgaacgtctcccgccagacgctggcgctgaagctcaatgcttttgctaccgtggccattgatgagcggggcgttgaaacggtaccggcgctggccagcggtctgattgagaaactttacgtcaacgcctcccagcagtttgtgaaaaagaacgaggcgctggcggagctgtggatcccgcagtgggcggcggcgcagcaggagtatctggcggtgaggcggctgggcgatagcgggctgaccgccgcggcccgcgaccgcctgcggctgcagtttatgccggaagcggttatccgtagcgttgagcgcagcggtcaaccgcaaacccgcatgacggtgcgcgcgccgcacgatggatacgtcagcaagctggatgtgcgcaccggcgcgcaggtcacgacagcccaaccgctgttcgagctggccagcctcgatccggtctggatcgtgattgattacccgcaaagccaggccagcctgctgcgcgaaggcagtaaggtgacggccaccaccggcagctggcccggtatggcgtttcagggaaccgtcagcgaactgcttcccgacctcgaagccaccacccgtacgttgaaagcccgcgtagtgctgaataatccgcagcatcggctcaagccgggcatgtatttgaacgttgagctggctgaggcgcagcaggagagcgctgttctggctattccggaagaggcattaattgccaccggcaccagcaatcgggtgctgatcgccgacggcgaagggcatttccgtccggttgaggtgaccgcagggcgaacgcagaatggtctggttgagattaaatccggcctcgaagcgggccaaaaggtggtgacttccgggcagttcctgattgactccgaagccagcctgcgcagcgcgctgccgcaaatggccgggcaagaggaggaggcaaaaagctactcagcgcagggcgttattaaggccgtgagcgatgaggcggtaaccattgcgcaccagccggtaccggcgctgaaatggccggcaatgatcatggattttgctattacgccgcagctgcgggaacagatgcggcccggcgagtcggtgatgtttcacttcgtcctgaccgatgaaggggcgcgagtcacctcaatgatgccgctgaacggcgctaaggagcagccatga

SEQ ID NO: 179994 - DNA, 285 bp, Klebsiella oxytoca
atgacgccgcagcaggcggcggactcggtggtctgcgagctggaagacaaactgatgtcgcgctttggccgcgcgggcgacctttcggtggtgtgcatgaaccggcgcggcgaattcggcgccgccaccaatatcaaaaccttctcctttgtggtcgccagcgcgacgcagccgctgaccgtgttctgcgccgagcgcgttcgggagaaaacccattatcggccggtggacgacgaatggatgcaggcctatgccgcacgcattcgcgcccccatcgaggagtaa

SEQ ID NO: 179995 - DNA, 207 bp, Klebsiella oxytoca
atggcggtagtggttaatctggacaaattgctggtagagagaaaaatgacgtccagagcgctggcggcctatgtagggattaccgagcaaaacctgtctttgctcaaatcaggaaaggtgaaaggtatccgcttcgatacgctggcaaaaatctgccaggcgctggagtgccagccaggcgatattctcgcctgggaggcggattaa

SEQ ID NO: 179996 - DNA, 534 bp, Klebsiella oxytoca
gtgaaaaacgcacgaaacaaactcagtctgttcttactggctggaatattaccgctgttttttattctggcggtcattacgccagcgtggatctattttaccggcgagtcgtttttcctcgcaaatatgcttgagtttgccgaggttccgctcggtaatgaaagcggtctgacggcaccgacttttaaactgctggcgctgctggcgatactctatttacccgccgggcttttcgcctgggcgatctggcaggggatccgcgtcactcaatacgtcagaaaacgcaccattctgagcctcgacctggcgctgagggtaagaaaaatcgcgctggcgatgctggggatggggctcctgctgccgctgtttcgcttcctggtgccgctggttttttactggccgcatccttatacccagatcgttcttttacttagcgattttgtcctgctgctgaccggcggcttgttatttgtgacgtttcactccatgctcgaagggatcagagcggaaaatgagaataaggagtttatctga

SEQ ID NO: 179997 - DNA, 345 bp, Klebsiella oxytoca
atgaactggattaatatgctgtgggcgatattgaccctgctgtcagtggcggtctttatttccggaaacgggtttgcacggtacaaagtacgccttattaattatgttctcttcaccttcattgttatttatattgccgagtcattacaaaccatcgataacctgagtaaaacaggctacctgatgcgaatgttgacctggacaatacaggcggcgtttattgccatcggtctgtttagcgtctggcagcgcccgtggttccgcggcccgtcgcgacgggcggccggactacacgttgtcttatctctgctccttatgtcatgcttaggcgtgctggttctgtaa

SEQ ID NO: 179998 - DNA, 1104 bp, Klebsiella oxytoca
atgatcgggtatcgataccgcagtgactggcaaatcctgtgctcaggcctggcttttgtcgcggtgatggcggcaggcatttatttgcaacccggcttcagacccttgaccacccaggtatccggggacaaagcgctggttgcctttttaacgccgctgctcaaaggcgcgcacggtcacgtcgccgcagcgctcatcacgccaggcggcgtgcgctatggtatctggggcaatgattatgccaggcagtttgagattggcagcctcagcaaaaccctgaccgccagcctgctgattgatgccatccggcgcggcgaagtcacagccacgacgcaggtcggcgatctggtgccagagctcgtcggtccggcgcggaatattagccttgaggagctcgtctcgcatcgttcgggcctgcctccgttcgcctcatcgctcacgcagaaaatcgccatgcttaccgccattgtgagacgagaaaacccgtggagctacgatcgccaggagctggcggaaatgattagccgggcgcggataccgaaggtcaaaatatttgattactccaattccgggtttgccctgctggggctagcgctggaacgcgcctctcaccgtacattcgcggcgttgctggaacagcgcgtttttgcaccggccgggatgacccgttcgcttgtggcgcaagagacgacgccgcctgacgcggcatttatgccgggctggtcagcgtcaggtttacgcgaagcgccgtggatcttaaacgccttctcgcctgcggccggcgtacgttccactattgtcgatatgacgaaatatgcccaggcgcttatggcaggaaaactggccggaagccagggcatggcgccgcggttcgcgaccgacgatcccgattcacgggtaggctattcatggttcaccaccgctatcaagggacgggatattatctggcacgatggtcagtccgcgggctatgccgccgtgatggcctttgaccccgagcgtaaaaccgccgtcgtgatcctctcagataccgcatggccggtaattgtgccggcaatcaaattgctgctttccacgctatccgacgttaaggaagaacgatga

SEQ ID NO: 179999 - DNA, 210 bp, Klebsiella oxytoca
atgagaacgcatggtgggatcatgccaccgtggtatgtagagtcgattaaccttcacgcctcccgtccgctatggcctggagcggacggggagcttatgggtaaacgtgaacgttctgccgccggcgacggtgccaggcccctgattcaggcgctcagcaccgacgggatccaaaccggcgttaatgcagtgccttcgctatcgcgctaa

SEQ ID NO: 180000 - DNA, 873 bp, Klebsiella oxytoca
atgcgtgtttacgttactggtaatattaccgtagatgaaacctggtccattccggatataccgaaaaaaggcgcgtccattcacggcattaaagtttcgcaggatatcggcggtaaaggcgcgaatcaggcgattatattatcccgctgcggaatcgacacgcgattaattgccgccacgggaaatgacagcaacggcgagtggatccgtcagcagataaaaaatgaaccactgacgctactacccgacggccatttcaatcaacatagcgacacctcgattattttaaatagcgctgatggcgacaatgccatcattaccacgacggctgcagccgatacgttcagccttgatgatattattccgcatatggcggaggccgccgcgggcgatattctgctacagcagggcaatttctccctggataaaacccgggcgctgttccagttcgccaaagcccgcggtatgacaacggtattcaacccctcgcctgtcaatcctgacttttgccatctgtggccgctcatcgacatcgcggtggtcaatgaatccgaggccgagcagcttaagccttacggcgcgaaaaccttagtggtaacccagggcgcggcaggcgcctggctggttcaggcgggtcagcgccagttttgccccgccgtccccgccgaggcgcttgacaccaccggcgctggcgacacgttcctcgcggtgatgctggcgtcctcgatcctgcgcggcgtcgcgccggataggctgtcgctggcgcacgccagccgcgctgccgccattaccgttagccgtcgggggacgctcagcgcgtttcccgacggccacgaactcaccgctctgttagccgtgaacggcgcgcgctga

SEQ ID NO: 180001 - DNA, 1311 bp, Klebsiella oxytoca
atgaaaatcagtgaatttttacacctggcgttaccagaggagcaatggctgccgatgatttctggcgtcttacgtcagttcggagatgaagagtgctatgtctatgagcgccaaccttgctggtacataggtagaggatgccaggcgcaactgcagattaatgccgacggcacccaggcgacattcattgatgatgccggagaacaaaagtgggcggtagattcgattaccgactgcgcgcgtcgttttatgacgcatccgcgggtgagaggatgccgggtatatggccaggttgggttcaactttgcggcccatgcgcggggaatggcctatgatgccggcgagtggccgctgctaacgttaaccgctccccgtgaagaacttatttttgagaaaggaaatgttaccgtttacgcggactccgccgacggatgccgccgtctgtgcgagtgggtaaaagaggtcgatacggcgacaccatgcgggccaatggttgtggataccgccctggacggtgaagcgtataaacagcaggttgcgcgcgccgtttcggcgatccgccgcggcgattacgttaaagtcatcgtctcacgcgcgattcctctgccggcgcgaattgatatgcccgctacgctgctatatggacgacaggccaacacgcccacccgtacgtttatgtttcgccagcaaggacgcgaggcgctgggttttagtccggaattggtgatgtcggtgacgggaaagaaagtggtcactgaaccgctggcgggcacccgcgatcgcatgggcgatacggcgcataatcaggcaaatgagagggagctgctgcacgacggtaaagaggtgcttgagcatatcctctcggtcaaagaagccattgccgaactggaggcggtttgccagcccggcagcgtggtggtcgaggatttgatgtcggttcgccagcgcggcagcgtccagcatctggggtctggcgtcagcggccagctcgcggaagataaggatgcctgggatgcgtttaccgtgctgtttccgtcaattaccgcgtcaggtatccctaaaaaagcggccctcaacgcgatcatgcaaattgaaaaaacgccgcgggagctctattcaggcgcaatcctgctgctggaagatacgcgcttcgatgcggcgttagtgctgcgttccgtgtttcaggatagccagcgctgctggatacaggcgggggcgggtatcatcgcgcaatctacgccggaacgcgaactgacggaaacccgtgagaaattagcgagcattgcgccctatttaaaggtgcccgcgtga

SEQ ID NO: 180002 - DNA, 1344 bp, Klebsiella oxytoca
atgagtcaaatcattcaccgcagcctccgtaccaccccggcagtggcagtcagcgcccagggcgcttacatcaccgatgccagtggtcaacgctatctggacgcctgcggcggggcggcggtttcttgtctgggtcatgcccacccggatgtgctggcggcgatgcaccggcagatcgatcggttggcctatgcccacaccagttttttcaccagcgatacggtggaacaactggcagagcagcttgtccgcaccgcgcccggttccctgaactatgcctatttcgtctccggcggatcggaagcggttgaaacggcgctgaagctggcgcgccagtattttgtggagatcgggcagccggatcgcacgctatttattgcccgtaaacaaagctaccacggcaatacgctgggtgcgctggccgttggcggtaacgagtggcgccgccgccagttcgcgccgctgctgatggatgtggtgcgcgtgtcggcctgtaatgagtaccgtgaccgtgaggcgggtgaaagccagcagcaatataccgagcgcttacttggcgaactcgaagcggcaattctggacgccgggccggaaaaaattatcggttttatcgccgaaacggtggttggcgcaaccactggcgcaatgccgcctacgccgggttatctgcaaggcgttcgtcggctgtgtgataaatacggcattctgtatatcgccgatgaggtgatgtgcggcatgggccgtaccggcacgttgcacgcctttgaacaggatggcgttgtccctgacatcgtgaccatcgcaaaaggtttaggcgggggttatcagcccattggcgcagtgctggccagtgagcaaatcgtcgccgcgctgcaagccggtagcggaatgttccagcatggtcacacctacatctgccacccgaccgccgcagcggctgcgctggccgtacagcaggttatcgagcgagatcgtttgctcgagcaggtgcagcagcagggcgcgtatttgcagcaggctctgcatgatgtgctcggcggattaccgtatgtcggtgatacgcgcggtcgcggtttgttcgccggcgtggagctggtatgcgataaagagcgcaaaacggcattcgatccgctgctgaagctgcacgccgctatcaaagcgcagtgtatggcccacgggctgctggtctatccgatgggcggaaccattgatggccagcggggcgatcatattctgattgcgccgccgtttattgtcagccggtcagaactcgatttcgtggtggataccctgcacaaggtcatcagcgaagagacgcataaactgatgagacgtcagccatga

SEQ ID NO: 180003 - DNA, 552 bp, Klebsiella oxytoca
atgaatcgtttacctgcgctgtcagaacagcagtggagcgatgaacaacgccagcttgcggaggagattatcaacgggccgcgcggcgcgctgctgccgccgtttgaaccgttgttgcgcagcccggaactgatggcccatgcgcagcgaatgggggagtatctgcgctaccgtagcgcgctggggcagcggttgtcggaactggccatcctgctgaccgcgcgtcactggtcgcagccggttgagtgggccattcatgcgccaatagcgagggaaaaagggatcccggcgcaggcggtgcaggcaatcaatgaatggcgtcaaccagagacgctggcggctgatgaatgggtggtttaccatttttgccagcagctgcatcagcataaaaaagtcagcgatgatatctggcaacaggcaatcggtctctggggggaaaagggcgttgtcgatctgattggcatcaacggttattacagctttctttcaatgatcatgaacggcgcgcagacgccagtacccgacaccagggattttattcttcccgcataa

SEQ ID NO: 180004 - DNA, 753 bp, Klebsiella oxytoca
atgtctgcattattgaaaaaattaaagattaccctggcactggttgcctgttcggcgagttttgccgtcatggcacaagataaattattagtcggtgtggataccgccttcgttccctttgaatttaagcaaggtaataaatatgttggttttgatatcgatttatgggaagccattgcaaagaaaatgaatgtcagctacgaattacgccctatggatttcggcggtttaattcctgggctgcaatcgcgtaatttagatgtggcaatggccgggatcaccattaccgatgcccgcaaacaggtcgttgatttcagcgacggttactacgatgcggatctcttaatggcggtgaagagcggtgataattccatcaccaaattcagcgagctggccggtaaaaaagtggggctgaagcagggcaccgccgcggccagttttatgaaatccaaatataaagccaactatgtcgaattccccaatattgataacgcctatctcgacctgcaggcaggcaacctggacgcggtggttcacgactccccgaacgtgctctactacgtgaaaaccgcaggtggcggtaaggtaaaatcgaccggggaaacggacagcattctgccgcagaaatacggttttgccctgcagaaaaacagcagcctgacgccgaaggtcgatgccgcgttaaacgcattacgcgcggatggcacctacgacaagatttatttcaaatggtttaacaagcaacctaaataa

SEQ ID NO: 180005 - DNA, 657 bp, Klebsiella oxytoca
atgaatttcgaaacgaaatatatatgggaatcgctgccgctattattacaggggctgcagctgacaatattgatctctatggtcggtttggcgggcggctttatcatcggtctgctggcaggaatctgtcgcgcactgggaggcggcatcgcgaaaacgttatcattaatttttgtcgagctgattcgcggtacgccaattatggtacaggtgatgtttatctattttgccttgccaatgattctgcctgttcgtatcgaccccatcacggccgcgatggtcaccattattattaactccggcgcgtatattgcggaaattacgcgcggcgcaattttgtccatcaatagaggatttaaagaagccagtctggcgatgggattatcgcagcgcgcaacgctatggcacgtgattatgccgctggccctgcgccgcatgatcccggcgttgggcaaccagtggattatcagcattaaagacacctcgctgttcattgttataggcgtcgcggaattaacgcgccaggggcaggagatcatcgccgggaacttccgtgcccttgaggtctggacagcggtagccctgatttatcttgtcgtcaccctgtgcctgagcttcctgctgaagcaactggagaaaaggatccatattttatga

SEQ ID NO: 180006 - DNA, 729 bp, Klebsiella oxytoca
atgagcatggttgaatttagcgcggtcgctaaacatttcggtaccacccaggtgctgcacgatatcaatctgaaaattgatgccggtgaagtggtcgtgattatcggtccttcaggttcaggtaaatcgacgctgctgcgttgtatcaacaagctggaagagatctcctccggcaccttgctggttgccggaatgcacctgaccgatcctcacgtcaacgagtgcgaaatccgccgcgaagcggggatggtattccagcagtttcatctgtttccgcatctgacggcgctggaaaatgtgatgtttgggcctatccgcgtacgcaaaatgagtcaagcggcagcccgtgaacaggcgctggcgctgctggaacgtgtcggcctgggcgaacgggccgagcactatccgtcggagctttcaggcggccagcagcagcgcgtggctatcgcccgcgcgctggcggtgaaaccgaaaatgatgctgtttgatgagccaacctctgcgctcgatccggagttgcgccatgaagtattaaaagtgatgcgttcactggcggatgaagggatgaccatgattatagtgacgcacgagattggctttgcacgcgatgtggcctctcgattgatttttatcgatggtggaaccattgctgaagatggcccacctgatatcctgctgaatgccagtagcaatccgcgcctgaaagaatttttacagcacgtttcctga

SEQ ID NO: 180007 - DNA, 1023 bp, Klebsiella oxytoca
atgaagaaaatcgacatcagtggttccccgtttgagattggcctgcgccttggcgagcttggccgtgaagcatggcatcagaaactgatgctcacgtcattgtggcaaacggtgatgaccctgcaggcatcccctgagacccggttaatgcgcaccgaggtgcagcggcattatccgctcatctggcaggagctggaggggttggcgcaggggctggaggctactgttgatcaggtctttgcctggaactgccgtggcgatctggtgcgctcaacgtcggatggctgtacgacggtggccggggtaaacgccgctggcgagcggattatcgcgcacaatgaagacggttttcctcagttacgggatgaatgcttgctggctaccattaccccgagtcgcggactgagctttacgagttttgcctatccggggtcgatttgcggccacacctttgcggtaaatgaaaaaggtatcgttaacacggtgaataacatccgtgcagtgcatcgtccgcagggattaccgcgtcagatcctggctcgcgcctcgctgaatgcgaacaccctcgacgaggccatcactatacttaccggccagccgcgatccggggcgtttcaccatacgctcgggcagctgggcgatgcgcggctgttcagcgttgaggccaccggtcaaggctgttccgttctacccctgacgacggtaaccgggcatgccaaccatctggtgcatgcggcactggctggcgttgagcagatcgttaccgacagttcagcgtcgcggcagttacgcctcgtgcagtggcgggaaacgcaacctccgtttgacgccgcggcggcaaaaaccattctctcagatacccatgacgcagaactgccaatttaccggctggctgccgacgatccggatgaggagaacaccctcgcaacggtagttttcaccctcgatgccaaccacgtcaggtggcaaattttcgacattaaccgcgacgatgctaaatttcagggagaagtgcgtgggtga

SEQ ID NO: 180008 - DNA, 741 bp, Klebsiella oxytoca
atgattacccttgctctggcttttactttctctattttttccgcaccaacctcagcaaatgcctcaccatcaaaaacttatcgtatcgctatttataggggagatgccgggtgcgcggggtgttcagaaatggtggtgaaatcgctcgtcggtactggcctgccgctgaacatcgcttatgtgggtgaaaaagaaacgctgaaagtgaatgagcaaacgcttaaaaaattcgatatctacattcaacccggcggcggtcaggatatagccggttcttatgacgtcattggtgatgatggcgctgaggctatccgtcaatttgtgaaaagcggcaaagattttattggcatttgcatgggggcgtatcttgccgataaagactggattgggctcattgatgctccccttgagtcagaagtgggaagacctggttcacgcgcctatgatgagggggattacaccttgcaagtgaaatggaataataaacaggaacctttttactatcaggatggcccctatctgaataacacaacctcaaatgctgggttccaggcgatagcgtattacgacaatggggatgtcgctatcgccagatataaatatggggaagggcatgtcatattatcaggccctcaccctgaagccgatgaaacatggatagatgcccgagttgcgggtaacaccaccgcggaaagtaaaatgaaacgcattttaagctatctgggcataaacaagcgctaa

SEQ ID NO: 180009 - DNA, 411 bp, Klebsiella oxytoca
atgtttgataatgacatcgaggaatgtcatgcaacgtttaatgcctcggaaagtatgagcccaactgacagggtcaggctgtatatcaaaacgctgttacctgatgcgccatcagcgcactggctgctctaccttgaactctggccgatggccgcgcgcgacggtgattatgctaatttggtccataatcaatcactccaatggatcaatatactcgaagaaatcatcgactccggaattaatgagggcgagttttcctcgataaacgcttcggtatccgccagacaaataaatgcattaatagatggatactcgagtatgctgatcctcgattattcaaaagaaaaaagaaccgcttttcttaatgaaatatatgagatttcttttaaaatccttggtaaatccttctga

SEQ ID NO: 180010 - DNA, 498 bp, Klebsiella oxytoca
atgcgtttttacatcaaggttgcggtcattctttttatggccacccgggttatacccgtcatggccaatggcaataatgtccagccggtttgtacagagaaaggtgccttatcagggaaagacagcaaccagtccgccctgattggcgcgtggaaaatggtcaaatttgaaaccgggactggtgaagaattgaaagagataccttacaccggacaacttattatcaccgatgccggaaccttgtctgcgcaagcaagcaatccggacaaaacagtacctgactccgcctatacggtaaacggttatgaagcactttatggtgatattaaaattgacgatgttgccgggcgtttcatcttaacggtgaattctgcacttgccagtggattaattggtcaaaaaatggagcgcgcttttcatttaacaggaaataaacttgaactgtcgcctgtcgataaaggtgaaggctggcgtgtgacctacgagcgctacagatag

SEQ ID NO: 180011 - DNA, 1182 bp, Klebsiella oxytoca
atgcagaaaatgaatgacacatttccctatatgccattaatggcttttgcgatgaccggatttatttgcatcatgacggaaactattccagcaggattattgccagaaatcagtaagggaatgaatatttcgctggctagcgcaggccagtgggtcaccgtctacgccctcgggtcattatttgccgctattccgttaactatcgttacccggtcgtggaatcggaaatatgtcttattaatgaccgtagcgggatgcttcatttttaataccattaccgcactttcatcaaatgtttacctgaccctgttagcgcgtttgggggccggggcggctgcgggactggcgtggagcctgctggcggggttttcacgccgaattgttgacccgcttcatcagggtcgggctatggcgatagccatggctgggacaccgctggcgctctcactaggcgttccgctgggaacctggcttgggcattatcttggctggcgcctgacgttcggtattatgtcagtactttcgctgttactaatgatatggatccgtatcagcgttccggactctgcggggcagcaaaaacatcaaaaaataccgttcaggaaagtactggcgacccccggggtcaggccggtcctcgcggtcgtactgacctggatgcttgcacacaatatcctttacacctatatcgcaccgttttcgtcattatcaggtatgggggcccatgttgacggtattttattaatttttggcctgtccgctctcgcgggtcttatctttaccggaaaaataattgatagccagttacgtaaaatggtactggcatcgctggctatattttctatcgtctcattattcctggggctgttctcttatacacccgccattcttattgtaggtagcgctgtatggggtgtgacatttggtggtgctgcaacgctgttgaataccgcacttgccgatgcggcggaagatggtgctgatgtagcgatctccatgacggtggtgagctggaacgcggcgattgccctgggggggattaccggaggaattatccttcagggacccggcgtcaatggtttgccttgggtcattctgatactggccctggtcagttttctgattgtaaaaatcaacagtgaatatgcattcccacaccccattcgggacgaagccgaatga

SEQ ID NO: 180012 - DNA, 285 bp, Klebsiella oxytoca
atgatgcagagcgggaaaaacaaaaggcactggctgaagctgctgacgctgataatgttgctgaccagttgcgcgggcaactcgccaaaatcaggcgtgaactcgcaaccagtgaaaccggccggatttccgcaaatgccgccagaaggcagacagccgccgaaaccgcaagtttgcttgccgacctgtacgaagaatcagaccgtcgcgcgggagaaatcgctaagtatgctgacgcagcagcaaacgccgggaacgtctgcgaacgcacatacgacgcggtaa

SEQ ID NO: 180013 - DNA, 279 bp, Klebsiella oxytoca
gtggggagaatctggaagcgatttattgaatcactttcgcctaaaaagctgggtgttctgctggctttggtggtggggttcacgctgggtgcgattaagttttgggactggtttaaatacagggtgggaattattacggcggctcttgcggtgctttctcttaatgaatgggcagtaattatcggcattttatgcactgtggtgacatgcttcgttaactggtattacgagcgcaaaaaatacctaatcgctttaagtgggggggcgcgtgggcaataa

SEQ ID NO: 180014 - DNA, 339 bp, Klebsiella oxytoca
atggagcctgcttactacgagattggtgttatcgcatctatcccagaccaggaattcacgtcatctctaaacggcgtagttttgaatatgcgcctgttcttcgcaacaaccacagaactgtggtggcttgaaatatccaacgcagacaggacggttacactgtcacaaatttgcttacgtccgggtgtctggcacggccttagcggaaaattgccgggctatgctggcgctggagcgattggtgttgctcgtcttagaccaaatgaaaaatttggagacgttaacgcctttgatggaggctttggccttttcttttacgacgaactggagagtgattaa

SEQ ID NO: 180015 - DNA, 639 bp, Klebsiella oxytoca
gtgaaaatcccctatacgaaggggattttttttggggtttttatggctgaaggtatggacgcggcgattagtgcgccacgcgataaacgggctgtgatggtgtttgaatcaggggtgacagtgtcacttagactcaagacacgcgaggaagtgtcggcaaaacgaaccattgctcaggggaagattgagacgggttataaaatatcggacggtgaggtagacgacccaaaggttgccagttttgaaggaatcatcaccggcactgatttgccttttgcgcctctgcatatgatttcagccatgaatcaggctcaggccattcaggccgcatacgatacgaaggaatttgtttcggtctatacatccttcatggcaatgcctcaatgccgcatcacatcgctttcaattgaagccgttccgaagaaaaacagctataccgtcaagctcaccgctcagaaagttgacacggtgacattccagcgttcacgcacaaaatcagcgcaagcaaaaaattctaagccggcagggaaggggaaaacctccgcaggtaaaaagagcgccaccacggtagacgcgaacaaagagccgcaaaaagtctatgcgctcgaaaaaatgcgccgtgtatttggaggggcataa

SEQ ID NO: 180016 - DNA, 246 bp, Klebsiella oxytoca
atgggattctttaagtttgaccaattgattacacctaaaattttagctgtagtctatttgttgctagtgattttttgcgttgtgatggcgctgaaaacaggaagtacaaatggaatgcaaatgctcggttgggtatttgctgctatcgtggcaagaattccttttgaattggttatggtttctttcaaaaacaatgagtacctgcgccggatttgtgaaacagcagaagctaaaaagagcgattaa

SEQ ID NO: 180017 - DNA, 1881 bp, Klebsiella oxytoca
atgacagaccagtcagccgatctcgtaacgaaaattgatgttattccagaccttgacgggctcaacagctttgatgctgcgattgataaggctatcgcaagggttaaccagcttgacgccgctatcaaacgcgtcaataacctgaagcctgcaagcccttacgcgcccagcagcgcatcaacagcgccgacagcagccactacagcagcaatcgcgacggtagccgctacaggcacgaatttgattgctcgtacacctctcgcggagactgtgcgccgcgagtctcagaaggtcgcacgtgcagccgttcagggcatgggtaacggtattggccttcctcttctgggcggtggcggttctggtggtggaggtctgctattgccgccgccgcgtgctggtggttttaacccgttcgatgcgtccaatttttccggcgatccgctaaataccaggaagaaacccgttgctgatgccgtacagagcgggatacgtaacccgtttggtgttgatactatgctggcaggtgccgggctaactgttggcattatggcggcgggtaatgcgcttgctgacagccttgattcaattcagcggcagcaggcgcagattgcgaggttgacgcagacaaccggagacgcaaaagaggcgttctttgcacttaatcaggccgcgagtgatgtgcgaagcgacagcggggcgtttatctcaacgtataccaatatggcgaccgccacgcagaaacttggaaagtctcaggaggagacaatccgggcaactcaggggctggtaggtgcattacagctaggtggcggcagtgctgaagcggtaaacgcagcgctttaccagatgggccaggcattttcttctgaccggttcggcggggatgagtttagatccttcatggaggccatcggtacaatggccccggaagtcgcgaaggctttcggtacggatgtaaaagggctacgggcaatgtctgaggccgggaaactgacggcagaaacgatgattaaagcctttgaaaaaatggcggcgagtaatgccgacctgcttaaaaaacagggctggacgtggggccagacaatgacagtcatgaaaaatgactggcaggcatttttagcgcaggcaaccatcggcggagagtggcaaaaattcactgattgggccgccaatactcttattcccttagccagaagcgcggaaaaagaggttgccgcgttctggtcaacactcgcagacgaaagcaaatcggctattctgataggtattcttggcgctgttggggcggcttttaccgcgttagctattccggtcatggctgctatatggcctttccttgcgattggtgctgctgtatgggttgtttatgaagcttttgtagaatggaaagcatggatgacgggtgaaacaggaacgatttttgatgggttatttggtagttttgatgaatttgaaaaaagatatcctaatatcatgaaacttctacgtgcattaaccggagcggtgaatgatgctgctaataatatggataaaagcaaccagaatgaatcacaaagtgacccggatagttttgggggcagggttaaaaaattaatgaatccattttatttagcaaacaatgctccagcaggaatgatgaattttctagatggcgttataggtttttttggcggagggaaccgcgcaacagatacagcaaacgtatcgccagcaggaaagggcggtgtaattgtgaacaacagcaacagcgggaaccatcaaacacagattattgttagcagtcccaaggaagccgcagaaacggtaaataatatggttgagccgggtacaatttcgggggatttgtctggtaacatagcagagtctaccggagcacgataa

SEQ ID NO: 180018 - DNA, 486 bp, Klebsiella oxytoca
atggacgactcaatcaaacacgttgaaatcaacgggcgtaaattctgcgttattcgaatgagcgcttttgatgccattcactttaatttgcgcgtggcggagattctcgccaaacacggtatcagccaggtagaaagtattctttctatgtcgtcgaagattttcggtgtgcttaaccgggaagaccacgacgaactgttgtttaccttactggcaaaatcccgcgctcaactggtcgataatggcgagtttctggatagctgggacgcagtgaataccaatttcaccgctaccaacattgccgatgtttatctggtagcgctggagtgcctgaagctctccattcttccggttacagcagggttaaaaaaaaatattggtctggatacagcgggaacgatgcagggagccatgcggcaactgttcagcgccttgctgaaaaccttgaccgaaccgtccgcacagaactcgtcatctggcgagtga

SEQ ID NO: 180019 - DNA, 423 bp, Klebsiella oxytoca
atgtatttaggcgtaatgtcctctaaagactggctgattaccgtaggcgttgtgccggtaattggtctggctaaagacagcaatatcacgctcgaaatgacggatgaccagattaccgtttcttccggcatcggcggcgactggtcttttatcgataatccgactgaagaagggtctttgaccttcgtcacgcagcgaaattccccggttaacacagctctttttctgatgcagaaaacgaagtctgtagtacccgtaacgctcaccaatacgcgcaatctgtcggtacaccgcatgggttacgcgatgtttgcccgtcagcctactgatggcgcaaataacggcgctggtgctcaaacactggaatggaaactcgttactggcgaggtggattcggtcattaatggagtgaatattacctga

SEQ ID NO: 180020 - DNA, 1359 bp, Klebsiella oxytoca
atggcgaatttaagtcggctttttagtgtaaaaattgggcgtcaaactactgccgctcaatatggcgtgtttggcgtcgggttaatcctcgcgccgggcgcggcatttttcggcaaaaaatttacagattacgaatccgcaaccatcgcggatttttccgatctctaccgggtctataccagcgctgatgatgccatttcggatggcgtatccggcgataatcttctggcggttcaggcgtatttctctcaaagtccgtcaccggatacgctggttgtcggcgatttctcagccgcttacagcaaaacgatgattgccctgacggggggtccggtttccggcgcaccgacaaccacaaaggccaccatcggctatgtgaaaggtacggaatatcgctacgccagttataacggtactacttgggccgggagcactggcgcagcggctgatatcgtagctgatgcaacgactgcaggtcagtttctggttgatggtcgcattgtctatctggaaggtgccgaagtcgtccatgctgactctacggcgctggattctggcgttagtgctgcgattgcagccatcaaaaaccagtacaacaagttctttatgtgcatgacgccgtcgcggaatctgtcgattcaaaaagctattgctgattgggtcgaatcgcagattgataaaatggcggtgtttatcgacgactacacgtcttccacctgggcgactgacaacattacgaaataccttttcgataagaatatggcgggttcgtttgccatttctacgaagctggaaaagaacttcctcgatgctgctatcgccgggcgttgtcttgtcatgcaaccgggctcagaaacgtgggcgctcaagacacttaacgccgttcaaagtgatggattcaccgaaaccgattaccagaaaattaaggcgctcaacggaaatacctttgaagactatggttccggcatcacagtaacttaccccggcacgtgtggcgacggagaagcgattgaagttgtgcgtttctgctactggcaggctgaccggatgcaaaaagaccttgccacgctgcatatcaaccgcaacaaagtgggtcatgacatgccgggatatgaactggtctgtaatcagatggaaagctcgctgaaggcgggtcagaccgctggcggcattatggaaaactttacggatgataacggagattatgtccgtggatttaccgtagtgcgtccgacgatgtcagaaatcagcgccgtacagcgtatcaaaggtgatgtgactatcaaattctctttctacctccgctacgccattaagcacgttgatgctgttggcacagcaatgacttacgggatttaa

SEQ ID NO: 180021 - DNA, 786 bp, Klebsiella oxytoca
atgactaattatacggtcaaattaatgaccgttgacggggaattatcatattctgattatcgcacagaaaaggcgacattcaccgctaacggtaacagcaaagatattttattcacgccatataattttcgggatccgtccgtagtcagttctgttgtgctggataatggcagcggaaccactatcaatattccggctgattttcggctggatgttggcgatgttgtcaaattcccgactggcacactcaaagagaacgatacgcaggccagaccaacaatcctgagcggtgctccctacgttgcaatggtacgggcaagacaggcaatgattgagttggtgggcgatagccccatttacgcacaacagaaaattcccgagtcaaaggatccgtttactgccgtccatcttctcacgtcatcgagagagccgcaggcattcgcaaagtcatgggatggtgattaccgcgtttatcattacaactgtgaagcaaaaattatcgtcatccggtcatcagatgacgctcaggcatttctggaaaactttttgaatcaggtcgattcgactgaaggtgatttctggcagttcgaaaataactgctgtattgaccgctcgggggatttcgagaatagctcccctctaattgataacctcgtttaccagcagatggcacaggtaacgctgtctttgacatttgtgtaccagcattacaaacgagagagttggattgaaagcgcgacggtcacaccgtgcgataaagtcactctcgctatcaggggctattaa

SEQ ID NO: 180022 - DNA, 354 bp, Klebsiella oxytoca
atgagacgattaattaattactggcgcccattaccgattgagatagttggcggtatgccacgcgagggatattcagagcaacaatccgctttcctcagtatgcagccggttgatggtggcggttcatttcgggcgtacctaaccgggcgcaaaccacaagattacatggaagccattggcgaaacggatttagaggttacagaagagggtaagcataacggagctatagtcctgtgtgcgggtaaatattacgaagtggtgcagcggcaggagtggcaaaacggcgttattaaccactatgaatatttgctatttggtatgaaagaacgggacgcgctcgcgctggtgggataa

SEQ ID NO: 180023 - DNA, 474 bp, Klebsiella oxytoca
atgcgtggcggagctaagttcgaaacaaagggatttgaccgcgtaatccgtcagcgcgtgaatgcgctggcgggcgtcaagcttaccgttggtattcacagagggaaaatgaatcagggcgtcgatgttgcgctgtatggagcatggaataacttcggcacaaaaaacgctatgggatgggagttaataccagagcgtccgtttatgcgatttgcggcagacagaatagctgaatggatgcgcacagacgcttacaaagaggttctgcgtgatgttgcacgaggtcgtattactccgcaacaggctattgcccgcataggtgcgcaggctgttttgattaccagaaaaacaatcgctgattccgcgctataccgccctaactcagatatcaccatcgcccgcaagggttcaacaaagccgcttattcatagcggtacgcttattcagacagtcaattacagggcttttgcatga

SEQ ID NO: 180024 - DNA, 198 bp, Klebsiella oxytoca
atgacagtagttcttacagctaaacagattgaagacctcgccgactttgcgaaaaaggatggtcagccacaatacaccatcactactggcacaatccctgagtttgaagctgaagacggtagcactatcccggagtatcacgggttgattgcatactcagattcgcttgaacatggggttttgcagctcgacgactga

SEQ ID NO: 180025 - DNA, 360 bp, Klebsiella oxytoca
atgacggtaaatgactggctcgccattctgctaccgggggtaacacttgatgagggcgctattagcgccctttcttctcaatgtgagcggctttacgacctgcgggccgctgcggagtacggttacgacattgagcgtctgaaagcgctgtatgttgctgccaatctcgccccaatagcagtagaaggcataagcgcaagtgttcgcggtgttgcaagtcgccgggaagggaaagtagcggtgacattcacagaagccgcgcaaaagtctggctggcagggtacgcagtgggggcaggaatttttagacgcaatgggggatttgacagacggttgtatccttatcggtcacgcatcatag

SEQ ID NO: 180026 - DNA, 255 bp, Klebsiella oxytoca
atggctgagaaagataaagtttttctgactaacaccactcaggcaccgattcacatcggtgcaaaaaacagtgaaggcaccgttattactatctcaatcgctccgctggcagcggtcgaggtggacggcgcaacactgaccatcggcggcgttaagcagtttctggacgaaggccgattaaaagaagtttcagccgctgaagccaaaaagctcaataaagagcatgacggcgtagttgattctgacgacgagtaa

SEQ ID NO: 180027 - DNA, 939 bp, Klebsiella oxytoca
atgaatgagaaatatttagccgcgcttatggcgcagctttttaccgaagctcaggtagctggcgcggtgccgggtatcaacgttgacgagcaagggctaatttttgcccgtgaccttatttccatgtcaaacgatgtttacatggaagaaatgcccgcgccggtcgcgttgaccatgttccagcaggaaccgggaatcaacgagggcgctaagtgggcgggttatcgcatgtattccgctcagggcatggctaaaatcatggcggcatttggtacagatatgccaatgatgagcgccaaaggccgggaatacttcgcgctgatgtacgatatcgggctgggctatggctacacctacagtgacgttatggcagcggcaatgtccggtacaccgcttgataacattctggcgctcaacacccgcgaagcgcatgagcgaaccgtttccaatctgctgtggcgcggtaacaaggaatatcagattatcggctttatcgaacatccgaatattccgctggtggcgctacagggtgcctgggcgacttctgacggcgatatgatttgcgacgattgctcggcgctcatcgctgcggtaaacaccacgaaaatctacgaggtgaatgaattccacatgccgtctaaggcgtgggcgcgaattcagggcttgcgcctgagtggtacgctcggcacggtactgtcattcctgcgtagctcttacccggaagtaactttccgcaaaaattccgatctggatgatgacggtatctgtatcgcgctggcaaacaatcgtcgccacttcgcccaggctactcctgtgctgttccgtcagttgccggttcagcgtagcgggttagacctgtctattccgtgcctgtcgcgctctgctggcgttatcgtccgtgcaccgctggccgctgccaaatcctcaagggtgatttaa

SEQ ID NO: 180028 - DNA, 792 bp, Klebsiella oxytoca
atgcagaccacgattaaagatgattttgacgcggggttgccgggtgatttggcggtgctgccgtctttccgttcctccgctcgcgtaacctcccgtcgcgctggtggtgaagttgcgccgggcgatgcggtgaaactgacctccggtaatgattcaacctgcgttgcgttgcctgatgatggtgatgttactgatgccatcggcattgctgtgaccgcgcattccaatatgcccgccacgccgggatttggtagcaacacgcgcattggcgtggtcactatcaattgcccgattggtattgtcgaaaatggcccgatccgcgtggcggtcaaaacgggagaatccccgaaagtgggtgatttagccgtgccgaaaggtcgcaacgccactaccggttatatggagtggggtgttgcggcatccggcgataaaagccgcttccgctttgaaacgccacctcagcgcggtggtacggcaattgtgatggtcattgatggcgaactactcagcgccggatatccccgcgaagtcgctgtaactggcgttgcgctgtcgcctaaaacagcatctaaagccgctggcgcgactcagcagtttacgccgacagtttctccgtcaggtgcgaccaataaagacgttacctatgcatccagcaatgcgaacgtagcaacagtagacgcatccggccttgccacggtgaaaagcggggcaacaaccggacagacggcaaccattacggtacgtactgaagacggtggtttcactgacaccgctgtaatcaccgttagctaa

SEQ ID NO: 180029 - DNA, 1014 bp, Klebsiella oxytoca
ttgctgcaagaaacacaggtcaacgttgacgccatcaagcaatgggagataaccccggaaggttatctccagattgatatccctatagcccgtccgggcgtactggtttatgaccgcaagcgcggtgatgcattcacggctaaagagtaccgctcagccgatgaattgtttaaccaggactcaatgaataccttaattggcaagcctgtgacggtgtcacatcctcgcaatggtctggtgacgtcaaaaaactaccgggccgtttctgcgggtgttgttactgctgttatgcgtcagggtgatgaacttatcgcccgcgcactggttcaggatgagaagtccatccgactgattcagcaggataaaaggttacggggtgcttcggcggggtatcagtgcgacgaaaagccaaaagaaacaggactatccccggacgggcaaacgttcgacacggtgcaaaagggtatcaattacaaccatttgagcattgtacgtaacccacgggtaaaaactgcaacattcaatctggacggtgaaccgatggaattagaagaggcgttagccgaaattgaaagccttaaagcgaaaaatcaaacgcttacggctgatttaagcaaaacacagggcgacctgctgaaagcaaatacccgccttgtgaatatggactcagccagcaatgaagcctacgagcgcggtgttgctgatggtcgtcaagaaaatgacctgaaagcagcagctaaacgcctgaacatcaacaccgacagcctcggcgatatcaatctggtcaaacaggccatcatccgcaaggcaaaccctgaagtaaacatggatagctggacggatgagcaggtagatgttgcgctgtcaatggcgctggttgcctgcggtaagaagttcgaacaaaccccgcgtaatcctcgcgcagcagttaacaccgatgagcaaggcgctcagaagtcagcccatcaggattatctggctcgcacctttggcaaaaaagaggaaagcaaataa

SEQ ID NO: 180030 - DNA, 1362 bp, Klebsiella oxytoca
atggcgaagagtgaaccacgttatgacgccgggtatccgctggctatcgaactggtttacgctcaaaggctgggcgataacgcccggcttgttggtaaatgggttcgcgatgcctgcataaagacataccgggaaatcggtaaatccggcgcggtgctcaataccgatgccgccgatggtagagatatttccgttgatgacctgctgggggatttcatcgccgccgcaacggtcaaaaaagtgcgcgtatatataaagaagaaggccggacggaattattcacgcatgacgcgtgagcagcaggaaaggcttgtccggtctgttgctcaggaacttttgccggatgcatcaatttttcttaaagccattccgtcactgctaaaagatggtgaatttggggccgtccccgcctacgcattcagtgaagtaaggcggcaggcaggaatcagcctggctaaagacgttgccagaatgaccggctcaaagccagatacctaccttcgtgttatcaaccgcgccgctgatgatgttcaggccgctattgtaaatggtcaatttggcctgactgacgagtattaccagagctattaccagcgcttccgcgtcgatggtgtgaatcttattgacctgaaaacagggctatcagccacaccagatacagcgggagcaatatctaagccgctcgccagcttaacggatccgatgagaggcgcgagcactgttccatcattaccggctatggaagcggcaaatacccagcttgctaactcggcggttgacgatttccggctgattattcgcgctgccgccgatactgatttggctccgggtatcaaactgccaaccgaaaatatggctgacctgatatccattgatatctatgacggcgataaaaagctgctggagcaaacagcggactggctcacggagagcatggggcgcatggagaacgtctccgatgaggcgctacagcgtggaattaaggtcgtccagcagggattacgcgaggggcggggcgttgactatatcgccgataaactggcaaccgaaatggagattccctatcggcgagcccgcaacgtcgcccgcaatgagataggtaatcaggcctggaatctggaagaagccaacgcccgtattgccgggatgaaaatataccgctggcgggggatgttagacgaacgcgagcgaaaattgcatgttgagcgcgaaggtaaggcatacgagccgaccagaccgccacaggacgggaatccggggcaaccgcatttatgtcgctgcttccctgaatggttgttctctgcgtcggacgttgaagaagcggagaaagaaattgctgcaagaaacacaggtcaacgttga

SEQ ID NO: 180031 - DNA, 1374 bp, Klebsiella oxytoca
atgacgaacaaaaccagcttgattcccactgaggggattttaacgaaagagggcctgcagccagctaattacaatgttgatggctatgtcagtatgatgaccagcgcggcggcaagctcaaagggcgcggcgggcatgagttcaccgaccgccaaccgcatgaaagctcgcgccgcagaggggatgattccgctggtggcagcaatgaccggggagctatccggcataggctggcgcattatcagcgaaccggttgctgccgcaatgctgaacggattcacagtagttactgaaaatcctgatgattcaaagcgtattcagcagatttttgacgaaatgggcgcgtggcaggtagtggaaagcgccgccattctaaagcgtcatcatggctggtctgtgctggttatgggggaagagtgggtacgttgccacggctcgcactggattaccccgtcgaatgactggtttgcagactacaattcgccattttttggcctgccggaaggctggcgtatccagcttaaaagccccatcggtggagaagtgtttattgagcagggagattcgatcctctttggcgataaaaactatcagccgatttacgcgatggtcggtatcgaatttggcgaaccattgttgtgtaagccttatgcagcgttacagaggctgggtctttcgcatgagctaatcatcagcatactttctctttccgttcaggatatctataaaaagaaggacttagctgaagacctgaaaacggctaaaggagaggcagcagcggcccgcaggctgggaggaatagcggcaacccgccagttaaatgacatggtagcgattgacgatgaagaggaaattaaccgcctacagtccaccatgaccggaaccgccgaccttgttgatatggctattaagctggtatgcgcagaaacaggttttcccatagctatgctggcagagcgtaaaggtggtctttccaatagcgataccagcgccgatgcacaatggcaaaatcttgtttctcatatcaacaccaattacatcattccggcactgaaaaagctggcttttcgctatacggggatccgcgctgactttgtgccgaataaatctcaggggcagatagaccgcgaggtagaccgggacaagaaacgagcggaaaccgcgcagctttactattccatgcgagccatcaccagcgaagaggcccgcgcaacggcgcaggaaaccggagcggtggttatgcttgcgaccactctgcccgcaactggaaccattgatgaccagaatgacgacgattcgaaccaaaacaacgagaattcgaaccggaatagcaccataaacgacaacaacgaggccaataatggcgaagagtga

SEQ ID NO: 180032 - DNA, 1410 bp, Klebsiella oxytoca
atgacggcgattgagattgcaccagagcatgatttagagcgccgtcgctactggctgtcagagaaaaagaaaatggcagagtggcggcgcgtaatgcgttcgctcacgacaaaaccgcaccgcgttaaatgtctgcgcggtggtcgcggttccagtaagtcatggaggattgccgaagcgctgattcagctaactgtacgatatgacctgcgcattctgtgcttgcgtcgggtacagaaatccatcgacgcatcatcacataagctactcagcgatacgatacgccgtctcgggtatgaatcagagttcacgataactcaaaacagtatcaagtctaaatccggtgctgaattccggtttttgggctttcagtcgaacctcgacagcattaaatccattgaaggtgtggacatttgctgggtggaggaagcgcacgcgatttcggctgaagcgtgggaaacgctggctccaacattgcgccgtaacggtgctgaattatggattaccttcaacccggcttttgcgtgggatgaaacctatgtcagatacgttctcaatgcagaggatgactggtttattgaggaggtgaactggtatcacaacccatatttcaattcgacgttggataaagagcggctttatacgctgaagtattacccggacaagtacgacaacatctggaacggcgttcccgtcagtgatttacccggcgctgttgttaaccgtggccatcttgaaaagttagttgtttcgcccgattcgaagctggcgaaagcgtgtcgaactggcgttaaaacggcggtgctcgatgttgcagatgatggcgatgatgattcggtattgtcgttctttgacgggcgttttttgtaccgtatggagcgattacaggcacgtgacaccgttcagctagcgcagcaggcgctaaaaatggcaacggaagaaggctgcaccgtcctgatttacgattctgtcggcgttggttctggtgttaagggcgagttaaacaagtacgaagattcagagattgagtttcgtaaattcgttgcacagggcgaagtgttgcgcaaaaaatcccgatatcgcggcggaaggccgaacgaagataccttccacaacctgcgagcgcaggcatggtgggcgtatcgggatgcagttaatgactctgtgcgctggctggagacggaaattatgccgcctgatggccttttcgctatatctgaccagataccgcgtcgatatctcgatcgcatcctttctgattctactggcgtcatgtgggaaaccacgcctgacgacaaaatccttattgaagcgaagaaaaaagttaaaaaacggctgggcgtgtccactgactacgctgacgccatattcccacatctggtacgcatgaaatcaggaattatcgaatga

SEQ ID NO: 180033 - DNA, 546 bp, Klebsiella oxytoca
gtgacaataaaaataaacaggcgtgatgatgcatttgcaaagctggtggctgaagcgcgggaagcgccggggttcagctatgcaaagtcgcgcaaccgtgattacaagggctttaacgatgattttcaggctgaaaagctactcaaaaacgacgacatacagcaggctgtcagcgtttacaaaaagcacatcattgcagcggatatcgtagggcgtcaggaggcgctaattgacctgtcagcacgtttccgcgcgccggacgcaacagcggtaatgctggaattgcaggcgctggagaaattgcgactagagccggagatattccgtagccgcatggcggcaattgatacccgtgctgttaaaaacatcaaaagaacaaagcacggctggcaggttgaggggctggataagtcacatcttgcggcgcggatccttacgcttgccggggtggatatcagcaagccgataaccgacgaaggtaagcgccttgcgcgtgaaactttaaccgaaatctaccgggatatgggcggcgatgacggcgattga

SEQ ID NO: 180034 - DNA, 396 bp, Klebsiella oxytoca
atgagttacagtgatgttgtggcaacgatagcgctttttgtttcgtttatcggcacttttgccagcggttacatcagctatcactacgctatcaagggcgaaaagcgtaaagaatttaactctgttgcagacagagtaacgctttcactcatgcagcaactagacactgcaactaatggaacattcccaaatgtgacgttaggcaagaccgaccttcacgcccttctcattgttaccaaacacgccaacagggccggactgcaaaaagccttttccgactatgaggacgcattaaagtcttgcggagagtggaaagccggtttttatagcttcaaatcatccgacacgttgaaagccgcaattgatgcccttctcaaatttgccgagcgcaaataa

SEQ ID NO: 180035 - DNA, 1599 bp, Klebsiella oxytoca
atgagtacattactcactatccctgacgccgcagaacttgcagtacataccatgatggcacttaaagccgctggctatgcgactgctgctatgattcccgttcacaaaaacacctcaaatgaagtcgaaaaaacggaagtgaccgcgccagaagtctacgtagctccgggcaaacagtacgccaacgctcaggaatcgctggcgcatctggtgcgcgaacttaaaaacccggaacgcgacaactataatgaaacgctggactttacttttgcatcactggcgcaactgctggacatgctacgcgagcccatctatcagcatggcctgatgctcaaacaggaatttgagaaaggcgacgagcttccgctggaaatggtgacaacctttatccatatcccaaccagcacggaagtatctttccgactcccggccttcatcaaagaagataagcgcctcgacgaatgccagcgcgtcggcgcgtccttcacctattttcgccgctatggtctgcgtcaggcgctcgatattactgatggtgatgacgatatcgaccaggcagacagtaagcgcgaacgccgcaaggcccgctctctgaacagtagccgcaaatggaagccgaccaaatcagaacgtactaaagcggaatccattctgaatatgctggtcgcggctggtgagttcactggcggcgcggcaatcgcccaggctaaatcccgtaatccgtttcttcgtacaccgtcagaagttgcagaggatgttatctattcccgcgacagtgccaaagatgatgatgcaatggcccgcgatacggtgttgcgctatggcctgacagatgagcactggcagagtttctacaaacaggccggattctttcaggtagacggtgatgaacttatcgacacccgaaccggcgcacacgtcagcgctgaagttgctatggatattgcggaatctctttcttctgttgcgatttccagcgcggattcaaacgatgtgcatgatacccgcgatatgtcagcgccagtggcccggacgtttattcctgactgcaccccgcttgatgacgatgaagaggcgtttgttgccgccgttgaatctggccacgattcggaaattatcgaaatcgctatgcgtcagatggaagtgcatgtgtcgcacgggctggatatgcgctcagtacacagcgatacaagctatcaccgccgtaactggtataacgcctgtcgtgagttctatacgctggcgctgatgcgtggtgatgtgaactttgaggcgctggcaaatcccgaaatgaaagttgcccgcaccatcatggatatcgtcggcgctgacggcgataacgaggccagcgaatccaccattgtagccgcacaaacgcaactcaccgtcgatgtgatgcaacaaaaggtcgatattgcgcaggaaatcgcgacgggtaacgctgacaccgatatcaagctacaacagcttcatgaaattgcacgtcgctgtgatgcgtacaccgctggctatatcgaaactttaatccttcatgttgaaagtggtggcttcaacaatgaaatcccagcgtacatccctgaatctgaccttccttactga

SEQ ID NO: 180036 - DNA, 516 bp, Klebsiella oxytoca
atgaaaaccgcacaggaaaagttacaacgtcacgtcgaaaagcagcatgagtatcagcagcgggctttagcccgccagcgcgagaaacaggcatctccggaatggcgtcaggctcagtacgaaaaacagcgggagcgacaatcccgctatattgaacgggcgaaaaataaaccgtgctcgcgtgggttgaaaggccgaacacctcgtgccgctgaacgctcactgatggacaaaatcggcgctctaccctgtattgcctgttatgttcacgggattattaacgatgtggtcagccttcatcatatcgacgggagaacaacagcaggcgcacacgctcgcgtattaccactgtgtgaccatcaccaccagcacgcagcgccagcagcaatacgcgcggtttatgcctggcttattccggttcatgctgatggaacatgcggaggaaaagccgcatttgaggcgctaaacggcgctcaggacgatttatacgcccaatgccttgaattgatatcctga

SEQ ID NO: 180037 - DNA, 2133 bp, Klebsiella oxytoca
atgtccgaaaataattatggtgctctgatgatgaaatcagcaatcagcgccagtattgatatcaataccctactatcgcccggcatctatccaatttcacccggcaatccatcatcaccagacattgacggtggaattttaaccattcattcaggggagataaaaagacgaagctttacctccaatttaacaattttttcaacgtcttcttatagctctaatttaaatcaatggagtgaatgggttggctctgtttctcgcaaagaactcatttctagctcaccaatatctggcggctcacttgttatgctaccgcaagaaatttcggtatcggatgcactgaaaggtgttgtggtcgtttctggtgctgacggaactggcgtgatcgacgctactgaaataattcaggcctatctggattatgcgagagaccatgggataaatacggtacgtctaccacccggtgattataaggtgcagaagtacacgcaccagattgaattaccccatgatgatggcactgtttatcccggctgggtttcatccggttcagatattaacctcgcgcctgagcctgttcattacatttatgcagcacttaagttacatcctggcattttccttactggcgatacgatgcttacgactaccatcaatggcggttgggatattgctaccgggccgatcggtaaagactccggtgtaggggtctggttttctacaagcaacgtgcagtctgatcatctgggtggcggattgatcaacataggaatgagaaatttctttattggcaggtatggaaccggctgcaccgtagatacggtagaagacaggatttatcacaaaaattgtgcaattgcggcaatattccaggccaaagaacgttgcaagcatgggttcattcacgtcgaacccggctacgccggagatgttgttggtgggcagtggtggtatcgtagcgactctgtgtctgccaggcacattccgccttacccggcccctcagatttatctcacgagctggatggatgcctgtctctttgaaaaatactggttcgtacagtacgacgaagcattcggggcaaggcatgaagccattgataatttctttgatacctacttcatgaagtcagccaaccacgcgcgtcaggcggaaggtgggcgactgtcgaatacctcgggtggcggcagtataaacaagttcaaagggattgtagggcgagctatttatacccctgcactgtacggacagcagcctaatgctaaccttcttttgagcttgaaaacttacggaacgcaccgtactgcggtcgccacaggcgaaaacgctgttaactcaggcgcaatgaattttattcaaagtgcgtacattgagcgctcaggtctggtgagtccgttcggcaccatcggtgccggtaattatttcgggatagattacgtggatctatgggaaccagcgcgcgtgggcgttggctattctgtagtagatggcttctttggcatgggtaaaatcctgagaagcacaggacagccagcagcttatggtagcttccgctcctataatcaggagtcagcgccaacgcggaaaacagtatttattaactctatagaggactctaatctttttgagtattcggagcagtacgataaggaaggaagaagctccgttccttatcgccggtattccgataagtgctatatgccccctgttatgtttaatgatggttcgcggcagttcagctttgttcataactcattttcagcaatcttgttaagcactaatgctggcatcatgagcggcaccggctattactgccggaaggggaacgaaatcactctcagggtagcgtttaccgttcccgtggcaactctggcaagcattagcggattcatcaggatatccgggcttccgtatgcaatgagctttataggttattcgcacggtgctgtcaggtggccagccctggtatcaggggtgcagctgaacccgcaaattgatgcagggcagaaaacaataaaactttttgttgacagcgctgagaatgaagcaattggcgcaacggtgattaaccgatcgtatggttcatcatcacttttagttgttagcctgacctacaggacggacgatatatga

SEQ ID NO: 180038 - DNA, 264 bp, Klebsiella oxytoca
atgacagagctaatgcgcaactttaccggccatctggccggtatgcctttcgaaaatgcagtgatatatctggatgaagtgaaaacttccaaggatggaaagtcatttcattttttaattgagggtgggggattgaatatgatggatggcgaccctgcttatcgcttcgcacattacattgataattatatacttgaaagtaattacaacaatattgaatgcgatgagatagctaaagttattattaatattctaacgcaatga

SEQ ID NO: 180039 - DNA, 633 bp, Klebsiella oxytoca
atggcattaacaccagatgagctaattgcgatatcagaccttgaaaaagcccagattgtagattcagcagtagtacctgattgggttcttccggctgaagttcgtggcagtagcgcaccgataaacggtattccgtacccgcagcacaccatagatgtgtttggcggtctgctggctggcgaatggtcacttaaatttcagaatccgttacagcgcgttgtgtgcgatctggagatattccacggcgagaatgcgccagaatccattccaccggatttatcagcgctacagttgacggcaaacggatttgataaagcagtgattttttgccctgcaaaaacagttacagatgcagtgccggtaaactttatgggtctggctgtttccggtgttacgccagtgtacaggttgggtggcaagcggcgatttctggagcagtctggaatggtggtcattccgttaactgtgattctcctgtcaacgcaaccgctaaccagtcaggaaaccagcagggcgctatccgtcacgctgaagcgcaggaatgaaaatcagatgaatgtagtaccaattatcagcggaatggtgtacagcaacccgctaccatccgccagagatatcgctcaggcatcgtga

SEQ ID NO: 180040 - DNA, 237 bp, Klebsiella oxytoca
atgaacacattttcgaccgttgatcgtaattatcctgtgagtggcggaatttatccgagcaagaaacaaccatcagcgtcgaaacaagctgatggtttcgcgccgacttacatcagtgcaggcggaaaactggttgaaggagatccggttgatgtagcggaacttaatttcatttttaacgacctgtacgtgcaggcggcacacattgaccagcttcttacggctaaggggaaataa

SEQ ID NO: 180041 - DNA, 234 bp, Klebsiella oxytoca
atgaatagctgggccagcactgagaaaacgtatcacggacaaggtggtactgatattcccaacaaagaggagccatctgaagaaatgcaggctaccgggttcgcgccgacctactttgatgtaaatggcaatctggtgtttggtgacggaataagcgctcaggtaatgaattacatccttaacgacctgtacaaaaagtatcaagagcttttagctagggcagaggcaccatga

SEQ ID NO: 180042 - DNA, 864 bp, Klebsiella oxytoca
atggagccatcaatcaaaaaaccggggcaactggcaactgaacgttttacctcaaaggtcaggttgcagcgaaatatcgacctcgtttccggtatcaaggccaaccagcagggcatggttgacgcactggactacctgaaaaagggtttctcaattacagattcttcgggcattttgcttgacgcgtggggggaaaggtttgcgatcccgcgagacggccgcgatgacgatagctacagaatagcgctgatggagggggctggaacgcaatctgtttcgcttcagtctcgtcgagctgttggtggattcatccagttagcctatagccttacatggttgcgcctgaaccgcgtaggactatctacaggtgctgttggtgcggccttcaaccgcgtaccgctacgcgctgttttcgtccagtgtggtgcgatggctcctgatatcgaactgcctgaaacgctggttgctgcaacttttgccggggatgtttacagtgccgcaacacctccaaacgtcaaactaacccaccacgcgccaatgtttcccggtaatgcttttccggctgtatgggggggtattaagtacgagcttgcccaaaaaactataaaggcgacagatacaaaaggtatacgggtcagtgatggtcggtcgatcctcacaagaatttcaggaacaaggactcaaattgtaaggagaaaagtaatcaagactatccgggcagagcatttaaacgccattcgttctgcgttaggaatgtcattgctgaccaggattgagggggtcgttgaggatggcaatccagaaatggtaatgccgtttaatacattagtcacagttaaaaaaatgaaggtgaaaaatgaatag

SEQ ID NO: 180043 - DNA, 1410 bp, Klebsiella oxytoca
gtggaattaattaatgatggcggctggcatggtgccagactgccagagctacgcggcgacatttaccagaaattgcgcgacctgctgggggatataagcccggacggtgattccctgattggtcaggttatggcggttgtcgctgaaaatgacctgaatatcgtggaggccatcggctggacgtttgctggtttcttcatttcatcaggtgaaggtatccagcttgacggaatcggagaggggttcgcgcttcctcgctatggcttaacccggtcatctgcagatgtagtttacctgctggcttcagggcaggtaatcgcgtccggtgagacttttactatctcaggtatttctggtgactggtcgccgtcaggcagtattcaggccaatggtaaaagtgctaccgggtttgtgctggaggttaaagctgatgctatcaccgcggggaatactttcaccatatccataaacggtaagccatattcaacgcagtaccagacgggcgatacatctgattctattttatccaggctttatcccatcatcgccgccgctgatacgtcagtaaccacatattcaacgggttacggattgttgctttatgcggcggacggtaaatcgctcatccagttttcattttctgatgatgttttttctgtcgttcgtaccggaatgcccgcaacaacatggtatgacagcgatacggagtttcctgatgttcgattcggctatgtagccacagatgacattctgattctcgccaacggcagtaaaggctttgaaatagaagatgacgagcaatacagagagcgtcttttcgaagcggcggaagcagggagaaagaatgtcagcgcatcaagaccgggcataaaaaatgccgttttagcggttgcgggcgtgagccacgtcacggttaacaccaacagggggattgagaccgatgctgacggcctgccgggtaaatcggttcaggtttttgttgctggtggtgatagcgacgctatagcgcaggccatctatgatgcggcagcggctgaatgtggtttctacggcaacacatcgggtacagcaactgacggtacaactaccgaaactgtttatttcactcgccagagcttccagcttgtctatgtttccgtttccggtgatacatgggatgccgagacaacaggcaagccagacgattacgagagcgttgctaaaagcgttattactggctatttctcgcagcttgaaatggggcgcgatgtttttgctggtcaaatatctgcccgtttgattacggcttttccgacgatgacggatgttacggtaactgtaggaacttccgaatcaccaacaggtaaaactgttcccataagtagcggcgttgttgcggttacggattccacttctgtggtggtgtcgtaa

SEQ ID NO: 180044 - DNA, 348 bp, Klebsiella oxytoca
atgctggacattatgcaggatgaaagcggagtcattctccgcaatggcgatttggtgctggatggtggcattgatggcattgcacagcaggccgaaatccgtgtaggcactaatcgcggcgaatggtggcttgatgaaactcagggtttgccgtggttgcctggcattatggcgtcacgtctgccggtttcgattgtctccaacatgattaatgctgaggcgcggcgcaccactggcgtgactgatgccagaactacaaccatcaatgacgttaagggggattacacgatccgctttgcggtttatgtcggagccgatagtacggaggtaacgagtggaattaattaa

SEQ ID NO: 180045 - DNA, 375 bp, Klebsiella oxytoca
atgaaattaaatgaccatgcggcacaaatcgcgctttctaacggtggctttctgatggcaggtgactacagcacaaccgttggcaaaggcgagattatcaatatcactgagcgaaccgggcttgtagttgagcgcgtcgagtgcatcaccctgattaacgcgccgctgtgtatggtcatggcgacgtgcagggagagtaaagaccagtacatgccattttacagcgatttgccgtttgaattaccgcatcaagcggcgatggcgcaaatgttaaatgatgctggtgaaggctttgaccttgatgacctgctggatatcgagtcgctggattctgctgtgacggtcgtccacgttgaaaaatggatgcacacataa

SEQ ID NO: 180046 - DNA, 711 bp, Klebsiella oxytoca
atgagagccggtagccagattcaggccattgttgagcaggcgcttaattcagcgcttttttcgcttgaggcaacgattgtttccgtcagcggcgggcgggcaactgtccagccatcaccaaaacgcatattcggtgacaactcagagccgattgcttatccggctgttgaaaacgttcgtttagtttcgctcgtctgggatagcggtaagtctggcgttagcgggcgagtttctccgggggatgaatgtcttcttatcgcgctttcacatggtgacggcgacgagccagaccataagaccatttcaagcgccatcgctatatgtggattttcagacgttgccagtcaccagatgccggatgaggcaggtttaagagtattcagcggtagcgcctttcttgaatgggatgacggaagcattaagggcgataccgggcaaggcgcaactttcgagtttaagggcaacaaaatgaccgttaacgcgccgggcggtatcgatatgacagcgccaatgacaaacataaacgggaatttgacgatttctggatccatcagtcagggcgcagaaggtggcggcaatgctgactttggcggcaacgtcaccataaccggcgatagcaaagccgctgaccacattagcggcggaaagtccttcaattctcacacgcataaagaaaacggtgagggcagtcagaccgacgccccgacataa

SEQ ID NO: 180047 - DNA, 954 bp, Klebsiella oxytoca
atggcttacgggcgtcagttcgaaataaccgttaactgtacagatggagagacgatccacattactgatgtggacgttgatttctcgtctgtgcgcgacgatgaaaaagagccaaacgaggctgatttaacgttgtggggtttaacaccacagacgcagaacgccatcgctcaggctgggtcaaccgtcagtgttgccgctggctatatagatgaaggaatgttcaccctgtttcagggcgaacttatcagcgccgtgaccattaagcctaacgaggtctacggcctgaaaatgaaaatctacgaagcgctgattccgttccgggccagcgtaacatcgcgcacgtttcgcaaaggtcagagccttaaagatgctgttttacaggtagcgtctgatatggggctgggttgtcagttttctaaatctgcttcatctcttaccctggctaaaagtgtcagcgctgcggcattgtcccgcgatgtacttaccagcctttgcaagccagttaatgccaactggtcgcttcagtatcagtcaattgttgtcactgccggtgattcaattcttactggcgctgctgttttctcccctgaaacgggcctgcttggtgcgccgcttctgaaaattcactccccgaaacgcacgaagaaaaagaacccttccgaaaaagagcagatccagaagaagcacgacaaaagcataactacctatgtctggccaccgaagggctcacaggtggactactcaaaaggcgctcgtcgccagataggcgttattgaggctgttacgtgggaatcgttgctttgtggcggggtggagattggcgagcaggtagagctttcgtctccatcaatgggcgaaggctggatggttattgtgaagaagatttcccatcgttttagtacccgcgaccgtcaggcatggtcatcgtcatgggagggaataattgcatga

SEQ ID NO: 180048 - DNA, 300 bp, Klebsiella oxytoca
atgaatatcgaagaatttgtaagcgaagaaaaccatatgtgcaatttatgcggagatcttttttacaagatctttgaccaagaagtgatttatgacttacctaataacgagtttaataaagaaatcatttactggctcagtcagtaccttgtaggaaatctgagagaacctttagactcgatctctgagcttaatgcttgcaaacagatatatgtttacgagacctggttatctctaattaaatgtcctgatgaattgaaactcctagcgaagcggataattttatatctaatggattaa

SEQ ID NO: 180049 - DNA, 846 bp, Klebsiella oxytoca; identical to SEQ ID NO: 150349

SEQ ID NO: 180050 - DNA, 129 bp, Klebsiella oxytoca
atggctgatacgttccagaatgaggtgcccagggcacgcattttcagaaaagagttcgaaaatatcctgaaagacccggcgctaacgcaggaattacgcgacgaaatcagcgcgctggctccgaaataa

SEQ ID NO: 180051 - DNA, 306 bp, Klebsiella oxytoca
atgggcgcaggcggcagcctgtgcagcagtacggcccagagcagcgcgtttctgaatgtggcgaacggcgatatgccggacgccagcgcgctgtggaatcttaaccgccagctcagtttcctgatgggatctgcgctactggcagccttactgagcgcctttttgctttactggccaacgccgcaggcgtggcgtggcgtatttatcgccgccgccgcgttgaccctggcgccgctgctgggctgccttaccttcgataaccgggcgatgatcatgcgcctgcacggtaaaatggagaacaaatga

SEQ ID NO: 180052 - DNA, 993 bp, Klebsiella oxytoca
atgagtcagaatacgctgaaagttcatgatttaaatgaagacgcggaatttgatgagaacggagtcgaggtttttgatgagaaagccttagttgaagaggaacccagtgatagcgatctggctgaggaagagcttctttcgcagggagcaacccaacgggtgctcgatgcgacgcagctttatcttggagagattggttattccccactgctgacggccgaagaagaggtttattttgcgcgtcgcgcgctgcgtggtgacgttgcgtcacgccgccggatgatcgaaagtaacctgcgtctggtcgtcaagatagcccgccgttacggcaatcgcggtctggctctgctggatctgattgaagaaggtaacctggggctgattcgcgcagttgagaagtttgacccggaacgtgggttccgtttttcgacttacgcgacctggtggattcgccaaacgattgaacgggcgatcatgaaccaaacccgtaccattcgtttacctatccatatcgtcaaagagctgaacgtttatctgcgtaccgcacgcgagttgtcccataagctggaccacgagccaagcgcggaagagatagccgaacagctggataagccagttgatgacgtgagccggatgctgcgtctgaacgagcgcattacctcggtggatacaccgctgggcggcgactcggaaaaagcgctgctggatattctggccgatgaaaaagacaacggcccggaagacaccacgcaggacgatgatatgaaacaaagcatcgtcaaatggctgttcgaactgaacgccaagcagcgtgaagtgctggctcgtcgctttggtctgctcggctatgaagccgcgacgcttgaggatgtgggccgcgaaattggcctgacccgcgaacgcgtgcgtcagatccaggtagaaggtctccgccgtctgcgggagatcctgcaaagccaggggctgaacatcgaagcgctgttccgcgagtaa

SEQ ID NO: 180053 - DNA, 135 bp, Klebsiella oxytoca
atgttttttaacaacataaaaatgtgcgcccgtatcgatccgcaggccgcccaaagaaaccggaacggcgccggcgggaaagaatatttccgccgtaaaagaaaaatcatgcaggtgaaagaaaaagaaatttaa

SEQ ID NO: 180054 - DNA, 774 bp, Klebsiella oxytoca
atgggcttgtttacccggctcgcgctgcgcttagccgggctacagattcactgcggtctgctcccgggggcggcgcttaacgcgccttgcccgggctacaaggtccccaccgtctgcgagccggtagcccggacagatgcgcagcatcgcctccgggaaattcagcctctctgcggtctgctcccgggggcggcgcttaacgcgccttgcccgggctacaaggtccccaccgtctgcgagccggtagcccggacagatgcgcagcatcgcctccgggaaattcagcctctctgcggtctgctcccgggggcggcgcttaacgcgccttgcccgggctacaaggtccccaccgtctgcgagccggtagcccggacagatgcgcagcatcgcctccgggaaattcagcctctctgcgcgctgctcccgggggcggcgcttatcgcgccttgcccgggctacagggtccccgccgtctgcgagccggtagcccggacagatgcgcagcatcgcctccgggaaattcagcctctctgcgcgctgctcccgggggcggcgcttatcgcgccttgcccgggctacagggtccccgccgtctgtggtctggtagcccggacagatgcgcagcatcgcctccgggaaattcagcctctctgcgcgctgctcccgggggcggagcttatcgcgccttgcccgggctacagggtccccgacgtctgcgagccggtagcccggacagatgcgcagcatcgcctccgggaaatgtgccgaagctga

SEQ ID NO: 180055 - DNA, 1257 bp, Klebsiella oxytoca
atgccaaaactaacagacatgcagatccgtgcatggattaagaacggggaacgattcgaggggcgagcagacggcgacggcctatatctgaggtaccgtaaagaggataaaactcctttttggcgctatcggtataagctggcggggaagtcccgcacgatgatgatcggctcttattctgatttctcacttgctaaagccagagaggtagctaaagagctatcagcacgggtagctcttgggtatgacgtagccgcagaaaagcaggagcgcaaagccgaggcaatagcgaagatagaagcagagaagaacgccattcacgtttcagagcttgccgcggagtattatgcccgccagatagaaaccacctacaaacaccctgagcttttccgcagtagtctgcaaaagaatatcgtcgcgctcattggccgaatgaaggttgaggacgttcgaccacgccatgttgataccgtcctgcaggatgttttagagcgtggctctcccacggtggctaatgatgttcttagaatgctcaagcggctctttgattatgccgtggtgcgcggaatgattgaggttaatccagcgatatcctttggttcaaaagatgccggagggaaggagctggggcgtaaaagagcgttaagccgtgatgaactaattatgttcttcaaagcgctacgtcgtggcagaggtatcagccgagagaatgagctcacatttaaaatcattctggcgctgggtgttcgaaagatggaactatgcgccgccgaatggtctgagttcgaccttgctaacgaagtgtggcatttacccggttcgcgggcgaagaacggcgatgatattgatatcccacttccgcagccggtgatcgaatggattaaagagatacgactttttgccggcgatagtcgctggttaattccggccagacgagccagaacaacggcgcacgttagccgggccacgttgaatatggttatgccgtccgtactgaaagaaatggtagacgttgagccgttcagtatccatgacctgaggcgaaccatgcgcacccagatggccgcgataggcattgaccccgtgatagccgagcgttgccttaatcacaaaataccgggcatagagggtatttataaccggcaccagtattttgatgagcggaaagcagcgttggcacaatgggctgatttgctcgtgtctctggagcacggaaaagaatacaatgttctttatataaggggaggtaagtcgtga

SEQ ID NO: 180056 - DNA, 942 bp, Klebsiella oxytoca
gtgaataaaactatttggcagcaagagaaattgccaccactagagttttgtaatattaaacgagcctctgaaatattgaagtgcaccgttgatgatttaatgcatttgggtgctattggtgcgattgagctttgtataatgtttgataacattccttcatctttgcttgtaaggggattctcgacagaatgggagggagacaaaaaaaagattctcagtgcatttaactccatagagggtaaaacaaaagactatcttttttttgataaaacggactttttttctaaattcaaaatagaaaaagaaaacattactacattcagtttcaatgcaggccgcagtgagatggccgtcttattgttagggatggcccatggtttgtgggcgttgacttatcaagatataaatatattgaaagtaaagcaaaagcacgttattaaaactctatatcctgaaagacatttgtcttttcaagataataatgaattatattgcgtgttatatggaaaagatctttttcattccgaatggaataatagggtggcttacggatttgaaagtgtaaatgttaatgtaaatgacttgcttatatctcgcaggacaattgataaaatttacgaaactatgattaaaggttcgcaattacctagttttgttaatggtgggttgagcgggtcatatttaaacaacgctcatgcaagaggtgaaattaaactaacgggattatttgaagatgtttttcaagagaatataaacttagaagatagtttactggttactggcttgatgctaaacgctatgaaaaaagctgatacaccttccaaaagatggactcaggatgctctaaagaatgagattcttgataaagataaaagaatgagtgcgagattattggattcgtatttttcacttgcaaataaatcatttaaatcagatagttag

SEQ ID NO: 180057 - DNA, 579 bp, Klebsiella oxytoca; identical to SEQ ID NO: 97732

SEQ ID NO: 180058 - DNA, 315 bp, Klebsiella oxytoca; identical to SEQ ID NO: 97733

SEQ ID NO: 180059 - DNA, 219 bp, Klebsiella oxytoca; identical to SEQ ID NO: 97734

SEQ ID NO: 180060 - DNA, 234 bp, Klebsiella oxytoca; identical to SEQ ID NO: 97735

SEQ ID NO: 180061 - DNA, 213 bp, Klebsiella oxytoca; identical to SEQ ID NO: 97736

SEQ ID NO: 180062 - DNA, 189 bp, Klebsiella oxytoca; identical to SEQ ID NO: 97737

SEQ ID NO: 180063 - DNA, 345 bp, Klebsiella oxytoca
atgaaaagaaataaaaccggatgcaattccggcggctctgctcatcctgaaatccgtatcggcgaccgctggaaagacagccatgggtcaattattaccatcgcagaacatcagttaaatcgggtgatcttttaccgtgaaggttatcaatccccgtgtatgtgtactcaggacaggctgcatcgtgagtttactctggtggaaaaatcccgactcactgacaaaaccgatatggcgcgggtaatggaggctcagggcgtcgaaaaaatcagcatcatcaacgagatcattagtcgcgctgatacgttgcacattgattcacagaaggaagggacagcgctatga

SEQ ID NO: 180064 - DNA, 642 bp, Klebsiella oxytoca
atgaacgatgtattagctatttacggaatatcttcgctggaaaacataatttatgcagaagctacgccagaaggtatcaacatgccggtgcttaacagtgaggatacgaatcaatccttcctgatggtggactatcccacggctattcgtttgcttgatgaggggcgttatgacgacgaattcccgactgggctgcaatttgtcgccggggtgctggacggtgatcttaagcgctactacatcctatcgaatgctcagaaagcgattgtctatcgctggctggtggtgttcctgttcatcatggagcagcaggagaaaaacagactggcgggtattaccggcgatgacggaagcgcgggtcgggcggtggtttattccggtgcgcatggtgatctctacgtttccccattaacagaacgtatttttctggccaataacgtcgaagctgtagcaattcagaattatgggactgaaacgggtcttggtatagctgttcgcatgtatgaagggatgatggaggtatcacccgaaggctgcatgcatctgtcatcggaggggcgtgaagaactggcaagactttacgatagctttatcaaaacgctgaagactgacggcctgccggctacaccagtgatgcattaa

SEQ ID NO: 180065 - DNA, 2139 bp, Klebsiella oxytoca
gtgaaaaatgcaccaaatgttaagagcctgccaaaggataaatttgtcgaggctgttatttttgccggggccgatgcttactctcacgcgaaaggctgggaagaaggtatggggcagaagatagccggggattccacgccgcccgtttacctcgggccgaagcaactgtcagagctggcgaacctgcgcattatcgacaaggggcgacgctgcgcgcgcgtctatctggccggtgatattgagtcaatcctgattaacgctattgctgaaaagctggcactggctggggtgcaggatgcaaaattgtataagggtatccctgaccgggcgccggaggactggcgcgattatttaaccagattgcggcaggatgccgaacgcggcgaaacgctggtgggtgagtaccgcggggcaggcgggaaacgcgcacctgcggatgagcttgctccgtgtgttgagtctcgcgcgggcggtctgtattgggtcacaccgaaaatcgacaggcagtctggcgaggtgatccgtccgggccagtggttgtgcggagaagtcgaagtgctgggaactggtgagggcgacggtattgattttgtgatattgcgctggaaacccaccggaaaccggccggaacgcacggaagcgatcccggcgggtgatatcggcaaccgcgaaggctgggcacgtctgagcaaccggggattgcgtgttaccgccaagccgcaactgcgggccattctcgcagaccatctcacggacagtgataccggtgaactgtggaacgttgccacgctgtcaggatggcagcacggcgtatacatcatgcctgacggtgaaatcattggtggcagtgataaacgcgtggtctttcatggacgaagtgcgacggcatccggttacaccgtatcgggtaccgcgcaaagctggcgcgaatctgtggccgcgctggtggaaggcaatgactccatgatgctgggcgttgctgctgctctggctgcaccactggtggggctggtgggcgcggatggtttcggggtgcatttctttcagcaatccagcgcaggtaaaacaacaacagcgaatattgccagtagtctttatggcaaccccgatatgctgcggctcacctggtacggtacggcgttgggtattgctaacgaagcacaggctcaccatgacgggttactggcgctggatgaggttggccagggggcagaccctaaatcagtagccacatccgcttatacgctctttaacggttcgggaaaattacagggggcgagagaaggcggaaaccgggagttaaagcgctggcgaactgttgcagtgagtaccggtgaaatggatatcgaaaccttcctgctcagtaatggcatgaagcccaaagcggggcaactggtacgcttgctaaatgtgccgctggagaaatccaccgcatttcacggtttgtcttctggtaaggctcacgctgatgcattacgcgatgcctggacaattaaccatggtgccgccggccgtgaatgggtgcgatggcttgctgaccaccagcaggaggctcaggaggccgcagtcacagcacgtgaacgctggcgcgggttaatcccggaaagctatggtgaacaggttcaacgggttgcggaacgctttgctgtgatggaagccgcgctattactgtcaggccatattactggctgggatccgcagcgttgccgggatgcgattcagcataacttcaatgcatgggtgaaagagttcggtaccggaaacaaagaacaccagcagattattgagcaggcggaagagtttcttaacgcttatggcatgagccggttcgccccactgaattatgatccgcgagatttaccgatcacagagctgatggggtatcgggacaacggagaacgcttcgacgaccctatgctgttttatgtactgcccgcgccgtttaaaaaacacgttgctggtggtcacaacaaagacgccactgcgcaaattctccatgaagccggaatgcttaaaaagcccaccagtggtaaaaactggcagataagaacgccacggcttaaacatctcaacaacgccagaccgtggacgtacgttttactttttgccccagaaccagaggaaacagaaacggagtaa

SEQ ID NO: 180066 - DNA, 720 bp, Klebsiella oxytoca
atgttctctcacaacctcgcaaaaacagttgtattggttgacccgaatgatgtcgagtcttaccttcggcctatgaatcttagccaaagtgacttagggcgtattcttgagaggggcctttccggtcgctactcgacgacgcagaaccaccccaaaacctcacgcggacagtatttttatggtgaaggtgtaagcgccgccagagatattcttgctcctaaaggctacaagcgcctatcacttcgaaatgttgagttgactgtgagtgataaagttgccctgtatctttgccgcggttgtgatcagactggacttatccacggtcttccagagtcccgcatgaagaaaggggattttacttgtgagctgatggggttaatccataataacaccccgggtcagggcgaacttatcctggacgacaaccagcttaagctcgatttagacctgccgaaaagcgatgctatccccctgctaccaaataaaatcggattggacttatggtttttactctacgatttttatgaactggatggggacgagcgcgtaggtattcgtgctgagctttcacgcccgatttcatacaatagcaagaatgtagttaacgatttctcgactcgtttaattcttgatgttcatcaacctgatccgattgttaagaacggtgatgtaccgcagtttacaccggatatcgatctcgacattttaaaaacaggctaa

SEQ ID NO: 180067 - DNA, 1113 bp, Klebsiella oxytoca
atgtttaattcagagcgtttacgtatagcaagagaacggagaggcctgacacaaagagcgttagctgaagccactgatttgaccagcaagacaatttcaaactacgaaaaggcgggtatctttgaggctatagccagcgacacaatggagcgaatttcggctgtccttggctatcctattgagtttttccgtgacagggatgtccctaccctgtcaccagaggctgtgagtttccgcgcaatgacaaagttaacggcacagaaaagagactcagctctcggcgccggtaaacttgcgcaggagttatcagcctggattgatgagcaatttaaactcccgaaacctaatgtgcccgattgtagcttcgatggatattctgagcctgaacgcgctgcccgggcggtcagggagtgctggggagtcggcgaattatccatttccaacctgatccatcttcttgaggcaaatggtgttcgcgtgttctcccttgctgaaaactgtgttgaggttgatgccttttcgttctggatggacaataaaccttttgtgcttttgaacacaatgaagacaccagagcgcagtcgattcgatgcagcccatgaactgggacacttggttctccataaacattcaactaacaacggccgccaagcagagcaggatgcagaccgttttgcatcggcatttttaatgcctgaacgcagtgttttggcgtcagtgccaaggatgccgtcgctcgatctgctcatctcgctaaaaaagaactggaaggtttcattagccgccctggttcgccgtacgttcgatgtcggtttatctaccgaatggcattatcgccagttatcaatagagcttgcccgacgtgggtatcgtacgggcgaacctcaagggatggaagagcgcgagaagtcactcgtgctggataaagttttctcagccctgcgcgctaagggaattaaaagaggagaaattctcgaacaactaaagtttcccgccgacgaagcgagtgcccttacctttaataacagtttctttatggaagcgatcaatggaggcaaacggactgctttggaatcggagagatgctcatctcatttacgcttggttaaatag

SEQ ID NO: 180068 - DNA, 162 bp, Klebsiella oxytoca
atgagtcagattatatttatcgtaataatttcaggagcttttctgtgttactcctatgccttcgataaaaaaggattcagcctagagcctcaggctcgtgctgcggcgtggtttggctttgttgttttcggtctggttttacttgggcgtttagttacttaa

SEQ ID NO: 180069 - DNA, 2475 bp, Klebsiella oxytoca
atgcgtcaggaatgcattcaggcagtacaacaggcagcgcagcgcactctgagcgctcgtgaaattcagaatattgaagaccggatctacagaaacatgcgatcactggcgcgtaacgaccctgcctcatggcggacgctgtccgaggccgaacgtctgcggcgggccggtcaacttgccgccgatgagttaaagcaagaagcggcgttaaagaaacgtcgtgttgcgttaactatcaccgcccgccagcgccttgattcatttattaataattacaaagggaaagacggaaagctggaggcgctgaatcgcacgatagcttttcacgctgacggcaaagcaaatttcctgtctgttgaatcgcgcgggaaggcaacgcgagattatgcgctcagtcagctgcaggaagcctttgaagctgttgaccctcgatttttcggcctgttcgaagatgaaaaaggcgttcgtgatctggtttatgaaattcggggtaaaagtacggggaataccaaagccagggcgggggcaaaagcctggaaggatgttactgaattgctccgtcgccggtttaacgatgcgggtggcgacatcgggcatctggatgactggggcatgcctcagcatcattcaatggaaaaagttggcaaggtttctaaggataagtgggtcagcgacatcattgggaaacttgaccgaaaatattataccaaaagtgacgggcagctgatgtccgatgctgaactgacggcgtttctgggtgaggcatacgagactatcgctactggtggtttaaataaactcagcgatacaggtttacgtatttccggggcgagagccaaccggggaaattcttcccggcagatccatttcaaagatggcgaggcataccttgaataccagcgtcagtatggtgaccgctcgctgtgggaaataatggttcatcatctggaaagcatcagcaaggatatcgcgctggtggaaacttacgggccgaacccggatcacgtattccgttctattctcgacgaagtaagggcagaaactgctgttgcgaacccgcaacgctcaggccgggttaagcgcctggctaacagcaccgaaaatctttacaacttcatttccggaaagacacaaccgatagcgaatccgcatatcgccagatggtccgacaatatccgtaactggctggtggccagccgtcttggctccgccctgctcgcttccttctctgatctcggcactatgtacctgtcagcaaaggtcactaacctgccaatgaaccagctattccgtaaccagttggaggcgatggatccgacgaatcgtacagaactggcgcgcgcccgccgggctgggctggcgatggaatcactgcttggcagtgtaaaccgctgggcgatggataacatggggccgtctgtttctcgctggtcggcaacggcggtaatgcgtgccagcggcctgaccgcatggtctgatgcgcacaagcgtgcgtatggcgtcacgatgatgggcagtatcggggatgtggtgaggcggacgccagatcttcgcagtctcgatgacaatgattttcgtattctgaaaagcaagggagtgacagagcaagacttcgccatctggaaactggccgagcaggaagactgggggaacggtaacaccaccatgcttacgccggaaagtatcatgcgcatccctgattccgcactacagcatattggcccccctgagcgcgtcagatttgaggctatgcgccgtctgctcggtgcagtgtcggaagaagttgatatggccgtgattactcccggtgcgcgtgagcagatggttaccggttcaggtattcagcgaggtacatggaaaggcgagctaacccgcagcgtgttcctgtttaagtctttcccgatctcggtggtgatgcgccactggtcacgtgcaatgggtatgccttccgctggtggtcgagccgcatacattgcaacttttattgccagcactactatcctcggcgcgttgtcacagcagttgaacgatatggcatctgggcgtaacccgcgggatatggttggagagggtgcggggaaattctggcttggtgcattgcttaaaggtggcgggcttgggctgtatggtgattttctattatccgatcatactcgctatggtggcggcgctctggcgtcaatgcttggcccggtcgctggtctggttgatgatgtggttaaactggggcagggaataccgctcaacgccgtagagggcaaaccagaacaaacgggcggggatttggtgaaacttggtaaagggctaatccccggggctaacttgtggtatgcaaaagcggctcttgatcatatgatttttaaccagttgcaggaatatttttcccctggttatcttcgtaagatggaacagcgttcccgcaaagagtttaaccaaacatactggtggcgaccacaggatccattgcctaattag

SEQ ID NO: 180070 - DNA, 1809 bp, Klebsiella oxytoca
atgagttatttcgggctaaatcagtcgaatcaaaaccaactgtcagaaacagcggcatccagtcccattggcttaaaaagtgatgtcggttttttcgataatgctgtgggtgccggtgtatcgggtttgtattcgggccttgtggccaaaccggatcagttgctttgggcggggatggataaagttgtttcccctctgtcccggtttattaatgaaaacacacccgtacgggattcttctgaagagtacatcgccgagcagagaaggctggcaacacagcaggttaagcgtctgactcccgatgccggtacgaccggaaccgcgggtcagattctgtttggtctttttgatatgggtggccaggctgtcgctggcaccgcaatcgcggggccgctgggcggtgcggcggctgttacctcgcttcagggcttttctgagtttgagcgtctgaaatccgaaggcgtggatttatcaacggcgcaggatgtcgcgttgattcacggtataacgaccggcgccggtacgctgatccccatgagtctcggtctgcgtgcgggtggcgcgctggcggaaggtgttggcgcgcagatatccagaacgggcgagaatgcgttactcaattccggtgctgcagtagcgcgtgctgctcctgacgtagcgtatgctgcggggactaaccttgcgtttggtatggcgctacgcggaatgacggcagaaaccctgcgcaacgccggttacgatgatatggccggtcagtacgatatttttgaccgtcaggcaatggcgattgatgcggtgctcggcgttgcgttcggcggtcttggccgctttgttaactcccgcggcgagaatgttcgtgcgccggagtttgccccgtccgatgtcgatgcggcgctggcggctaatgcagcccaccatgcagaaattgatattgctcccggaataccggtcaatgttctgtcacgggatgcgcatgctcaggcattacagcaggcaatgcgcaatgtcagcgaaggtaatcccgtcgatgtggccaatattgtcgacccggcagcattcagcgagctacccgggcgccgcagcgtgattgcgcagtctctggatgaggtactttttaatgcggaggaaggaaccgcagcccgtgcggcagatacgcgccggcttgaagaacaggccgcacagttgctacctcgcggtgaacgtcaggtttaccagtctgaagtggctaacagccagcgccttatcgataacctgactgagcagcgcaatcagatcctatccgaggaacccgcagggaacggcaaagcgctggcacgtgcgagagccgacaagcagacccgtctgcgagaccttgaccagcgtattacagaggcacagggacgtcttgagttttcgcgtaatactctggccccccatgagcctggcggacaattctatgaggcgcgcgctgaactttcccgcagacggcaggctgaaagcgatctgaatgcgcaggcgctctcatattacaaaacggccgaagtgcgtagcgctgatgaagctgcgccacccgataccgctactcatatccgtgatatcgaccgacagcgcacgcagagcgaaagtgaaacgggcgacattgatgtgaaagccgctgaggaatcgctgaccaccgcccccgacatgatgatcaccacactggatgatgaaggtaaccctcagtctcgccctgctcgtgaattgcttgacgaggcaaatcgtgaaaatgaacaggctattcaggattccagcctttttgatgtcgcagttgcatgtttcttaaggggataa

SEQ ID NO: 180071 - DNA, 2553 bp, Klebsiella oxytoca
atgagaatccctacaggtaactttggaaacgtcctacctcaggcgcagcccacccgagtcgatgttggtaatgccggcgccatcggggacgctgtagcccaactagggagagcggggcttggtgtcgctgaggatatccagcagcggcaggagcaggataaccagaacgcattgcaggcactgagtaccgcaggtggagcgcaggttaataagctgctgtatgaccctgaaaccggcatgacagccacccggaaagggattaacgccgttggcgcaaccaacgacacgctgaaagaatgggacgcctggcgggataagcaactctcgttacttccaccagcagcccgccagcgtggggggatcattctgacagcccaacgagtacagatggaacgcaccagctttgtatacgagcagagggagcgagagcgcgcgttacaggaaacgtacaacgcatcgaataacgccagcgtccagagagaaagcctgtattacggtgataagatcaatacccagcttgaggccggttcccgcaatcagggcattgatgagtacggtaaagcgcagggatggcccgaagaaaaaatagcgttcgagaaaacgctgtggcagcagaaagcagcctctggcgcatttgatctgttcgtcagccagcagaaacaatcgatgatggggccgggcggcgctctcccgactacaggcacaccagaccttagccagctggcatcggccaatatgtacgttgaaagccggggacagcagttccgcgccgatggctcgccgctggtatccggtgctggtgctgtcggcatcgcgcaggtgatggagaaaactggcccggaagccgcaaaatacgccggggtggaatggagccgcgagcgctggcttaacgaccctcagtataatctgcagatcggcaacgcatatttcgagcatctgggaagcaaatacggcaacaacccggtgcttactgttgcggcctataatgccgggccgggaatggttgatgactggattaacggtaccaataagacaggtaagaacggaagcctgacgaaaatcggcgatccgcgaaaaggcgagatatccgacaccgggttcaccgccgctatcccgctgaaagaaacccgggaacatgtgcagaaggtgctgggcgtcgccgccggcattccaccggacgcgacaatcggttccatatcccggatgccgttctggaataaaatgtcaccgcaggatcagagcagtgccattgataagatgtcagcgctgtacgacatgcgggcttctgctggtcgcgtcgcgctgcaaagtaaaatgcaggatgatcttgcgcttctggaagcgggtaaaaacgtttccccgataacacctgaagcgtgggcctccaccctgcccgttcaggcgacgccggcagagcgcatgcaactggagcagaccttccgccattatcagcaggcgatgagccttcagcccgtctatcagtccatcgtacagggaacaccccagcaggggctggccgcagtgcaggcattgcagccgcaggaatccgcccctgattttaaataccagcaggagctgtacaccaccgcgcaggctaagctgactcaggtactgaaagcccgcgaagcagatcccggcggctggcttgtgcaaaatgatgaaacaacccaaaaagcattctcagcctactcagctaaccctgagctactgggtgattatgtgaaaagtgtcattatccaaaaacaacgttttggcattaaaagcgatgcagttttacccaaagcgcaggcggaggctttatctcaggctctgttgcagtcaacaccggaaaaccagtcaagactactggacaccattcataaaggtaccggcggtggcgcgccttacatgaccacactcaaacaaatagcggtaaatgctccctctgcggcggtcgccggcgtcctgatggataagccttcgtcgttacttgctcaggaaaactggatcaatcctgatatcaggatttcaccttcgcaagcgtcaaaaaccattctcgcgggttctgctgcaagaagagggactaaagacgcgaaagggatgacgatgcctaaagaaaacgacatgcgccttgagttctccggtgccgtgcagaatgcattcgccggtgatgctcagggggccgcaatggcgtatgaggtggcaaaggattactacgcgggaataatggcccagaagggggattactctggtgttctggatgatgatgtctggaagcaggccgttaatgtgtcaactggcggtgttcatgactataacggcatggggtacgttctgctgccctggggtatgtcgccagaacagtttgataaacaggtcgatcaggcatggcaaacacaggtcactggggcggggatcaaagcaccaccgggacagtatggcctgcaaagttacggtgacagccagtatctggttaagctcggtgcagggtatctgcttaagtctgatggctctccggtaatactggatcttactcagcagcgtcagcgctttatagagggcataccgcaatga

SEQ ID NO: 180072 - DNA, 300 bp, Klebsiella oxytoca
atgcctgttgtcgtgtcttatcgttatgactggttccgtataatcgaggacatttcacgagagggcctgacactcagtgatattgcgaaagaactggatgtatcaaaaacagcggtaattggctggaagcaaggggctgaacctcgttactttgcgggtgatgcccttatatctttgtggtgccacattaaacaaagacggaaggaagacctcccgactcaaattctgtcgcgaaagttcattcacaactacacatcccggcgttacgcaaacactcaaaagcatgcagacaccgcatag

SEQ ID NO: 180073 - DNA, 498 bp, Klebsiella oxytoca
atgaatgaaatcaaatcagaagtttactcatgggctgctgagaccagccaggagcatgttgctattgagatctgtaaggcgtggtttgtcagtggagaatgttcagagtacataaaactctacccaatggatgatgcttacggccaggctgactggcgggccataaataacaaccggcaaaaactgttccggtggtttgatgggcagtctgccagagcagtcgcaagaacaaggttacttcgaaacgctattttgacggcattacctgctgaacgaagggccagagtttccggggataaaactacttacctgctgattatcctgaccaaagaagtttccagaattatcactgcggctttattgcaagagcgtgacatgtcacaacagattaattccctgcgtaaagtgctcgatagccttgaaagcagcttaaatggcgttgacaaaacgcgcgcgcgcgcgagtacaaagagggctgaaacacgtcaactcccgtag

SEQ ID NO: 180074 - DNA, 276 bp, Klebsiella oxytoca
gtggataaacgcgatccatgtatgacgctaatcaccgatgaggaaatgctagaaatcacaggtgcgcaattcccttcaaagcagtgccagatactaaaagatcacggtatagcttttgtacgaagactggacggccgtccaagaacaacatggttcaatttcaaccatccactgcatagccgtcatcactctttcgaagaagagatattggaagatgaggagccagattttgatgcaatttacagagggaaagaaaaaaccaacccgaaacgctag

SEQ ID NO: 180075 - DNA, 1275 bp, Klebsiella oxytoca
atgtcactgactgatatcaaagcaaaaaatgcaaaaccccttaagaaggaatacaagctgaccgatggctttggcatgttccttcgcgttacccccaaaggttcaaaatactggcaaatggcctaccgtttcgaagggaagcaaaaaatcttctccataggtgtttatcctgctgtttcccttggtgatgcaagacaacgccgtgatgaggccagaaggcttcttgctcagggcattgaccctaatgcaaagaaacaggcagaggttaaagagcttaaagccaaacgtgataatacacgctccttcagaacagtagccaaagcgtggttctctacgaaaacaaaatggtctgatgattatggtgatgccgtatggaagcgccttgaaacttatgtcttcccggtaatcggtgacaaagatgttgccgaactggatacgggtgatctgctggttccggtgaaaaaggttgaggcacttggttatcttgaagttgccatgcgcattcaacaatacattacggcaatcctgcgtcatgccgtccagcaaaagctgatacgccataacccagcctatgatatggaaggtgcagttcagaaaccacaaactgaacaccgccctgcacttgagctggaagaaataccccagctactgaacaaaattgccgaatacaaaggccgcaggttaaccatactggcaatacagctcaatctgatgattttcattcgttccagtgagctgcgtttcgctcgctggtctgaaattgatttcaaaagtaagttatgggtgatacccgaacagcgtgaagcgattgaaaacgtcaaacattcaactcgtggggctaaaatgaagcgtaagcacttcgttcccctttgtaagcaagccatgaagatactcaaagagatccgacaactgacttatgaagaaggtcaagatgatgggttaatctttactggctgttatgactcgtttaagcccatgagtgaaaacaccatcaacaaagctcttcgcaatatgggctatgacacgaagcaggacatctgtggacacggtttccgaacactggcctgtagtgccttaattgagtccgggctatggtcagaagacgctgtagagcttcagatgagccataaggaaagcaacagtgtccgggcagcttatacccacaaggctaaacaccttgaacagcgccgcctgatgcttcagtggtgggctgatttccttgatgctaacagcaacgatatggtcaggccgtttgagtttgcttcaaataaataa

SEQ ID NO: 180076 - DNA, 1389 bp, Klebsiella oxytoca
atggctaaactgaacaagaaacaacttgctttactcaaagaaatacctgccgatcaactcatgcaaataatttgtgatattgcagaggataatggtcaggcaaaatcctttcttattaataaatatctgttaactccagaagaatcactgaaaaaggctgaggctgaatacaaaagggtaattaaaacaaaacgcttttatgattattatgaagcagcgattttttttgaggggctatacaggaatgtcatatttccacttgaaaagacggtatcaacgctgcctgaaaaaaccgaggcgttttgccatgatttactgctctcatttgataaagtcagcgaaattgcagatacatcagatggatcatggatggactattataatggtgctgtcgaaatatggttaaaatccctgtccctacaaaaagacaaaagcattgatgttgtagcggataaaataatttccgtacttaaaggtgatgtgtattttaactttgatatttttgataagtataaaaaagaactgggatacaatgttattcgtgttttaagggaaagtcttcttaagacaggtgatgtcaatggtgctgttgagttaagtctgtatatcagggatgttgatttcatcaggcaatgctttgagaaaagaaaactgaatcagccagaatatatcattaagtttgctgagttgctggttgatgaactgtgtactgaggagtccattcaggttctcaataaaatcaaagaagataaatcagttgatcaggcagggcttcgtgataaatggactgaggtgttggctctggcgttgattgaagaaggcgagattcagcaggcaaaaacaatttgtatagacggatttaagaacaggtgtgatgttattttttataatatctataatcgggtagagaaaaataatgactcactggatttgttctctggcatagcaaagaaaaaaggctttccgtttgttattcttttcttgtccgggacagatagttatggaaaacttgattctgaagtcatgaatgcgagtgaaaatgaaatcgcagagatgatgtctttattacgcggttcttttgttcgtaccttatcgagtgagctttacaggcatggctatgcatgttctgcaactctgctccgtagagtgctggcagaggacagtatcagtcgttctcagagtaaatactacacctatgcggcatctgatatgaaaaaaagtattgattacagtaaagatattacatggactgaaaaaatcccttcaacagaagagtatttaaaatccctgtttattgagcacaaaagaaaatacgcactctgggaaataatgctggaaaaaatcgctggtttagcgatagagaaagattcagtatcatattcagcatag

SEQ ID NO: 180077 - DNA, 2004 bp, Klebsiella oxytoca
atgaacaaactttcgcctgaaatgcccgaactgcaatcaatgaatatcactgctgataacatcaccaagcttaaatcattgtttcctgaagcttttaatgaagacagtattgattttgaggttttaaagcagcttttgggtgaaaatgtagacgacaaagaagaacgctatggcctgaactggcatggtaagcgtcaggctcgtcagcttgctcttaccccttcccgtggcaccttgcgtccatgcaaagatgaaagcgttgattgggataataccaagaacctcatgatcgagggcgataaccttgaagtgttaaaacttcttcaaaaaagttacgctggaaaagttaagcttatttatatcgatcctccctataacaccgggaaagattttgtttatcctgataacttccaagataatatgaaaaattatctcgaacttactggacaaacagaagatggaacacgtttaagcacaaatacagaaaccagcggtcgttatcacactgactggttaaatatgatttaccctcgaattaaacttgctaaaaatttattaaaaaaagatggtatatttattgccagtatcgatgatgcggaactgagcaattttaaaatcgtgctaaatgaaattttcggagaagaaaaccacctcggcactctggtttgggatagaaatagaaaaaatgatgccaagtttatttctgtaggccatgagtatatgttggtttacgctaaagatattcagtcattaataaataacaacatagtcttaagagaagagagagaaggattagaagaagccaaggtaatatataaaagattagttaaggaatatggcgacgattgggataaaataaaatccggatggattaaatggtttgataacattccattatcagatcccaagagacgcatgatgcgttttgtaaaagttggttctcggggaccatatcgagacgatggaaatataagctggcccggcggaaatggaccaagatacgaagttttgcatcctataacaaaaaaaccagttccagttccttcaagaggatgggtttatccaaatgaattgagattctgggaggagtacaataaagggaaagtcgtatttgggcctgatcatacaacatcagctagaattgcatcatatctttttgagagtgaaggacaagttttacctagtgttttttatagttatgcacaaacttctactcaggattttttatcattaatgggtgagaaagttttcgataaccccaaaagcagaaaagatatagcacgcttgattaattactttacaaaagaagacgatcttatcttggacttttttgctggttctggaaccacgggacattctgtttatgacattaatgcgcaaaagagtgccaacagacgctttatccttgttcagttgccagagcgtttacatacaagtgtgaaagaacaaaaaatcgcttacgaattctgtaataaaaatggaaaaaaagtaaatatcactgaaataactaaagaacgtctgcgccgagcaggtaaaaaggttcgtgaagataatccagactggaatggtgatattggttttcgtgtatttaaacttgatacatccaatattcgcccgtgggaagcaacagcggaaagtctttcacaacaacttgatgcctatataagcccaattgttgaaggacgtagtgaagaagacctacttgctgaattaatgcttaaacgtggtatcgacctgagtgttaacgttgaaaaccagcagtttgatggattaactgtttcttgtgttgacggtggcaaattgtttacctgctttgctaaacaaatccctgcatcttcagtagaagaactgaccaaggggatcatcgactggcataagagtttgaaggctggcaaagatactgtctgctatatccttgatgacgcatttgaaaataacgttgctaaaacaaatctttgcgccattctggaacaacacggcctgactaacctgcatagcctttaa

SEQ ID NO: 180078 - DNA, 2961 bp, Klebsiella oxytoca
atgaaactacattttgaatctgaccttaaatatcaacacaacgctataacatcagtctgcgatctgtttgaagggcaggaaaaatgggagagcgaaatgactgtgctggccccagctcagggcgctctctcatttgaaggttctacgggttcaatgcctgttaacccacaaatacccaaagatgatgtactgcttaaaaatctgaacaatgttcagttgaaaaatcagcttcctccctcgcccattctcgatagccatgattttactgtcgagatggaaacagggactggtaagacgtatgtttatcttcgcaccatgcttgagttgaataaacgttatggcatgagcaaatttatcatcgtagttccttccgttgccatcaaggaaggcgtttataaaacactacagatcacggaagagcatttcaaaagcctgtatgcgggtattccatacgaatactacctatatgattctgcaaaacctgctgatgtgcgaaattttgcgaccagttctgttatgcagataatggtaatgacggtgggtgcgatcaacaaaaaagacgttaacaagctatatcagtccagtgaaaaaacaactgtggacgatctggataagcccattgatttaatccgtgctacacgtccaattattattgtcgatgaaccgcaaagtgttgatggtggcttgaacggtgcgggtaaaaccgcacttgatgctatgcaccctatgttcaccttacgctattcagcaacacatattcataaacatcatatggtgtaccgccttgatgccattgatgcttacaaccaaaaactggtcaaacagatcgaggttgccgggcttgaagtccaaaatgcaagtaatagcccctatgtaaaactggtcagtattaacaataagaagaatagcattagcgcgactgttattgttgatatagccgataaaaaagggggcgtaaatcgttctgaaattaccgtgcatgacggtatgacacttgatgacgaaacggggcgtgatatttatcagggatacaggataagtgagatccgcacgggcaaagaaggctatctgacactggaaacgccttctaatacatattatatgaaagtaggtgatgtcgtaggtgatattgacccaatgcttatccagcggcatatgattagacgtacaatccgtgaacatctggataaagagcttcgccttaatcctcagcaaatcaaggttcttaccctatttttcattgataaggttgatttctatcgccagaataacgaagaagggcttcgtgaaccgggtgaatatgctcgtatatttgaagaagaatatctcaaagcgatcaaaagcccagcatataaagatttgctcccttctcatccagaacatgctaaagatattcatgatggttatttctctattgataaaaaaggcggatgggctgaaacaaccgaaagcaataatacaggccgtgaaaatgctgagcgtggttataatctcattatgaaaaataaagagaagcttttgagtttctcgaatccagtgaggtttattttttcacactctgctttgaaagaaggctgggataatccaaatgtattccagatctgtagccttcgtgagatgggaagtgaacgagaacgccgccagactttaggccgtggtcttcgcctgtgcgttaaccaagagggtgaacgtgttcgtgatgatagcattaacattctgactgtcgttgccagtgaaaattatcaagcctacgctgagcgcttacagtctgaaattgagaatgaaacaggcatccgttttggtatcatcgaaaaagatgcgtttgcccatctgatcttctctgattcctcacaagctgtgggtatcgccggttcacatgagatttgggctgaactacagaccgaaggatatctggaaaaatcggggaaaatcacaaaagccctgaaaaacgtgttattcgaagacacttttgttgttagtgagaagtatgcgtcactacaggaacaaattgaaactatcctgcgtaaatcatcagggcgactcaatataaataatgctgatgagcgtaaagtaatcaaataccggaaagaggtcttaaacagccctgaattcgaagcgttatggcagcgcattagtcaaaaaacgctgtaccgtctggcatttgatgaagatgaattgattaaatcctgtacgaaatcactttctgaaatgcagcctgtagcaaaagcaatggtcagtttcagtaaagccaccataaaacaaagccagtcaggtcttggtgttgaagttcagtcaaatggaacgacaagctctgtaatagatgttgcagagcagccactgccagatattcttggtgttctgcaggaaaaaactggactgacaagacgcagtttgagccgcatcctgaaagagagtgaaaaacttgccgattttgctaaaaacccacagcagtttattagtgaagctatcaccagaataaactactgcaagcgcctgtctattgttgatggtattaaatattatccactaaaaggagaggtgtatgcgcaaagcctgtttatggataaagaactgacgggatatgcccgtaatctttttgaaacttcggctaagtcagtttatgaatacgttccaaaagattctgaagtcgaaagccgtttcgctcaggaactcgaagaacaggatgaagttaagctttatgtgaagctgccgggatggtttaaaatcccgacaccattagggacttataatcctgactgggccttagtcattgaggataatggtgaagaacatatctattttgttgtcgagactaaaagtaaacacattggtcttggtaatgaagaagatgcgaaaattacttgtggtaatgctcattttatctcacttaaagaacagatgcttaatcctgcgagatatatgcgctctactagtgtagatgagcttttaagtagcaaataa

SEQ ID NO: 180079 - DNA, 1635 bp, Klebsiella oxytoca
atgaaaattaaaaaaggattctctttactagaattaactcttgttttaggtgttgggacgatagtggcttttatgaagtttcaggatatgaaaaatgaacaggagagtatattggcttctgctgtcgggcaacaaatgaaacagatcggtgaagcagttaatggctatataaatatccgttatgataaattatcaaccttatccaatgctgccggaacaggaaccgatccggggccaagaacctgttcaggttcagtatgtgaaattacttaccagacattgattaacgaaggtttactaccttcaacctacacaggcactaatgctaataaatcctcgtataaaatcatattaaaacgagatggaacttcacctaactatgttattaatggtcttataacgacatcgacggcatggattgaaggcggaaaaacacgttatgatttattagggaaagccatgcaaacagcgggtattgacagtggtatgacgcaatcagcaacgttagcatcaggtttgcagggtgcatggaaagaaacatcaacagtttacagtaatatcaccagtgcaggtcttatggcctatcgtgttggatacgattctgctatgtattctgtttatctccgtcgtgatggaaccctaccgatgacaggtgatttgaatatgggaggaaataatatcaacaatgctaaaaatataacagcatcaggaacaggaacgtttggtggagatgtcaactcagcaggtaatataatagcagcaaaagaaataacagcacataatggatatggtgatacaataactataggtggagacaattatccgggttctttaggaccggattatgaaataagattaggagctaataaaccattaactttacattctcctacttcaagtagaggaggtgatattatatttgatatagatggtaatacaagagtacagaccagattaggtacaatgggatacaaccctaatgatttaccctctggttggggaggtggattaagaacgcttgatgtatatgccgcgggcactctggcaacaggaagtgggggtaatctgacatcatatatgaatgctacgggtgttcatacacagtccaatattacagcctctggaaacatagaggccgccaaaaatgtcaaaggcgctacattagaatccacaggacgcgctacggtgggtgaatttgttcaggttaatggaacagtaagcgagggggattcttgctcaactaatggacttatgggaagaacaggtaatggaactccaatgtattgtgttaacgggtattggtctaatattgtatcaagtaaaacagataatggaggtttaatattgccgggaggtataaagattatgtggggtaaagtatcggggagcctttataaatttcagaataatacttatgaatccgatttcattagaattaaccctacatttattgccaatggaataacgtatagttttaccaagattttaaatgtccagcttactccttttgataagccaaaccagaatcaagaaattatgtggacaacagatacttataataatggattttcatttgcttttagtgcgttaagtagtggtactatgagtggaaattatttagctattggatattag

SEQ ID NO: 180080 - DNA, 696 bp, Klebsiella oxytoca
gtggacaagaccagagatttcattctagaaggactctcccgctttgacttggctgatttgcctggtcgaccttatgactgcgcttttgacctcttggctgcaacgccatcgagaaaaaggctgattatgatgggctttaatggctcgttagctgattcatgcatgactaaccgccagtctattctgcaagattatgaacatccttttatttcaggtattcaagaagggatacaaggaaaatgggggatcactcatcttgctaaaagactccagcaaataccttcttgcctcggttatagctgggaagatgttatttatacaaacgcattaatgatgtgttctcagaatgctgcaaccctgaaaaaagaagcagctcgtcacgagatgacaatgaatgaaatcgaagcaaactcaatggcattttttgagcatgtaacagcccatttgagcgaaccagatttgatcgttgcatatagcaacagtctccagtcactctcagccgcgagtttgttgctaaagcactttggcgatgcaactactctcaaattttctcagccgaaaggctaccacactactttcgcatttatgaccaatcttaacagtagaaatattccggttatctgcgtgcgacacatgtcacgattcaaacctgaagagagttatatcagggcggctgtcaaattaatgggttgttaa

SEQ ID NO: 180081 - DNA, 2343 bp, Klebsiella oxytoca
atgaaaatgaacgtaacggacacggtaaaacaggcgtgcggccactggccgcgcattctcccggcgctgggcatgaaagtgataaaaaaccggcctcaggcgtgcccgatttgtggcggtgatgcccgtagcgaccgctttcgctttgatgaccaggaagggcgcggcacatggtactgcaaccggtgcggcgccggtgacggcctgaaactggttgagaaggtgttcggcatatcggcacctgaggccgcccggaaggtgaacgccgtcaccggtcacctgccgccggtggccccggaggtgatggcggccgcagaagctgaaacggaggctgaccgcaaagcagcggtcgcgctggccgtcagactgctggagaaaacccgcccgaccaccggcaacgcctacctgacccgcaagggctttcccgctctggaatgtctgacgctgaccacgtcgcacaaaaccggcggcgtggcctaccgcgccggtgatgtggttgtaccgctgtatgacgggactggcgcgctggttaacctccagcttattaatgctgagggtcttaaacgcaccctgaagggcgggcaggtcaaaggcgcatgccatcttatcgacgggcagaaacaggccggtaaacgcctgtggatagcagagggttatgcgacggcgcttaccgtgcatcacctgaccggcgaaaccgtcatggtggcgctgtcgtccgtgaaccttctttctctggcgagcctggcccgtcagaaacacccggcctgtcagattatcctcgccgccgaccgtgacctgaacggcaccggccagactaaagccgctgcagccgcagcagcctgtgagggcgttgtcgccctgccgccggtgttcggtgactggaatgatgcgatgatgctgaagggggaggacgccacacggaaagccatttatgccaccatccggccagcggcacaaagccccttcgacaccatgagcgaggcggaatttaccgccatgagcgccagcgataaggcaatgcgggtgcatgagcattacggcgaagcgctggccgtcgatgcgaacggccagctcctgtcccgctatgaaaacggcatctggaaggtgataacgccgtctgattttgcccgcgatgtggccggactgtttcagcgcctgcgcgccccgttctcgtcggggagaattgcctcggtggtggagaccctgaaactgattattccgcagcaggaggcaccggcacgccgtctgattggttttcgcaacggggtactcgatacccaaagcggcctgttcagcccgcacagcaaatcgcactggctgcgcaccctgtgcgacgtggattttaccccgccggtggagggcgaaacgctggagacccatgcgccgaacttctggcgctggctcgaccgggcggccagtggcaacccgacaaaacgtaacgtgattctggccgcgctgtttatggtgctggcgaaccgctacgactggcagctctttctcgaagtcaccggccccggcggcagcgggaaaagtattctcgccgaaatcgccacgatgctggccggagaggataacgccacgtcagccgatatagacacgctggaagacccgcgcaagcgcgcctccctgataggcttctcacttattcgtctgccagaccaggagaaatggagcggtgacggtgccggacttaaggccattaccggcggcgatgcggtctccgttgacccgaaataccagaatccctactcgacgcacattccggcggtcattctggccgtgaataataacccgatgcgcttcaccgaccgcagcggcggcgtgtcacgtcgccgggtaatcatccacttcccggagcagatagccccggaggagcgcgacccgcagctcagggataaaatcgcccgcgagctggccgtgattgtccgccagttaatgcagcagttcagcgacccgatgagcgcccgcgccctgctacagtcgcagcagaactccgacgaggcgctcagtattaaacgcgacgctgacccgacgtttgatttttgcggttatctggaaatgttgccgcagacaaacgggatgtttattggcaatgccagtatcatcccgcgtaattaccgtaaatatctctatcacgcgtatctggcctatatggaggccaacggctacaggaacgtgctcagcctgaaaatgttcgggctggggctgcccatgatgctgaaagagtacgggatgaactatgagaagcggcatacaaagcaggggatacaaaccaacctgtcgctcaaagaagaaagctacggcgactggctgccgaagtgcgacgaacccaccgcgacttaa

SEQ ID NO: 180082 - DNA, 321 bp, Klebsiella oxytoca
atgaaaacgccattaccgcccgtattacgtgccgccctgtatcgccgcgccgtggcctgtgcctggctgaccctgtgcgaacgtcagcaccgctatcctcacctcaccctcgacgcgctggaaagcgccatcgccgccgagctggagggcttctacctgcgccagcacggcgaggaaaaaggccgtctgattgcctgtgcgctgctggaagatttgatgcaggccgggccgctgaaagccgccccgtcgctgtccttcctcgggctcgccgtgatggatgagctctgcgcccgccatatcacatcgcctgtactgcactga

SEQ ID NO: 180083 - DNA, 228 bp, Klebsiella oxytoca
atgagacactccacgattactgcccgtgacctcgaatgccttgagcatatgcgcaatgtcggccagctcgtcagcgatctgatgcaggtgcaggactgtacctccctgcgtcgtgacccgactcagcagttacagctcacctccgtgatttacctgatgaccgcccagctcgacggcgtggtcgaacgctgcaaccaccgctggttcaccggggagggcaacgtatga

SEQ ID NO: 180084 - DNA, 195 bp, Klebsiella oxytoca
atggctactatcctcgccccatcacacccgcagtttgtctttgtgtttgccgctgttcgtcgcgcagaccgtcagccccgcatctgtatgctccgcgccgtcgccggggatgaacacgccgcacgcctttccctcgttcgcgattacgtcctctcgtttgccggtcgtctgccggtggcggaggtgcgcgcatga

SEQ ID NO: 180085 - DNA, 267 bp, Klebsiella oxytoca
atgcacaccgctttttcttccccgtcttctgcccctgccgcgccgctgatgccggtctctgatgccgttcaggagcgctttattcgcctgcccgaagtgatgcatctgtgcgggctgtcccgctccacgatttacgatctcatcagccgggaggctttcccgaaacaaatctcgctcggcggaaaaaacgtggcgtgggcgcagtcggaaatcaccgggtggatggcagaccgtatcgccgaacgcaaccggggctatgacgcatga

SEQ ID NO: 180086 - DNA, 738 bp, Klebsiella oxytoca
atgaccgacaccccctttatccctgattacctgaaaccggcgctggagcgactggccgccgccagagcggcccatcttgaacaggcccgccggatggaggacaccctgacggccatcacccgcgcggaggagcagaaagcggcgctggagaaggacaacgggagcgatacccgcacctggcgcgccgctttccgtgccgggggtgccatgctgaccgatgagctgaaaagcggccatatcgaacgcgtggcccgccgggagctggcgcaggaatgtgacaatctgaccgaagtgctggtctttgaacgtgaccagctgaaagtcgcctgcaacagtaccgcgcgggcattccgccaggcgcatcatgccgtactgtctgaatatgcgaaggaagagctcgaccgcgcgctgaacgacaccctcgggccactggtccgggcgatggtgctgaaagcggatgtgatggcaaacccgctcgccaacaccaccggccatcagggctacaccgagccggagaaagaggtcatgcatcaggtggtgaccttcctgaccaggaaagtgagcgccttctccgtcacaccagccgatgagccggtgctctccctgaccggcttcccggccgtcgcgcttgcgcacatggaccacgacgccgccagcacgcccggcgagcgtaaagtctggcgggagaaaatccgtcagcgcgaggctgacctgaaagcgcgggggctgctgccatga

SEQ ID NO: 180087 - DNA, 246 bp, Klebsiella oxytoca
atgatgcactgtccgttctgcaaaaagtcggcgcatgcccgcacctcacgctatctgtcggagaacgtcaaacagcgctatcaccagtgcaccaatattgagtgctcggcgacgttccgcaccactgaagccatcgacgaggttatccggcccccggcggagaaagcgccgcctgtcgcggagccggtcacacccccggcaccccgtaaagtgcagggctgctacagctcgccataccgtcattaa

SEQ ID NO: 180088 - DNA, 567 bp, Klebsiella oxytoca
atgaccacccttacgctacagcaggcctttgaagcctgtcagaagaacgaaaccgcctggctgaaccgtaaagccgaactggcggccgcagagcaggaatatcaggaacaggtgctggccggggatgaccgtattccgggcagaatgcagacactgcgcgatattatcgatgtcaaaaaatgggagataaatcaggccgccgggcgctatatccgctcccatgaagcggtacagcgcatcagtatccgcaaccggctgaatgactttatgcgggcgcacggcacagagctggccgccacgcttgccccggagctgatggctctcagccagcagcccgcactcctgaccggccatgcgctcgaccgttcggcgcattacctgcgcgaagccctgtccgtgtggctgagtaccggtgaagaaattaattattcggcagaagacagcgatattttaacggccatcggattcaggcctgacgcggcttcacgggtggataatcaggaaaaatacacccccgcacagagcctgatttatgcccgccggcgcacggaactggccggcaggtag

SEQ ID NO: 180089 - DNA, 2157 bp, Klebsiella oxytoca
atgataaacgtcatcaatggttcaacagaaaaacctatgacatcgcaaacattgcgtgaatggcttacatctaaagataacttagatggcactttatacataggttatcctattatcggtactgtagatggtgcatatgaaattgatgctcttttaatatcacctcagctcggagtcttagcttttaatctcattgagggaaataagcttccagagtctattgatgatatacaagatgaatgttttactttactcgagtcaaaattaaaacaatataaagagctcatggagaggcgtagattattagtccctgtaaatgtaattacgatagcgcctgtattaaaatcagactttgatgatatagagggcgattatcctattacaactaatcagcattcattgctgacctatattgacaacttagaatgggatgaaaaacaacattatcctcatctagtttctgtgattcaagcagtatctagagttaaggtggctaaaaaacgagaaaatgtaactaaggatgactctaaaggtgcaatccttatcaaactggatcaatcaataactaatctcgacagccaacaaagcaaagctgtgcttgaaacagtgaatggagtccaacgaattagaggccttgcaggctcagggaaaactattgttctagcaaggaaaatagcatatttatatgccaaaaataaagactggcgtatcgcagtcacgtttaatactcgttcattaaaaaatcaatttaagaaactaattactagtttcgtttacgaacaaacaaatgaactgcctgattgggataaaatacatataattcatgcttggggaagtcctaagattgaaggtatttattataatgcttgcctcgaaaatggtgttacatatgaagactttagcacagcagcatctgtcgctggcagagataaagcatttgcgcatgcctgtggtgagttcttaaaaaaagttagcaaccctcgcccaatgtatgacttgattttgattgatgaagctcaggatttttctattgagttccttaatctttgctataaccttttagacaaaaataaaagactagtatatgcgtatgatgaacttcaaacactcactgaaagctcattgccttccccagaaaaaatttggggtacagatgataatggtaaaccgtacgtcacattgacaaacaatgctaatgaaccagatagagatattattttagataaatgctacagaaatccttcccctatacttactagcgcccatgcacttggctttggtgtttacagagaaatactttctggggtaacgcctgaaatgaaaccaagatattcgcgtcaacttgtacaaatgtttgactatgcacctctatggcaggaaattggttatgaaatacttgatggcgagctgactgaaggtaaagatgttgttatccgcagacgtaaagaagcgagccctgagctcttagaaaaatattgccctcatgacgaaataattcaatttaaatgttttaatgatcctgaagaacagaatcttgccttagttaaggctatagaaaaaaacatcaaagaagatgaactaaaacctgatgatataatggtcatccactcaaaccctctaacaacacgcaccgctgttgctgaggctaggaatatgcttttcaaaagagggatttcttcaactttagcaggtgttagcggttctcctgatgacttttttgaagaaaacgctgtaatgttcacttcaatttatcgggcgaaaggcaatgaagcagcaatggtatatgtaataaatgctcagtattgtgccgaaggcaccggtttaggcactaaaaggaatattttatttacagcaatgacccgtactaaagcttggttaagagttttcggtgtcggtgaaaacatgctgacgattcaaaatgaatttgaacaagtccgtgataacggatatgttttagagttcaaatatccgacagctgaagaaaggaaatatttaagaattgttaatcgcgatatgactgaacaggaaaaaaacaaactattcaaacgtcaaaatcaattggaagaggtcgttcaagaattgttatccggtgaaatacataaagaagacttaccgcatgatgtaattgaaagtctaagaaaagcgttaggattataa

SEQ ID NO: 180090 - DNA, 666 bp, Klebsiella oxytoca
atgctaactttaaaagagatccatgctgacatacttgacgtaacagaaaaagtaatttcggttgggcttagcaataaagaaaactatcctaacgttgagaatttgggaaatggtatatcacagattggaatatctggcgtatctgatttggcggtagccctgaagaaggttccttataaagatctttatgctgctcttgaacatgctaaattttataacttcattttagctgatggcggcatcatccaaatgatatacatattcaaaaataacgttattcaaaaacacaaacttgcttactttccttcccccgactttgaatcattccaaagtgagagtgaattgtatatggatgactgcatttatgtagaaattcttgataaaagagttattcctgtggcagttagatttgattatgactgtacccctggcacattcaaggatttggttcatccaaaaagccatttaactcttggacagtatgagaattgccgaatacctgtttgttcacctataacaccgtctcttttcatcgaatttattctacgcagtttttataacacggcattattaaacttctcggataaaataaatttaaaaatgaaaaggtttcaagagacggcaacgattcttgaaaaagaccgcattcacattcgcgtaaaatga

SEQ ID NO: 180091 - DNA, 1254 bp, Klebsiella oxytoca
atgaagctcaacgccaggcaggtagagaccgcaaagcccaaagacaaaacctacaaaatggctgatggcggcggtttgtatctcgaagtttcggctaaggggtctaaatactggcgcatgaaatacagacgcccctctgacaaaaaagaggatcgcctcgcttttggtgtttggcctaccgtgacgcttgctcaggcaagagcaaagcgcgatgaagccaaaaagctgttagtgcagggcattgatccgaaagccgaacagaaagaagctcaggctgaaaattcgggagcatatactttcgaaaccattgctcgtgaatggcatgccagtaacaagcgctggagtgaagaccatcgatcgcgcgttcttcgctatcttgagctttatatcttccctcatatcggttcgtccgacattcgccagctcaaaaccagccacctgttagccccgattaaaaaggttgatgccagtggcaagcatgacgtcgcgcagcgtcttcagcagcgtgtcacggccattatgcgttatgccgtccagaacgattacatcgactctaaccccgctagtgatatggccggtgctttatcaacaaccaaagcgcgacactatcccgctctaccatcaagccgtttccctgagtttcttgctcgtcttgctgcatatcgtggccgtgtaatgacacggatcgctgtcgaactttccttactaacttttgtgcgttccagtgagttacgtttcgcgcgttgggatgagttcgacttcgataaatctctatggcgagtacctgcaaaacgagaagaaattaaaggtgtgcgttactcgtatcgtggcatgaagatgaaagaggagcatattgttcctctcagtcgacaggcgatgattttgttagagcagcttaagcagattagtggtgataaagagctgctgttcccaggggatcacgacgcggccaaagttatgagtgaaaacacggtgaatagtgcgttgcgtgccatgggttatgatacgaaaaccgaagtttgcgggcacggatttagaacgatggcgcgtggtgcgctcggtgagtcagggttatggagcgatgacgcgatagaacgccagttgagtcactcagagcgtaacaatgtacgtgcggcgtatattcatacttctgagcatttggatgaaaggcgtttaatggtgcaatggtgggctgactatcttgatgctaattttcacagggaaattacgccgtttgattttgctaaaaaataa

SEQ ID NO: 180092 - DNA, 1476 bp, Klebsiella oxytoca
atgaaagtgaaaaaaatatcgttatatacagcaacattattatttacctcctcagcattggctcacggctatgtggaatcgccgccaagtcgggcgtaccaatgtcatttagggaaaaacaccgactgcggttcggtgcagtgggaaccgcaaagcgtcgagcaagcgagcggttttcctgaaggggcaatgccgcctgatggtaaactggccagcgcgggtaaaagcaacttctcgcagctggatagccagagcccgactcgctgggcgaaaaccacgataaagagcggtaaaaataatttcgtctggcaccattctgcgccgcatagaacgactaactggcgttattacattaccaaacagaactgggatcaaaataagccgctgacgcgcagcgattttgaaagtaagccattttgtcaaatcgacggtaatggcgcgacgccggctgtacaggtcacgcactcctgtaatgtacccgatcgcaccggctatcaggttatttatgccgtctgggaaattgccgatacggcaaatagtttttatcaggccattgacgttgatttcggcggcgccagcgatgaaacggagaatgaatccctctggacaacgcagctcgcaggccagcttagcggaaaagatctgcatgcgggagataaagtcattgcccatttctttaacgcgagcggtgaagttcattcgctgcaaacggaattgaccatcgccagcgaagcgcaaggaaaaagcagccagtggtcttacgatctggctgaaactattaataccgcgcatcagggcaagctgcgcgccggggtaaaagggagtgatggcaacattacccccctccacggcgttaaccaggtgtatgtgccaaaagacagcaccgttcaaagcgttacgctgacctacgccgagtcgcagtcagacgatatcgtggaagaatccctgagcgtcgccaacgttaacgcaaccaaaatcgccaacgggaaagcgacggtgacgttcaacgccacggccaggggcaaaatgcatctcaccgccaccgtcaacgaccatgcgggcacgcagaaagggagcattcagcagacgatagataatcgctccctgacggtatctattccgctgaccaacgttcaggcaggccatcatatgctgcgctactctgccagcaatgcgcagggcgccaccctcagccagggggtcattgacctgatgctggaagagagtacggttcagccggatccgaccccgacgcctgcgcctgcgcctgcgggaaactacgactataccttcccggataacctgaaaagctataaggcgggaacgaaagtcatgcagcctaaaaacggcaaagtgtaccaatgtcgcccgttcccctacagcggctactgcgtgcagtggagccagtacgccactcagttcgaaccgggtacaggttctgactgggccatggcatggacggaagtcacccactaa

SEQ ID NO: 180093 - DNA, 1833 bp, Klebsiella oxytoca
atgcccgaaaccaccataataaaactcaccgctccaaccttaaccggcctcaccgccgcgaccgcgcgcaccgaatcgcaacttaacggcctgaccaccgcgaccatcgccgctaccgcctctgcgccattaacccttaataccgcgctggcggcccaccttaccgccgccataaacagcgctgactacgacgggctgatcgccgaagcgcgcctgcttccggcaaacggcaacgctgtccgctatcagtttgtgctgcgcccgtggctgtggtggctgacgctcgccaacaacaaccgcgttttccagaacctcagcgcgcaggaaatcgtcgcgaaagtgtttaaggatgccggatttagcgactacacattccagctcaaaacccaaccccaaaaacgcgaatactgcctgcaatataacgaaagcgacttcaattttgtctcacggctgctggagcaggaggggatcttctggttcttcacccataaagaaggcaagcacacgctggtgctggcggatgataatagcgccttcccggccatttctggcggcaaaaaggtgaagtatcaggcaacatcaagcggcgcccgggaaaccgggatgattcgccaggtagagctgcgtttacaggccatcgcgcaggggtcacatcccggcaatgataaatctgagcagccgaaacagctgatcgccgaaagcgactgcgcagcgctgatggcagggtactggtttaccctcgccgaacatgacgacaaagcattaaatatcgactggctcatcaccgccgtcagccatgaatatgacggtgaacgctatcgcaaccgctttaccgctatcccgaaagccacgccgtatcaaccacagtacgccacgccaaagccgtttatgcatacgcaaaccgcaacggtggttggcaaaaacggagaagaaaactggaccgacaagctcggacgggtaaaggtgcagtttccgtgggatcgggaaggcaaaaacgatgagaccagctcctgctggcttcgggtcgctaccgcctggagcggcaatggttttggcgcgcagtttatcccgcgtatcggccaggaagtggtggtgagctttatcgacggagacccggataagccgctcattaccggctgtgtgtacaacggcgcgaatgccctgccgtatgcgctaccggcgaatcaaacccagtccggtattaaaacccgcagcgaaaaaggcttcaacgaactgcgcttcgacgacaaaaaagatgccgagctgctggcgatgcaggcgcaaaaggacttccagctcaacatactgaacgacagtcacaccacgattagccacgatgaaattcacagcgtcaaaaacgatcgcacccgcaccatcgaagagggcaacgaaaccgtcaccctgaaaaagggcagtcgcacggtgaaaattgacaagggcagcgacatgctggaggtgaaagagaaacgcagcgtaacggtgaagggcgatcaggaacacgccatcgacggtaatgagacgcataaggtaaaaggcaactacacgctcaatgttgacggtaatctgacgattaaggtcagcggcacgctcaccctggagagcggcaaaaccctggacataaagagtggggcgggtcttaacgccagcgcgtcaggcagcatgaagctggatgccgcctgcatcgccagtgaagccaaatcctcactgacccagaaagcggcaaccattagccaggaagctaaggctactctgaccagcaaagccagtgccacccagaccgttgacggcggcgggatgctggtgattaaaggtggtctggtgaaaattaactga

SEQ ID NO: 180094 - DNA, 486 bp, Klebsiella oxytoca
atggaagcgctttttttaaagctcgacaatatcgaaggtgaaagtcaggccaaaggatttgaaaaacagcttgagatcatgaccttcagccataacgtggcgatgccggtcaccaacgatgtcaataataatgaacgcacctcagggcgggcgtatgtcggtgaaatatcgttgaccaagtttgtcgatctcgcgacgccaaagctcaatgagtactgctgtagcgggaaaatgattaaagaagctgtgctgacgttgtgccgtaatgataacggtaaaatgctgccattcatcatatataccctgacgaatgtcgttatctcacatctgagcgttagcggcggttccggcggcaagccggtcgaaacgatgtcgctgaactttaccaaaattaaatgggaaatcaccgctcagaaatcggatagtcagaaagaatgcaacgtctcttccgtttgggatatggcgacgaataaaaaaggtagctga

SEQ ID NO: 180095 - DNA, 393 bp, Klebsiella oxytoca
atgagctgtcccggagtttgtaccggcgcattattgcagtgttcatttggcatcgcgcctggcacgctgaacatactgcccgccaaccgtaccatcgtcagtaacatgccgatggcgaatattatggataacaaaccgtttgtgaacattatgccgttcgggatgtgcagcagtattaccaatccgacggttgccgccgccaccgccgcggcgctcggtgtgctgacgccgatgccctgtattccgacaacgcccgccccatggatgcccggttcgccaacggtgctggtaggaaatatgcccgccctcaccgcccagtcgaagttaatctgcatatggggcggggtaattcaaattagttttccgggacaggtgacgacggtcgtggcatga

SEQ ID NO: 180096 - DNA, 1104 bp, Klebsiella oxytoca
atgaagacgttaattttattgctgctggcctgcttattaccggcttacagttgggcatgccaaacgggtgcaaactcgggcgatatcgctttaactaatttacctccacagatactggttaatgccggtagctactcggcggggaccatcctttatgattcagggcagataacgcatccaaccacctccattacggattgtcggggttggttatatgcactgttcggatggagctcggggaatgcgggcaccttagtgggggataacatctactcgacctccgtgcagggtatcggtattcgcgtcaaattctggctcaatatcacgggtgaatatggtggtgataacgatgattttaatgctgactacagcgttcatcatatcggtgatgcagacttgtatctgggaaaacctaatggatcttttgatgacaaggcaagcacatattatgcgccaacgtaccaggtccagcttgtggcaacggggggagctattgccagtaacagcacgctgacgctggccgatccgatttccacggtttctattctggatcttgacggaacgatggctatttcccagctgcacgtgacgggctcgacaaaaatccagctgaccccgatggggtgttcggttgattcgaccgcgctgaatttccaaatgggctcagtgaaaacaagtgagtttaatctttctaacaaagctggctcagctcagcaaacgctgaccctaacctgtgagccgggaacattcgtggcgatgcgcgttacggcgccagaagcggagggtgataattccgatcataccgttattgcgttaacgtccggcgaaaacgtagcgaccggcgttggagtacagctgaatctttataacacaccattaatcgtgaataatgcaatctacagggtattttcagaatcgaaaagaacgactgtgaccaaccccggctcggaggccagctatacaatattcaccgatcctgataatcccggcggggcggcggcatcgaacgtcctgacgtttaccgcgaactattacaaaaccggatctaacgtgacgccaggcaccgcgaatgcgagcggaacgataacctttatctaccaataa

SEQ ID NO: 180097 - DNA, 615 bp, Klebsiella oxytoca
atgatgaataactggatgattgccttgatacataaattaagaatggaattaatgagggtaaataatggcgggcgattaatgaaatcgttcgaggtatttattatcactatcggacttgcgttgatgtttgtaaggccagcctgggcttatgacgccaatagtactgttaatttcaatatcaccggtaagattgaagagcccgtatgtgaggtatcggtaaaaccctccagcgctatcgatttaggaacggtttcctatcaaagtttgagcggtaaaccgggcgcgagtagcgcggctaagatagtttcaatcgcctttgataattgctcaaagggtacggcgtcagtgacgctaatgtttagcggtattgtatttgttggcaacgatatcaatgtatatatgaatgagcttttttctggtgctcaggacgtgtggctacagttgcaaagcgcggtggaccagaaaaacctgggaccaggtgatagctatacctattttttcactgatggcgctgaacatgtttttaatatgatcgcaagaatgtatacgccgaatggtcgggtgacggcgggcagtgtctcctatacggtcacgttcaatgttgcctataaatga

SEQ ID NO: 180098 - DNA, 2589 bp, Klebsiella oxytoca
atgactatggaatgccgggaccaaaatataccgccatcattcaataacgttggacagaattttacattcctgttgaaacgtggctacgttgccattatttcctgctttatcactattccgttacccgttatcgcaggtgagtatttcaatcctcacctgctggaggtcaatgaaaccggtacaacggccgtcgacctgagctatatttcccaggaaaccgtcccgccgggcgaatataaccttgatgtttatattaacgacgaatttattgcttccgaatcaatcagcttcacgcaacagagtgaagatcgtgacgcttcttcaccctgtatcagcgtcgcgcatctgaaagcgtggtcaatcaaaacggaaaattatcccgagctcacggtcgcgggttcccgctgtgcccgactatccgcaatccctggatggggaaccacggtattactttcacaacagcgcgttgattttaacgtgcctcaggtcgcggtgatgcatcatccgcggggatatgtccctgaaagccggtggcaacagggtattaccgcggggctacttaactataatctctccgggcaaaagaccgatccgcggcacggcggcgaagcgacgtccagccagtttgtgagcctgcagccgggtttaaacgtcgggccgtggcgtttacggaactacagtactctcaaccataatgatgacggcaaccagtgggactcggtctacagctatatttcacgtgatatccaggccctgaaaggccagctgatcctgggtcagacctatacgtcatcaagcgtgttcgacagtattagcttcaccgggctacagctgaactcagataaagagatgctgccggatagcatgaatggttttgcgccggtcattaaaggtatcgcccgcaccaccgccgacgtgacggtctatcagaacggatacagcatttataaaacaacggttccccctggcgcgtttgaaataaacgatctttacccaaccgggagcgcgggcgatctgaatgtgacggtaaaagagtccgatggcagtgaacagagctttgtggtgccttttgcttcgctggcgattttgcagcgcgagggccagatagattacgccctgagcagcggtaaaacgcgttcggggagttccggcggaaaagaatatagcttcctgcaatctaacattgcctggggagcatcgagcaacgtcacgctgtatagcggttttcagcagctggagaacaaatacagtaatgttatcctgggcgccgggcttaacctgggcacgatcggcgcgctctccctcgatgcgtcccagtcccgggcggatataaaagagacgccaacgtcgaatcacacgtcatccagcgaagggcaatcttatcgcgtgcgctttagcaaagatattccgcagacgggaaccaacttctccgttgccgggtatcgttattcaacccatggctattattctctgcagaattttattgataggtcgaatgcgcatagcgggtgctgttcatcaacggggcggactaaagatcgttttgacgcttcagcctctcagactctctcagggtatggttcactctccttctctttggtcagtgaatcttattgggataattcacgcatggagtcgttgggcgtgagctacagcaataccattggccgcatttcctatttcattaactattcctatagtcgaaatgtccagagttcaggccagaatagcgatagttctcagatcagcgataaccttatttcactcacggtgagcgtgccttttggtgcggatatctcggccagctacaatatgaacagcagccggatgggcgacacgacccatagcctgggtttaagcggttcggcttttgcggaccgttctctgaactggaatatgcaggagggttacaatgccagcgctaaaaggacttccggcaacgtcaatctcaactatcagggttcaaaaggtgaagtcaccgcgggatacgggtatgacagctatagcgcccactataattactcgctacgcggtgggatgctggcccattccagtggaataacgctgtcacgctatctgggcgaaagcgttgcgctggttgaagcgcctggcgtcagcaatattgcggtgcgcgggcagactaacgtgatgaccgactctgccggatacgccgttgtacccttcgtacggccctaccatgaaaataatctctctcttgatgaacagcaggtctcgggagcggaaatcgataatattgccaaaacggtggtcccgacgcgcaatgcgattgtaaaagttaaatataatacctggattggctataaggcgatgatgactttgcgttttaataataaagaggtcccttttggcgccgttattacattagatgatgcaagccagcaacctcaagaaaaacgcagcactatcgtaggggattccggacaggcctatctgaccgggctatctgaaaaaggccggttatttgtgaagtggggtgatagcaaaaatagccaatgctatgttaactatgatttatccaccaataaatcggttgatgatatcgttttttatgcagcggattgccgatga

SEQ ID NO: 180099 - DNA, 678 bp, Klebsiella oxytoca
atgatgtatcatattcccgccgttctcagctctcaggaagtggacgattttatcgctcagctgcagcaggcggaatgggtcgacgggcgcgtgacgaccggcgatctgggcgcccaggtcaaaaataaccagcaggttgatacccacagcaatcgttacggcgaacttcagggcaacgtactggcggcgctgaatcgcagctcgctgttttttgccgccgcgctgccgaaagcgatttccagcccgctgtttaatcgttatcagcagagcgaaacttatggtttccacgtcgacggcgcggtgcgcagccaggcgcagggaggctggatgcgcaccgatctttccgccacgctctttttaagccccccggagagctacgaaggcggtgagctggtcgtgaacgatacctacggacagcattcggttaagctccctgccggggacctggtgctctatccttcaagcagcctgcactgcgtcaccccggtgacctcaggcgttcgcgtcgcctcgttcttgtgggttcagtcaatgatccgcgacgataaacgccgcagtatgctgtttgaactggatggcaatattcagaaattaaaaagccgccacggcgaaagtgacgaagtcctgtctctgcttaatctgtaccataacctgctgcgcgaatggtcagagatctga

SEQ ID NO: 180100 - DNA, 717 bp, Klebsiella oxytoca
atgcaacaacctcaagtgcagtcacaatcatcggttctatcagtcccttgcttccataccgtctaccatgagcacggtcgttacaaaatcatcaatggcggctcttttgtccatgatggtcatgaataccctattaactccaaaggatctggtgttcggcatgatatccttgtggcgatggtcaacgagctaaaagcagtgctgggattttatagccgagtgttccttacccgttttgatcttcatctccctgaattcacttctgtagaagctggtaacaaatacatacgtcaactgttcaagcgattacgtgcacgtctggagtctaggaacaacggcttttcggaaaaaataatcaactttgcttatggctgggtgtgtgaacaggaaaaagcatcacaaccccattaccattgctggattgcgcttccacataggctggtcaactggtttggtactccggacagagggatagctggtattattactgaagtctggatgaaactgacgggtggtaaagcgacgctggtaaacttgtctaaggctactaaagactatcctgatcactacgttgttcaccgtgatgctcctgagtcacttgaaggcccggtattctggttatcctatctggcaaaagagagaagtaagttgcagacggggaagggaacacgaaactattcaacatcgaagctgagttgcaaaacgcagaattcgtaa

SEQ ID NO: 180101 - DNA, 699 bp, Klebsiella oxytoca
atgaatgttagaattcaagcaattcagataaaccaaataaacatatacaatttaaatgcatttcctgaagaccgaattagagcactaatcagtgaacttaacgtccactatgagaaaataaataattaccttgaggcggaggtttcgggggaaaaactaaatgtagaagttattgactccctagcaaagctaaatgaaatcaacaggcttgcgccataccgaatggataacaatttttatagtggtgactttaggttgggtgtggatatactggattctgttattgcacttctcacaacagatgctgggcatcaaagtactaaaaacaatcttctgagcctaggttggtctcttctcggtaagctttacagcttcacatatgaaaacttggtttattctgctttactataccagtggttaaaaagcaaaaaattggttagaagcagcaacatcactcattggagaactagttatggcaactataattcaactagaattaagtttgagccttcagattgtgagctaaatgatttttttactgaaaatcaacaaaaaatttttgagtatatggtgtttgaaatgaatccgaacaaagaagaaattgatccattttcaaattcacaagctgttgatttctatagttatcatcagttattaagccagtttgaaaaaagaagtgtaggtaaggagtactcctga

SEQ ID NO: 180102 - DNA, 624 bp, Klebsiella oxytoca
atgaatgtccgtatctattgccgcgcatctacagaaggccaacatgccgatcgtgcactgattagcctgcgcgaatttgcgcaaagcaagaactggcagattgccgaagagtacattgagaatgcaagcggtgcgaaactggatcgcgtagaactaatgcgcctccttgaagaagcccaaccgggcgatctgcttcttattgaagcgattgaccgtctcagccgtcttaaacatgaagaatgggctgaactcaaagctacgctgaatagtaaagggctggttattgtatcaatggatttgccaaccagttggcagatggttgaaatgtccgggaatgaccttaccagtggcattttgcgtgcagtcaatgccatgctgatcgacatcctcgcaacaatggcacgacaagattatgagacccggcgtaaacgtcaggcgcaggggatcgcgaaagcaaaacaggcaggtttgtacacggggaaagaaaaagatctggaagcccgtgagacggttcgcgaaatgctggcgcagaacgttaaaccagcccacataatgaaagcagcaggtatcagtcgcgccacgttttaccgaatcaagaaggagttagtaagctactcaaactga

SEQ ID NO: 180103 - DNA, 951 bp, Klebsiella oxytoca
atggcgatcaatcttgataagccacagcgttggaaagaagacgtagcgcgttctgtagatatgtataatcaatggtttttagatttcgcgccaggaacttttcgtgctacgcgaatttcagctacagcttccgttgaagctagccttcttgtgacgtcatatctgcgggatattcgaccacaaaccatgcgagaaacccctagcattcttgctacgttaaggatggctacctgtccaccacttgcggttgatagattgatcgggctagctggtgtaaatcctagcttagtcaaaaccatggagaaggataacagactgcccgtacgcatggcagcagatgtcctcgatcgagagttgcaaaagattggggagatcgtggagcgaatggcagatccggatatttttgtatggctagcccgaggggatgaacctaaacaagaggaaatccaccgggccgcgacaatcgtagccgatcggctatgtggtgctcaggccaatcccataatccgtaatgagcaggaaaagcgacagctaacaaaggtcaaagcatggttagaagcaaggggatatactgaaatagactccaacgcccgcgttaactttttggagatggaacccggcacgttcagctttcgtcttaacgtaaaagtccgtaataatacggtcaatatccccgttgatgcagtcataatgcctctcaatgcagaagaaggtgatttgcctctgttgattgaggccaagtctgcgggggatttcacaaatacgaataaacggcgcaaggaagaggccacaaaaatggcacagctcaaacaatcttatggggagagtgtacgctttgtactattcctatgtggttacttcgacagcggatatttaggttacgaagctgctgaaggaattgactggatttgggaacaccgaattgatgacatggcagagctggggttgtga

SEQ ID NO: 180104 - DNA, 1512 bp, Klebsiella oxytoca
atgattgaaaaattggaagcagagcggttatccatacaatctgccttagacaaaaagaaaacttctgcggaacgaaataggcttggtcagtacgccactccgtcggcgctagctcaggacatcctaacttatgctaaagggttattgcctaagaactatccaatcagttttcttgatccagcgctaggtagtggtgcgttctacgctgctctgaagcgagtttttgcttctgatgcggatttgattgcacatgcggctgcgtttgaaattgatccacactatggcaaaccagctcaaaccctttgggcacccttgggactacacttgactcatggtgattttaccaagtttgaacccaacccacgttttaatttgatcatatgtaatccaccttatgttcggcatcatcatttgtctgccgatgacaaggtgagactacagaagcggagtttcgaagctagtgattgcaaattgagtgggttcgctgggctttatgcgcattttctgctgcaagcccatgcttggatggctcctggcgcgattgctggatggttaatcccgtccgaattcatggatgttaactacggacatgaagtaaaacgttacttgttggaaaaagtgaccctgctgaaaattcatcgattttctcctaatgatgttcagtttagtgatgcacttgtttcttctgcagtagtgtggtttaagaatgaattgccaaccaaagagaaccaaacgatttttacctttggaggcagccttttatctccgcaagttgaaaaggctttgtgtcgaaaggatcttgcagaagaaggaaagtggactcggtttcccacatatgatgttcgagataaaaacgttacgggaacccagcagcttggtgagttgttttttgtgaagcgggggttagctacaggcgacaataagttttttgtgctaactgatcagcaggtacaggagcgaaaccttccactggcagttttacgacccatcctgcctagcccacgctatgtagaaggtgatgaaatattgggtgatgctgatggtatgcccgataatgttagtcgtatgttcttgcttgatcctaaaatggatgaggatgaaattagagatacctatccaacagtggcagcttatttagatgaagggaaagctgctggcgttgatgccggttatttatgtcgtggaagaaagcgatggtatgaccaagagcagcgaccaccagctccgattgtctgtacatatatggggcgttccgatagcaagagcgggaggccgtttcgcttcattcgtaaccgttctcaagcaacggtggcgaactcctatttagcattgtatcccaagcctgctttattggaattgttaaaccaagatccaaagctcattgacagtatatggcaacaacttaacaatatcccttcagagatcttattgggtgaaggtcgggtttatggtggtggtttgcacaagctggaaccaaaagaattgagcaaagtacctttaaaactatcctag

SEQ ID NO: 180105 - DNA, 609 bp, Klebsiella oxytoca
atgaatgcatcatacgtacactatattaaaaaatccgttatagctgttgctataatttatggcatcggtaacattttgtacggactatcaaccgctccagatcaacttaacacaccggaaacaaaggtcgttgaaaatactaatacaaccccgtcacaccaaccaacggaaccgccaaagccactgacaattgacatattcccaaggatgtacacaactggggaggtatatacaagatttcaacaacatgaattccgggcaacaaatgacttcaagaattgccgattgatggttacaggaaaaatagaaaatattggtactgttactttcagcaaaaaacctctggtaaccttaagtattcccggttctgatcaggggctgaagttcatattcgaagatacggattccaataacgacgaagtggctgcgttggatatcggaaaatcgatagtgatcgccgggataaatgcagaaaaaggatcctttggtggcgtatttctcgaggactctatactaatgtcagacatgatctccaaggaaccacacaaacaacgacaaattcttgttcccagtggtggaatttttgacagagtgatttgtcgtaagtaa

SEQ ID NO: 180106 - DNA, 765 bp, Klebsiella oxytoca
atgaaaaccttaataaaatcgttaaaaatcatggcgtcaagtgttgccctcatttctggcatgacagctgcctccagtaccgtctatttattgccagaggcaaaatcagcaggcgtagcaagtagtaatcaaaacgcgctaatgtttctcgggatggacaggaatgcgaatctgaagggaatatgcttcacaatggcaaagcaatcgccgtcgctcgtaccgatggtagacatcacagctactacagataacggcagattcatcatgcacgggctacgcccgaagcatagtgacaagacgaaagaattggtctgttcactcggttcagaagccggggatttcttgactggccttgcaaagtcatcagttgttaacgtaaagctggatttcaatggggaggtccgtagttacagtttcgacaccacagagttcggaaaaatgttgaccgacaatgggaaggatgcgtgggaaaaagctgctaaagattatgctcagggagtaagggcaccctttttttatgataacattcgcgaagtccctaaaagcaatgcaacacctccaaatgttgaaacgcacggctataaagctagcgatgataaattaaattctgtctggaaaagtcttagccctgaaacactgaaacgtttactcccctctcaaagggagtggataaagggaaaattagtttgcaagaatgaacaaaaatgtcttaccgacatgacgaaaaatcgtattctcgaactggaagctgaaaatggaaagtaa

SEQ ID NO: 180107 - DNA, 1488 bp, Klebsiella oxytoca
atgaaacaaaacggacaagcttactcttacataagattttcatcaaagaaacaagagcaaggcgactctgtaagacgtcaaaccgagcttgcagaacagtacgcacatgcgaataacttgattctatcagataagaactttcaagacctcggaatctcagcattcaaggagggaagcagaccttcactcggtgatatgctcgaagcaatagagaaaggtcagatcgaacaaggctcaactatcatcattgaatcgttagaccgcctgagtcgccgaggcatcgatgtgactcaacagataattaagtcgattctgcaacacaacgtctttatcgcttcattggtcgatggtctattactgaaccgagaatccgtcaacgacctcgtaagtgttatcaggatagctctagcagctgaccttgcatataaagagtccgagaaaaagtcacagcgtctacgagaaacaaaaggacaacagcgacaacgagcgttaaacggtgaagttatcaacaaaatcctacctttctggttagaacgaaaacaggataaaattgtttttagtgatagattggatacagtcaaaagaatcatagagttacgaagaaaaggacttggaacaaataaaatcgctagaacgttaaatgatgaagggcataaaccattacgttctgctggttggaatcatacaactgtaggaaaaacaatcaactcagttgcactttacggtgcataccaaacatcagagacgaccaaagaccggaaagtcattctgcttgatatcatagagaattattaccctgctgttatcagcaaagatgaattcatacttttacagtctgatcagaaacagaacaaacctggatataagtctgaacacaatgctttcgcaggaatattaaaacacgaatgtggaggagcccttgtcagaaaattccatgtcgtttctggaaaaacatatcaataccatgtttgtgctaacgcaagagatggaaaatgtcacgtaacaaagaattttaaaaatattgaagtagcactctatcggataatgaaagaacttaaagtcgagaagaacaccaattttgatcaaacattactagcagaacgggatacaataaaagcgaagatccaacggctaaacgatgtgcttatggagttttcggaatcgcctagaagtgtaatacaaacaatacataacttagagaaaaaagtagaggaacttgaagcaaaaatcaagatgcagaataatatgctaatatcagagcaggcttttgattttaatttattgcaggagattcaacagccccaagaactgaacatgatgcttaagcgaatcatagaaaatataaccatctataatattggtaaaaaatggagaataaaagttttatacagaaacagaaacgttcagagcttcatttgggatggtgaaaaaacgagctttatttccgatactaaaaaaatactggatcttgctaactcatggatttaa

SEQ ID NO: 180108 - DNA, 894 bp, Klebsiella oxytoca
gtggcgggtgtagtgcggataaggcgcagcagcgcctttgggaaattcagccactctgcgaactgcaaggggggattctgcgctctgctcccgggggcggcgcttaacgcgccttgcccgggctacagattcatcgccgtctgcgggccggtagccggacagatgcgcagcatcgcctccggggagttcagtcactctgcgaactgcaaggggggattctgcgctctgctcccgggggcggcgcttaacgcgccttgcccgggctacagattcatcgccgtctgcgggccggtagccggacagatgcgcagcatcgcctccggggagttcagtcactctgcgaactgcaaggggggattctgcgctctgctcccgggggcggcgcttaacgcgccttgcccgggctacagattcatcgccgtctgcgggccggtagccggacagatgcgcagcatcgcctccggggagttcagtcactctgcgaactgcaaggggggattctgcgctctgctcccgggggcggcgcttaacgcgccttgcccgggctacagattcatcgccgtctgcgggccggtagcccggacagatgcgcagcatcgcctccggggaattcagccacgctgcgctctgctcccgggggcggcgcttaacgcgccttgcccgggctacaggttcaccgccgtctgtgggccggtagcccggacagatgcgcagcatcgcctccgggaaattcagtcacgttgcgctctgctcccgggggcggcgcttgacgcgccttgcccgggctacaggttcaccgccgtctgtgggccggtagcccggataaggcgctgcagcgccgcaatccgggacagacaacaggaatattattcgatacctttgctgcgcagataa

SEQ ID NO: 180109 - DNA, 1245 bp, Klebsiella oxytoca
atgatgacgcccggcaaaagaaactatatcttgttgagtcttttcgatttcctctatctcttcgcctggtcctcgaccatggcgttctttgtgatctggacgactcagcacctcgggattagcgcaacgaaaaccggcctgctctactcggtcaacgcctttattgccctgctgatgcagcccttcttcggctttatttccgataagttcggcctgaaaaagcggctgatctggatcctggtcgccatgctgctaccggtaggcccgttctttatttatttgtacgcgccgctgctggtgcacagcttctggctgggtgcgctgcttggcggagtatacctgggaataatttttaactccggctgcggggtgattgattcgtatattgataaaatttcgcggcgctaccagttcgaatatggccgggtaagaatgtggggatcgttaggctgggccgccgccgcgtggatcgtcggcaagtatatcgacagcaatccgaacctcgccttctggctggcgagtatcgccattgtgattgccgcgctctgttttatgctgaccaaaatcgagctgaccgaagcggaaatgcagaaaaccagcgcgctgaaagtttcgcatgccctggagctggcgaagaacggccagttctggatgctgctggtctttaccctgttcgtcacgcaaatctacgacacctacgatcagcagtttgcccagtacttttctctgcagttcccgacgccggaagaaggcaatcgctggtacggcattttggcctccattcaggtatgcggcgagacgctgtttttatgcctgatgccgtggttcgtaaaccgcaccggcgcgaaatgggcgctgatcatcgccggactgatcatgtcggtgcgtatcgtcggctccgcgattccgctgggcccggtgtggatcggcgcggtcaaaatgatgcatgcgctggaaaaaccgctgattctggtgtcggtgtttaaatttatcgccgccaacttcgacaacaagctctcctcgacggtctacctgctggtgctgttcgtcgcctccatcgccaccgcgatttactcgccgctggccgggtatttgtacgacaccatcggcttcgcgcatacctattatattctgggcggcattgccgggctgtttacgctgatctcggtatttacgctgcgcgacaatagagaaccgaccgcgccgggggctgcgccaggcgctggcgttgcgcaaagccattaa

SEQ ID NO: 180110 - DNA, 1116 bp, Klebsiella oxytoca
atgcgccagaccattaccctgatgatagcccttaccgcactgttgctgcctgcggctgcccttgccgcccgggagcgcgtagaggtgctgcagaaccagcttgaacacccgtgggcgctggcctttcttccggacgatcggggcattctgatgaccctgcgcggcggtgagctccggctgtggcagcgggaaaaaggcctcgcgcctgcgatttcgggcgtaccgcaggtctgggccaacgggcagggggggctgcttgacgtggcgctggccccggatttcgcccagtcgcgccgggtctggctaagctacgccgaaggcgggagtgacgacaaggccgggaccgccgtaggctacggccgactgagcgaggatctccagcgcctggaaaacttccaggtggttttccgccagcagccgaagctctcaaccggcaaccattttggcgggcggctggtgttcgacggccgcggttatttgtttatcggtctcggggagaataaccagcgttcgaccgctcaggatctcgataagctgcagggaaaagtggtgcggctaacggctgatggcaaggtcccggacgataatccttttgtcggccaggctggcgtcaggccggaaatctggtcttacggtattcgcaacccccaggggatggcgatgaacccgttgagcgatacgctatggttaaatgaacacggcccgcgcggcggggatgagatcaacctggtgcaaaaagggaaaaactacggctggccgctggcgacgcacggcattaactatagcggcctgccgatcccggaggccaaaggcaaaacgctggagggaaccgaagcgccgctgtttgtctgggcgaagtcgccagcggtgagcggtatggcgttttacaacgccccgaccttcccgcagtggcagcacaggctctttatcggcgcgctgaaggatacgtcgctgattgtcctcaaggttgacggcaataaggtgacggaacaggagcggattctgggcgatcgcggtaaacgtatccgcgatgtgcgcgttggacccgatggctatctgtatgtcttaaccgacgaatccaacggcgagctgctgagggtgagcccggcgggctaa

SEQ ID NO: 180111 - DNA, 1287 bp, Klebsiella oxytoca
atgaatatgcctgctggcgtagagctgcatgggaaaggaataagaattagctttctatatcgcggcatacgttgccgcgaagttttgcggggctggactgtatcaaatagcaatataaaaaaagctggcaatctccgtgctttaattatgagtgagattcagcaaggtaaatttgactatgcagagcactttcctgaatcaaaggcgcttaaaaaattcaccacaacacaaaaaattaaaaccttcggcgaattgtgcaaagtttatcttaatgccaaaaagcttgaggtctcagctgcgtcatacagaggcgcagaatcacgtatagcaacactttgcgctattgttggaagtaatacgcatattgcggatattcagcataccgacctgttgaattacaggaacgcgctattaactggtaacacctttagcgatcacgcgccctggcttaaaagaaaaggtcgcgctgtatccacggtcaacggcctgatgaacaacctgactgcgttgctcaagctggcgaacctgagcggctttatcgagcatacccctcacgaaggtataaagatgcttaagcgctccaggagagacccggatccgcttctacagagtgagtacgaaggtttcatcaaaacgttatctcctcggtatgttttgctctggactacagctatctttactggtcttcggcatggagagcttacagctttagcctgggaggatgtggaccttgataagggtgagcttcacgtcaggcgtaaccagacgaatgagggcctgtttgtgccacccaaaaccgaagcggggatcagaactgtaaccctacttgaacctgcgctgaatgctctacgcgaacaattcaagctaactggcgcattaagcaaaaccgaaatcacttttcatcatcgtgagcatgggttaactgaacaacaaaaattgcggttcgtatttatcccccccaaaaactggcgcggggaaacgaagtattatggctctcagtctctggggtatagttgggaggctggattaaagaaggcgggaatcaggagcagacgtccttaccagtcgcgccacactttcgcatgctggcttttaactgccggagctaatccgtctttcatcgccggacagatgggccacgagaatgcaaagatggtttacgagatttactcgaagtggatcggagagatggaccgcaaccaggtagaaatgctgaataacagtttttctgacgttgtgtcccaagggtgccccaaacgtaaggtagtaggtataaaaaacgtttag

SEQ ID NO: 180112 - DNA, 216 bp, Klebsiella oxytoca
atggccgatattactcaagaagatgaatgggtgatggaaaagggaattgtagcgaagatgtatatgactccccggcaaattaaatcttaccgggaggggagatggatcgagggtattcattataagaagcacccaccagatccaaaagcttcagaaggaagggtaacgcttctctacaactacaccaggatcaataggcttgtcggggaaacataa

SEQ ID NO: 180113 - DNA, 345 bp, Klebsiella oxytoca
atgagcaaatctctaaacgcacgctgcatcagacgctgggaagtggaatttaaacctatctgcgattctaaggttaatccgttctggcgcaagagcgacctacatggatatatccgcgaagcggcgcttaccaccgcttacagcatggtcgagaaaatggctgaacgtaacgctaaggttgactatgacggtgagctgaacggctggtcaccagaattttcagcctggtatcgtgagcgccatgaacagtatctgaaagaggcgcgtgactacctggacgaagaagctaccaacgacgaaatcgacgaggagatcgaaaacgaactggaagcatggaacgactga

SEQ ID NO: 180114 - DNA, 225 bp, Klebsiella oxytoca
atgaaaatagaatttattgataaaggtgtaatagcaaccgcgattgtcacaagtacggtattcgaattccggctacacaatcgcgccgttgatactgctttattcctagctccttccgttcgttctaagcacagtggattctttattttaaaaacggttatctccgggaaaacacctcacgtactgcgcgcatacagcgcgcttcgcgcggaggcttgtcgatga

SEQ ID NO: 180115 - DNA, 228 bp, Klebsiella oxytoca
gtgtttaaacaagatgcaatcaattacttcggcagtaagtcgaaattagccaaagctgcgggcgtagcccccgcgtcagtttccgtttggggcgacctcgttcctgaaaaaaatgcgatgagactgcaactagcttctgagggagtcctgcaatacgaccctgaagtttacgatcaacatgctaaagcaaaacgctctggtgaggtgaatcatgaaaatcaggcatga

SEQ ID NO: 180116 - DNA, 426 bp, Klebsiella oxytoca
atgaaaatcaggcatgaacgcattcgcgaggccatgaatgcctgggcgctttatccaggcggacgtaaaacgcctgtatcggcgattgtcgacgcttacttctccatggggatgaccgcgccagagttgtacaacgaaagccaccctgacgcactgagccgcaatatccagaagatttaccgctgggttgaaagtgattcacctgcatcaatcgaaaaaattgcgcagcttctcccggcaattgaacgggctatgccgccgttactgctggcgcgagtgcgtagttattactccgcaactttccgggaacttcttcaccgtaaacagcgtgtcgacgacgaaatggaagcgctgttcggagcaatgattgctatctctgaccggattgctgatggcggcccctccggtaacacgctgattcactga

SEQ ID NO: 180117 - DNA, 255 bp, Klebsiella oxytoca
atgtgtaaccagtctgctgctgaattgattgctcgcctgaaacgagcgtatccggcgtatgagccgtctgaaggagattgtgcaggcactggcatccctaaggccggttctcgcttccagcacagacacaaaggccacatggtgacggtactcacagcgacagagaaagatgtttcctaccgcaaagcctgcggcgctattggctgggtgggattgagagagtttttacggctacacaatgaggtttcggaatga

SEQ ID NO: 180118 - DNA, 1077 bp, Klebsiella oxytoca
atgaacaatcaggtgtttgaaattgttcaggccatgtcggggcaggggaactgcatcacgatccccggaccgtatctggatttctttgcaggagacaggcagcagcatttgctggcggccattctcaatcaactggtgttctggtcgggtaagtcgagtctggaaaacggctggttttacaaagagcatgcagcgcttgctaaagagattcgcgctaaagacggcgatgtggtcagaaaagcaatgttcaagattacagagcagtacctggcgggggttattgaggaagaacttcggcaggtaagcggcacgccgaagaagcattaccgcgtcgatcaggaagcgttaatcgccaaaatattcccgcaaggggggaattcaaataaaccattgaaagatatggattcggctcaagtgccgaatggaaacggctcaagagccgaatcgaagcaagtgattgaaaataatggaaacggctctcaagccgaatgcattcgtcccaagagccgaatggaaacggcccaagagccgaatcctggaaacggctctcaagccgaatcctatctctatacagatcttaaaaacagatcactacatacagatcataaaaaccacgcgggagagactcttcctgtggataactttgcagagtcaggacgtgaaccggtcatcccggaagcaaacattcctgacgctaccgaagacagtaacctggctaccgatgatgacttcgatctcgcgatgtggttctggtcgaccatcatcgaaatgtacgaacgcgccgccgaatttgacggctctctggcaaaaccgagagaaccgaactttgtcgcctgggctaacgaggttcgcctgcttcgccaggagcacggatgtagccacgaccaaattcgcaccatgattgagcgcattcagcgcgatcagttctggtgcccaaaagttcaaaccattaagacattacgcaacaaatggcctgagctggcgctgaagctgtgcccggtaaatctcgcaaccggcggcaacctcggttttagcggcaaggttcaggcagatattccgaagggtttcaggggctaa

SEQ ID NO: 180119 - DNA, 294 bp, Klebsiella oxytoca
atgaaaacaaccaaatccaagaagacacaatacagcggtgaaatcacgatgatcgaatttctcaaggctaatcctgattttaccaccagggaaatcgcagttgcgctggggcgcggtatgtcttcggtcggtaatcagcttcgccagttacacggaacgggtcagattacccaaagcggcatgcggaatggcgctgcaatgtggtgcttcaacgatatgccgtttggctgcgcgaaccggcttcgggcgaggtttgaaagccttctgagggaatgtcgtggggtcgctcaatga

SEQ ID NO: 180120 - DNA, 216 bp, Klebsiella oxytoca
atggctaagaattcaatcgacgcatacggtgccagcggcaagacaaacgttctgatgttcgagccggaaaatctgcatattgtcactgacaaggcccacccgctttacgatgagcgagtcaatctgccgatcgatgaagggatggtgctgaatatcaaagagctgggtgttcttgagccgaacggcttttgtggctgccaacaaagcggaggctga

SEQ ID NO: 180121 - DNA, 333 bp, Klebsiella oxytoca
atggataagccacttaacaagcgcgaacgcgaatatatcaaaccggctgtcatttatgactgggaaattcatctttggccaggccgcaaagatggtgtctgggatggcgataagatactgccagtaaaggttggtgctatagctcaatcactgattaaaagggggtatctggagaggcttgggaatgtaattcgtgccaccgaaaagacgaaggcgctgaagtgccgcgcaggtaactgtttatatggtcgcctttatgacgataacgatgtggattcggggaagtgccctgattgtgacggcggaatgatgtttgaaggagccaaccaatga

SEQ ID NO: 180122 - DNA, 522 bp, Klebsiella oxytoca
atgaccagcaaattaactataacagacgagcgtctggcggaattagtggcgttcaaaccattacctggcacagatatcaactcggccacccgggatgaatggatggctatggccgcagagctacatgaacgccgcaaggtcgcaatggacagcgagccggtggcgtggctctggtctcgggacggggacgctgagcgggatgtgtcgttgacaccaccagatgacgatgacgatgccgccatgctcaaccatccatcaagcattcagcccaacactgacgcagctcccagcactgaaatcaaacacccgtcaagcaactctccggtaatcggcattgatctggcatccggtccagaccgcactgttgaggttcgctatgttgcacctcctggttacgtgatggtgccgaaggagccgacagaaacgatgataaacgcttggttatcagaggtcgcgaactggcgcggtcacgtagctggttataaagccatgctcgcagtcgctccacaggaggtgaaatga

SEQ ID NO: 180123 - DNA, 294 bp, Klebsiella oxytoca
atggcaaatgattcacgaggaaatgaggtggttttcaaccgcgcatatctaaacttgtgctctaagaataagaatttaagtacattggttatagccagagagtttaaggatgataatattgttggatgtttttcttttggccttaaaaaactaatcgatattgagtcaaagtgtttgtttttgcgctataagtacccatggccagattttgaaattgaactggttaaaaataaaggcggtgattacgagttcatgctttttcataatgattttcttaaaggtagtgaggtttaa

SEQ ID NO: 180124 - DNA, 234 bp, Klebsiella oxytoca
atgagaatcgaagtaaccatcgacaagactaaaaaactgccagaaggggccattcccgcccttgaagttgaattgctgcgccgtcttcatcaaaactatgaaggctgcaaactaaatataagacgctcaagcactgacgggctgaccgttctgggcggcgttgatggcgataaaaagcgcatagagcaaatcctgcaggaaacgtgggaaagtgccgatgactggttttattga

SEQ ID NO: 180125 - DNA, 183 bp, Klebsiella oxytoca
atggaaataccggatgatttatttccagggtttaaagagcatgccggacctgtccttgtttatgtaaaaaacggcgtggtggaaagaggcttcccgctgcgtaaggatgagtttgtcacctcgctcagatcccttgatgaggcccgtaaaaaggctgggcttccccctgtaagtcaggactaa

SEQ ID NO: 180126 - DNA, 594 bp, Klebsiella oxytoca
atgagagacccccgtcgcagatgcaaagcacccggctgcggtgcctggtttaaccttacctattctaatgtttactggtgctgcgaagagcataagagccagtaccttgcgcatcagcgcgagaaacaaaaggttaaggcacaaaacaggttaaaaaataaacccgttcaccatatccgccctgaaccaaagacggctgagaagcccatcagtcactggctggaagtcaccgagcgcgtggtcaataccctttgccgtgaaatagcccttgctaatggggaggggtgcatttcctgcggaacccaccaagccaaagtatggcatgccggccactacagaaccgttgctaaagcctcccacctgcggtttacccgcatcaatatcaacctgcagtgtgatgactgcaacgtcggcaagtcagggaatatcaaagcttaccgggtcgggctggtggaaaaaatcggtgaagccgcagttcaggggcttgataacgacaaccggattcaccgctggaccatcgaagagttggaagctatccgcctgcaggcttacgccgacttacgcgcactgaaaaaaacgctggaggccgcatga

SEQ ID NO: 180127 - DNA, 1071 bp, Klebsiella oxytoca
atgacgccagcagcctattacaacgaaatcgacccatttgcagcgcagtggctgcgtaatctcatcgccggcggtcacatcgccccgggcgaagttgacgaacggagtattgaagatgtcacacctgacgacctcagaggatttacccagtgccactttttcgccgggatcggcgtctggtctcattccctccgcctcgccggatggcctgacgatcgcccggtctggactggttcctgcccgtgccagcctttcagcgcggcaggcaaaggagatgggtttgctgacgagcggcacctttggccccacttcttccatctcatcagcgagtgcagacctcagcatgtctttggcgaacaggttgcagcaggtaacgcaaacgtatggttcgaccttgtacaagctgacctggaaggaatgggatacgccttcgggattgtgccgtttacgtcagcgggcatcggcgcgccgcacatcagagagcgggtctactgggtggccaacgccggtagtgggagatatgacaggcggaccgcggccgccggacaagaaacgcgggccggcgccgggattgcaatcggcgtcggcattggcgggttgggtaacgccaacgtcgcgcgactggaaggactcagcgggaatgacggcgcagcggggcggaaaggaacgactggaccagctgccgcgccaggcgttcatgacgggctggccaacaccgacgacgagcaacactcgatcgccatcagtggatgcggccatgaacatgtatcgacaggacgggagcaagacccagcagcgtctgcaggacttcgcggggattaccggccccttgaggttaacggtttttggcgagatgcggactggctcttatgtcgagatggcaaatggcgtccagttgaacccggcacattcccgctggttgatggggctgccgcacgaatgggacgagtcgagcccggggtggcaagagtggcaagcagcaaccgcgtcggccgcctgaagggttacggtaacgccataaacgcccaggccgcagcggctttcattcgcgcttacatggaggtcgcatga

SEQ ID NO: 180128 - DNA, 642 bp, Klebsiella oxytoca
atgacttaccagcttatctacgtcgatccgccttggcagtatggtaataaaattagcaacggcgctgctgagaaccactatgaaactatgagccttgtcgaacttaagcgcctccctgtctggaatctggctgctgataatgccgttcttgccatgtggtacaccggcacacataccgaggaagcgatcgagctggcagaggcctggggttttcgaattcgcaccatgaagggttttacatgggtaaagcttaaccagcacgccgaacggcgattcaataaggcgctaactgaaggtgagttggtggatttcaatgatctgctgtcgatgttgaatagcgaaacccgtatgaatggaggcaaccacacgcgggccaatactgaagatctgctaatagccacctgtggcgccgggttggaaagagcgagcgcatctatcaagcaggtggtttattcctgcctgggtgagcacagcgagaaaccctgggaggttcgccgtcggctggaattgctgtacggcgacgttaagcgcgtggaattgtttgctcgcgaatcttggcccggctgggaccgctggggaaatcagtgcgagagttctgttgaaatgcattcgggaaaatttatcaccagggaggggatatga

SEQ ID NO: 180129 - DNA, 141 bp, Klebsiella oxytoca
atgaatcatctcaccatagagaacatccgctaccgctggatgaagcttcgcctttgccgtcatcgcggcactgtattagttgactaccgcatcctcaaaaactttatacgcatctgtcagatccggggagagacagcatga

SEQ ID NO: 180130 - DNA, 609 bp, Klebsiella oxytoca
atgactccaatgcaacgccgtagacataatgcggcccttaatgaggttgccctggctacgcataagcgctatctggggcgagcaaaactcttgaccggcatccagtcaggctggattaaatcattgcttaccgtatggggcgataccatgcgcggtgaagccgcgccacgattgccaagaagccatgaatgctggcgagttattagaggagatcgctggtctgataaatctcttgagcgctttactgcggcaattaagcaggcgagggaggagggttatcgcggtcagcatgcgttaaatagagcacacgcaattttatggccgaaaaccactaccagcataatagataccgctataagagatgatgatgcggatttcgttgaggaatgtgtgttaaaggcattcgacacaacggatccggtttatatcgtaggggtgagcttttacaccactcgtaaaaaagtcgcggatattgcccgcgagctggaacgagctgctccatggcttacgttcaagatggcaaaggatcgggttaactggtgcttacaggtatttcaggcgaaaactttcctgtctgcaaggcaaagcctgaaagctgaatctgaatga

SEQ ID NO: 180131 - DNA, 390 bp, Klebsiella oxytoca
atgtccgatcctgtctctggtacttcagttgcggccggcggcctgatgggggctagcatgttcggtctggctaccggaatagattacggcgtggtatttggtgcgttcgccggggcggttttttacgtggccacggcagctaacatatcgcgcggtaagctggtggcatactttatgacgtcattcattgttggtgttctgggcgccggtctggtgggttccaagctttcaagctggactggctacagcgaccgtccgcttgatgcgttgggagccgtattaatatcagcgcttatcatcaaagttctgacgtttctcaacagccaggatctaaatagcttgttcaatatgctgacccggttccggggaggaggttcaagtggtaaatga

SEQ ID NO: 180132 - DNA, 279 bp, Klebsiella oxytoca
gtggtaaatgatccttcagcgctggctaatgcagtcatttgcgccgtcattgtgctggcattgatgttctaccaacgaggtagtgcgagacaccgtccgggcatatccgttctggcttatctcatggtgctggtttatgccagtatccctttccgtttcctgtttggcctgtacgagtcatcccactggctggtggtgctggctaacattcttatctgcggcgcggttctctggttcagggggaatgtggcgcgactggttgatgcactgaggcactga

SEQ ID NO: 180133 - DNA, 276 bp, Klebsiella oxytoca
atgggcattgaaatgattattggtctggcaactgcgttgctggccattgtcgctggcgcatttgggttaggccatgcgcgtgggaccaacaaggcagaagccaaagccgatcagcagcgagccgaagagaacgccgctgctaccgtcgccgcggtagaacgccgggctgatgcaacgaaaggggccagcgatgttgaagagagcgttaagcgtatgcctgatgacgatgttgatcgcgagctgcgcgaaaactttacccgccccggtggtggttga

SEQ ID NO: 180134 - DNA, 150 bp, Klebsiella oxytoca
atgaccaagacaaagaatattgaatttcggctgagcaaacttgagaaagggccagacaagaaggttctggccatcatggagataaggtcgagaactattgcaggtagcgtgctgaagcagattccctgccaggagttgaaagatcgataa

SEQ ID NO: 180135 - DNA, 285 bp, Klebsiella oxytoca
atgatcgatcattactacgtaactcacgctcaaatcctggcgctgagaaacgttgttgcttttatcgtgcaaacgatgcccgaagaacaaaaagaaaatgtccttcaggttttgagaaaatttgctgaaatagaattaatggatggtatcgacgcgccgcctacgagtgatatcaccccgaaaacagttgagaagttaaataaagcctacaaggctatcttcaatgacattatcgatctttcaactcctggcagggaatctgcttcagcacgctacctgcaatag

SEQ ID NO: 180136 - DNA, 294 bp, Klebsiella oxytoca
atgagtgaagcaaaaccgcaggacggcagcactgtaaaaggctaccgcacattaaccgctggcgacattgagcgaatgaaccgccttaaaggcgtcagccgccacttctgtagtttgcttgataccgatcgaggtgaattgttggctgtccgtaatggcccggcaatgttaagcgctgagcaggctcgggagattgatgaagctttgcgctgtctggcaatcgctcgcaccaaaatgcaggaagcctgtatgtgggcatgccgcgcggtggctcgccctgacgctgattgctaa

SEQ ID NO: 180137 - DNA, 186 bp, Klebsiella oxytoca
gtggacgtactgattgacagtgctttcgagggatatctcttcctcttactggatatgtggacagttttaattgttgctttcgtcgggttggctctgtcattttatggcgtgcaaatgcgtagaactgccgtcaccttctttctgcttgctgcgataatcgggactgctggttcgatctatacttaa

SEQ ID NO: 180138 - DNA, 246 bp, Klebsiella oxytoca
atggtcgaaatcaccgacgcccagcagattcgtctcaacctgctttcaaccctgaactacgacacagcagcagcaaaagtcgccgtagaatttgttcaggatgatccgcttaagtatcagctgtttattcagcaatacagccgtgtcacatcagagactgaagtggtggcaaagacgatgaaagctgtgcaggaagcaactgaagcgctgccgctctttgataccagcgctgaagcaaacagctaa

SEQ ID NO: 180139 - DNA, 351 bp, Klebsiella oxytoca
atgcccgcactaattccccgagcatgccgtaagcgtggatgcgcaggcacaacaaccgaccgctcaggctactgcgagaagcatcgtaatgaaggctggcagcagcatcagcagggcaagagcaggcatgagcgaggctatggcagccagtgggatattaagcgagcccgcatccttaagcgtgacaatcacctgtgtcagaactgtctgcgcaacggtcgtgcggtagcagctaagaccgtggaccatatcaaggctaaggctcatgggggtaccgatgatgattcgaatctcgaaagcctgtgctggccttgtcacagaacgaaaaccgggcgtgaacgtttcaaatga

SEQ ID NO: 180140 - DNA, 498 bp, Klebsiella oxytoca
atgccaggaccaccgaaaaccccgacacatctggctttagtgaaggggaacccatcaaaacgcccgatcaacaagaacgagccaaaacccccgtcaggggtacccccaataccgaaacatttcgataagcagggtaagtactggttcaagcgtatcggtgatgaacttgatgcagtcggcgtattgaccacgctggatgctaaagctctggagttgttgatagaagcctatgttgaataccggcatcactgcgacacgcttgatcgggaaggttacacctatgccgtctacagcgaagaagattcagacgaaggaggggagcgggaaatcagaatgataaaaccgcaccccgcagcagttatgaaggctgatgcgtggaaacgaatcagagcgatgctgagtgaattcggcatgacacctgccagccgatcaaaggttggtgcaaaaggcccggcagaagccgacccactggaagaatttcttaaaaagcgcaaatga

SEQ ID NO: 180141 - DNA, 1752 bp, Klebsiella oxytoca
atggcaaccgttgcagatggattccgctacgccgagcgcgtggtatctggcgatctcgttgctggcgaactggtgcgtcttgcgtgccagcggttctttcatgatttagagcacggcccggagcgcggtgtttattttgatgaaggccgcgcccagcacgttctcgatttttataacttcgtcccccatgtgaaggggcacttgaccggcaagccgatcgagttgatggactggcacaccttcatcctgattaacctttttggttttgtcgtccctctgatagatgaaataacgtttgagagcattcttgacgacgatggcgaccccatgtttgtgcgtcgctttcgtaccgcctatgacgaagtagcgcgtaaaaatgccaaatcaacgctttcgtctggcatcgggctttatatgacaggtgcagacggtgagggtggttctgaggtttattccgccgcaacaacccgggatcaggcccgcatcgtgtttgatgatgcgaagcgcatgattaagctggcaccgaaaacactgggccggttgtttggtagtaacaagctgaatattcaccaggagcggacgggctcaaaattcgaacctgtagccagtgatgcgaataacctcgacggcctgaatattcactgcgggatcgttgatgagctgcacgcacataaaacccgtgacgtctgggaagttctggaaacggcgaccggggcgcgcctgcagtcccttatttttgcaatcactactgcgggttttaataaagaaggtatctgctacgagcaacgtgattatgcgatcaaggttctgaagaactttgataaccctgacccactttccattaaggatgacagctattttgcgctgatttataccctcgatgagggggacgaccctttcgacgaggcaaactggccgaaagctaatcccggtctgggtgtttgtaagcgatgggacgacatgcgccgtcttgccaaaaaggcaaaagagcaggtcgcggcacgtgtcggtttttttaccaagcatctcaatatctgggtgcagggtgaaaaagcatggatggacatggctcgatgggaaaaatgccgtgacgtctgggatgtttcaacttctgccagctggtcaatgtggcttggcgttgacctttccaacaaaattgatatttcagctgcggttaaagtctggctcgctccaaatggcgatgtttatgtccgctcccgattctggatacctgaagggcgtctggaagcctgttctaagcagcaggcagacctttacagaaaatggaatctcgctgggttccttgaatttaccgatggtgatgtcgttgaccatgcagtgattaaagaggaaaccattgaatgggcgcgcggggactcgctgaacgagtttgcatacgacccgtggagtgccactcagtttgctttgtcggtagcagctgaaggagtaccgatcgtcgaagttcctcagacggtaaaaaacttgtctgaagcaatgaaggaagtcgaggcgaaaatttacgccggacgttttcatcacgacggtaacccggtgatgacctggatgatgtccaacgtcaccgtcaaaccagacaaaaacgagaatattttccccaacaaggccacgcctgaaaacaaaattgatggacctgtcgcgatgtttattgcgatgagtcgcttgcttgttaatggtggtggtgaagttgacttcctgtccactatcgaccctgacgaagaccttttacttctatga

SEQ ID NO: 180142 - DNA, 162 bp, Klebsiella oxytoca
atgaaaactttaatcactgatgctatcgggcttaccgggtttggttcgctcgctgcaggcgtatatctgcagttcgggctggcgccgtctctgatgatgtccggtggcctgctactgctttatgcgctggtggcggcaatgagggggaaaaatgctgcttga

SEQ ID NO: 180143 - DNA, 1227 bp, Klebsiella oxytoca
atgctgcttgatgccctgttccgtagtgaaccactggaaaaccccgccacgccgatcacgggtgaatcggcagaaaccgataacctttttgcccgtgacgtgtttgtcagcccggaaacggcgatgaagctggctgcggtgtatgcctgtatttacgttatctcttcgaatatcgctcagatgccactgcatgttatgcggaaaaccaataacaaggttgaagctgcacgcgatcacggtgtgttttacctgcttcacgatgaaccgaacatgtggcagaccagctataaatggcgcgagttgaagcagcgccacattctgggctggggtaatggttacacctgggttaagcgctcccgccgtggagaggtttccgggctggaatgctgtatgccctgggaaacaacgttgcttaacacaggcggccgctacacctatggtgtctacaacgaagagggggcgtttgccgtcaaccctgacgatatggtgcatatccgggcgctggggaataatcagaaaatggggctcagtccaatcatgcagcatgccgagacaatcggtatggggatgagcgggcaggcatacaccagttcattcttcaacggtaatgcgcggccagcgggcattatttcggtaaaaaaccagcttaacgacgaaagttgggggcgattaaaaagcatgtggcaaaaggccactgccgctttgcgcagccaggagaataaaacgatgcttctcccggcagagctggactacaaagcgctcaccgtttccccggttgatgcccagatcattgatatgtcgaagctgaaccggtcgatgattgcaggaatattcaacgttccggcacacatgattaacgatctcgaaaaagccactttctcaaacattacgcagcaggccattcagtttgtccgctacacgatcatgccgtgggtgacgaactgggagcaggaactcaatcgccgcttgtttacccgtgcagaactggccgccgggtattacgtccggtttaacctgacaggcctgctacgcggaaccccgcaggagcgtgctcagttctaccactttgcgatcactgatggctggatgagccgcaacgaggcgcgagcctttgaagatatgaacccggtagacggcctggatgaaatgctggtgagcgttaacgcggctaagccggcagacgattttaaggcgccaaaaaccgacgaggaaaaaaccaatgaatga

SEQ ID NO: 180144 - DNA, 600 bp, Klebsiella oxytoca
atgaatgaccgtgaaacgcgctgctatagcggggaggttcgcgcggaacaacgcaccgatgaacctacccgcattctgggttacggatcggtgtttaacagtcgctctgaacccctctggggattccgtgaaatcatcaagcccggagcctttgacgatgtgctgaatgatgatgtacgtgggctgtttaaccatgatcccaattttattctcggacgcagcgccgccggaacactttcgctgtctgtcgatgagcgcggcctgcgttacgacattacagcgccggatacgcaaactatccgcgatctggttctggcaccgatgttgcgcggtgacattaaccagtcgtcctttgcttttcgggtagcccatgacggtgaaaactggtaccaggacgatgaagggattgttattcgtgaaatatcgaagttttcccggctgtttgatgtcagcccggtgacctatccagcatatcaggaggccgattccggtgtccgatcaatgaaagcctggcaggaggcgcgcaacagcggtgcgctacagaacgccattaatcaacgaatggcgcgcgagcgcctgctgacccttcttaacgcgtaa

SEQ ID NO: 180145 - DNA, 1239 bp, Klebsiella oxytoca
atgaaactgcatgaaatgaagcaaaaacgtaacaccatcgccaaagatatgcgtgccctgcatgacaatattggtgattcgccctggactgatgagcagcgcacccagtggaacgctgcaaaatcagagcttgattcccttgatgagcgtattgctcgcgaagaggaactgcgtcgtcaggatcaggactatatcgatgaaaatgagccggaacagcgccagcaacagaaccgtgatccagcaaacccggaagcgcaggcaaatgagcgcagggcagcggcgtttaatgcgtttttgcgccgtggtcttggcgagatgagcgctgaagaacgccaggctttaaaggagctgcgtgctcagggtacgacgccggatgaaaaagggggttacaccgtaccaacccagttccgcaataagattgtcgatgcactgaaagattacggtggtattgccagtgtggcccaaatcctgaatacctcaaacggacaggatatcgactgggcaacttctgacggtaccgctgaagaaggtgaactgcttggcgaaaacactgaaaccagtgaagaagatgtatctttcggcggcgcgactctgggagcaaagaaactttcttccaaaatcatccgagtgtcgaatgaattgctgcaggacagcggcgtcgatatcgaagcatttcttgccggacgtatcgcaacgcgcattggccgaggtgaagcgaaatatctggtccttggcaccgggacgggtacaccgctacagccgaaaggactggcgtcctcagtaacagggacgaaaaacacggcttcagcgacagctttcacctggaaagaactcaatgcgctgaaacatgctgttgatcccgcctatcgtaatggcccgaaagttcgctttgcttttaacgatgcaacgctccagttggtggaagagatggaagatggccagggccgtcctctctggttgccgaatattatcggtggcgcacctgctactgttctgcaggtgccgtatgttgtggaccaggctattcctgatatcgcggcgggtgccaaatttgcttacttcggcgactttaaccgctttatcgttcgtcgcgtcacctacatgacgttgaaacggctggtggagcgttacgctgagtacgatcagactggcttcctggccttccatcgcttcgactgtgtgctggaagataccggggcaattaaagcgctggtgggcaaaccggcatctggcggctaa

SEQ ID NO: 180146 - DNA, 318 bp, Klebsiella oxytoca
atgagcacaacgattgaaaagttaagggctcagtgtcggatcgatatcgacgacacaacggaagatgagtcgcttatgctctattatggcgctgcgcgccgtagggcggagaacttcatcaaccgaaatctttatgaagatgaagtgccggaaaccgatcctgatgggctggtgattgctgacgatattttactggcattgatgctgctggttgggcactggttcaacagcagggaagaagcatcagacgttaataaaattagcattccattcggatttacttcgctgcttgagccctatcgatttattccgctctga

SEQ ID NO: 180147 - DNA, 333 bp, Klebsiella oxytoca
atgcaggccgggaaattgcgtcacagggttaccctgcaggagccggtaaaagagcagaatccgacaacgggagccgtaattaatatctggcgagatgtcgcaaccatctgggccgaagtataccccttgtcagcgcgggagtttatagcggcccaggcatcacagggggaagtcactacacgaataacaattcgttaccgggcgggcgtcaccagaaagcacagaattatgtatcgcggtggtatttacaacattgaaggcgttttaccagacccgcgcagcggcagggaatatctgacgctgccctgctcagaaggggtgaacgatggctga

SEQ ID NO: 180148 - DNA, 540 bp, Klebsiella oxytoca
atggctgatggtgtagaggttaaccttaccgggcttgagtcggtgctgggcaagatggatgccgtctcacaggtgacccgcaataaaaccgggcgtgcagcgttgcgcaaagcggcaaacgtcatccgggacagggcccgcagtaatgccgctcgtgtcgatgattttcttactaaagaagccatctataaaaatattgtcgtgagtttcagcagcaaagcctttcgcagaacgggcgacccaacctttcgtgtaggggtaatgggcggtgcaaggcaatatgccaatacaaaggccaatgtgcgaaaaggcagggcgggaaaaagttataatacagccggagataaaggcaatcccggtggtgatacctggtactggcgatttctggaattcgggaccgagcatatggctgcgaggccaatactacgcccggcaatgaatggcgtggatactgacgtaattaatattttcgctgtggaactggaaaaggctatcgatcgtgccgtccgtagcgcagccaaaaaaggaacgtccgtatga

SEQ ID NO: 180149 - DNA, 366 bp, Klebsiella oxytoca
atgatagctccaatattctctgtctgcgcggcaagccaggctgtaaaggatttattgggtaccaaccccgtcaggctctatcccttcgggatacaggatgacaatatcgtttacccctacgcggtctggcaaaacattggcggctctcctgaaaattacctgaaccagcggccagatgccgatcactactctcttcaggttgatgtttacggtgataccgatgcagatgtaattgccgtggctcgcgcattgcgtgatgccatcgaagggaaagcctatatcacccggtggggagagcagagccgtaatgattccacgatgaaataccgctattccttcgatgttgactggatcgcgtccagatag

SEQ ID NO: 180150 - DNA, 492 bp, Klebsiella oxytoca
atgtctgtattaacgcaaggcacgcagctctttgtgctgaaatctggcgtggtcagcgaggttgaatgtatcaccagcttcaaccctggcggcaacccggccgatcaaattgaagatacctgtctgagtgagcgggactccagaacctataaaaaagggctgaaaacgccagcttcagcaactgtcgggctgaatgccgacccgaaaaacgccagccacattatgcttcatgggctttctgaaactgatgatcagacaccgctaacctttgctatcggctggtcagatggtaccagcgccccgaccgtcgcagcttccggcgatgaagatgctgttgatggtctggtgcttccgtctgatcgaacctggtttatctttcagggctacgtttccgatttcccgttcgattttcaggcaaatgccgtggttaccacctccgcaactatccagcgctccggatcggcggtctgggtacctaaagcagcagcgtaa

SEQ ID NO: 180151 - DNA, 384 bp, Klebsiella oxytoca
atgaaacttactctcgacacattaaaagagtccggggcattcactggccgcccggtagagaaagaaatcaaatggaaaggtcgtgacgggaaagaacatatcgcaaccgtctatgtgcgcccgatgggttaccacactactaaagctgaactgctggcgtataacggcaaatcagatccggtggctggccgtattgccgcccatatttgtgatgaggaaggcaagcaaatctttactgaggcagacattctcggaactgcttccgaagaccgtggcgcgctcgatgggccaattgttattgccttactggctgtgattcaggaggtcaacgatctgggaaagactatgaactcacaggagaagacgagttctggtgtgagttag

SEQ ID NO: 180152 - DNA, 264 bp, Klebsiella oxytoca
atgaacggcattggtgggcgcaccattgcggaggctcaggagcgaatgagccttcgtgagtttcagatatgggtaaagtaccgcaataagtatggtcagcttaacagcatgatgcgtaccgagtggggggcttcactggtggcctccgtgctggcgaacatcaataagtcaaagaattcgccgccgttcaagattagcgactttgcaccacatatcaatgaggtctctgtatcgcttgaagatgccatgaaaaattggcattga

SEQ ID NO: 180153 - DNA, 297 bp, Klebsiella oxytoca
atgggcactctgcagaatcggcttgctgcctgtcaggcggatgaaaacctgctgcgacagcaggcgcagtcacgcacggaaaactggcagccctggctcgccccggtcagcgctacccgtccgagggaagaggtgccgggatatgacgatgattcccagctcatccgggaggaggtcaataaactctccggcatacgccgcgggctgatcagcgggcgatgctcaaacgtctgtacctgcaatagagttggctggaaataccggagcaggcgactgcatcttttcgcatggcgctaa

SEQ ID NO: 180154 - DNA, 1176 bp, Klebsiella oxytoca
atgaattggcccgtacaaataatccctccagccgataaggctcctggaattaaatggagtaactggtttttttctttcataggtattttgttgactttggtggttagttgggttggggcaaaaatcgcttcccctacggaagagaatgcgctattaaaattgcttaccttgttgttttttttggtgccgcttgctttttctctcattatttcctttagggcctattaccatggtttgtgtttgtcggcattcgaagcaagagagcgcgaagcagcattagtcagggagcactggtctgaatgggcaaatcaaaaattttatgtttccgcttataaattgtttctcccttctgtaatatcgcaaaccgatatagcaatgtctaattctgttgagatatataataatcagcaattgaaactacggggtcataacgatgagttatattctgaagaacaactaatttatgaactgttggcgtctgtcagggtaaggttgttacgactgaaagaatcatgtatattcgatatcgtatttacctatgatagtagttatattactttctctacatttaaagaatgttgggctgcaatcggttttgatggtagttgcttaggtaattattattattggaataaaatattagagcaggaatttgatacactatctaatgtttcatccaatcgggtattaataataatatctgcaaacattgagagttttgaaaaatatccccctaactcaacggaatttgcttcaatattgctggtgactcatcaagagcaaccgccggaaaaagacaatggtggtgtggctttgcgagcgatggcatgcaacaaaaatctaaccaaacaagaagtcatccacatgatgacttaccagccagatgtgcttaaaacgacaaaagtgctttttagcaatatgaatatacaggatgtttcagaagtctcagagatattaaggctctcttctttatctatgaatgttgaatgggaacatgatataaagcatttaaatttgatattgggtaatttatgtgagacccatttttggttggtgttcgctctggcgcttttcatatcagaaaaaaataatgaatcggttttaatggtcgccagcgttggtgatgaatacgtttttaatgtcattaaaccgtttgataatagcaaggagcattaa

SEQ ID NO: 180155 - DNA, 906 bp, Klebsiella oxytoca
atggatagtgaatctttttatgatataaatgaaaaaattaccaatgccgcttttgaaaaaaacgggcaatgctttctactgatagatgcatctttagaacagtatcaatcagagctttttttgcctgatattcttagggagtataaatcttatcctgttatattccaccagagagaacttcaaagcgctgtaccactttacctttttcctcttagtaccttcagtgagagagatggtcagttgtttaagaatagtatttatcattcactgaatgagttgaaaacagaaaaacttgattccggggaaggacgcagcgtgtgtgcatggatttcgacggatttaactggggaacagcttgctgaacaggtcgctttgtccaccgtacagtcgattcaatcagttggtgatatattacttcgctattacgatccatcagtatttggtttgttaatgcctattctggataaatggcaaaaacaacaactattaagcaatgttaatacatggtcttatatcgatggggacggaatagctcagatagtgaatggtgatggtgaatgcaaaaaaaaattaaaccactcacttggattgaccgagcaaaatgcattagaaattgagcgaattttagttattaataatgttttgcgcatatatcgaaaaatgaatgcgccccataaactcagtgagcgcgaggtgatgaaattattgcgctctgcgctgaattattattatgcaactttctctgcatccaataatgatgttattgagttcgggcttgatgtgttgaacgcacagcgactattttatcaggatggagtatttgagaagttcgtatttagtaatcgcagcaaagaccttcagttatactcagatattaaatccagaattgacagtatggcatgttaa

SEQ ID NO: 180156 - DNA, 726 bp, Klebsiella oxytoca
atgaattcagaagagcagaagcaaatatgttcccggtttatcaaaccagaaaaattagccgatttacggacaaaacaggaaattgaggtgatgaacggcaggccgtggacgcgtgagcttcctcctccgccggtattgccgccttatggccctctggaaaaaatcagcgggcggctgcagtctttccgtagcgaatattttcgggaatattttgatgcagatgcctaccggaccagcacgttgccggagatatcagatggccagcgcggagctgccgctgctgccgcgatagtggcaggaagtcctggcgtcggggctgtaattatggctgagagcgaatcatcgaataattcggcggaatatgtgcagggagagattaatggcaggccatttcgcggctgggtgggtgtcacccggcttcaggctggtgataaggtggacatgattgttgagtggcaacacgatcattacgaggtctatgccattgcgttaccggaagagcggatagtgtctgtatgtccgaaatgtgatatggggcatattgcgcatatgctgtggcggattaaacatatgtttattctcacggggatttttttcttctcggtgctttttgcgggagttctgagtgaagtgattgaaggcacctggaagagccttgagtcatttatcaccacatacttttggttgtatgttatagcattgttgggggggggctttcaggattaa

SEQ ID NO: 180157 - DNA, 189 bp, Klebsiella oxytoca
atgcttgcagtactgatgacctgggaagccatggtggcgataactttgttacaggtggttgtgacctggatatcggacgatgagctccagatatggtgtaaaaaatgcgtgtttggcacagcaccattcaaccgcaacgtggcagaccagaataaagctctggaagcggcgataaaggatatatcatga

SEQ ID NO: 180158 - DNA, 960 bp, Klebsiella oxytoca
atgaattcagttgaaaatcagcagatatgttcgcggtttgttgagccagaaaaattagccaatttacgaaccaggcaggaaattgaggtgatgaacggcagaccgtggacgcgggagcttccccctccgccggtattgccaccttatggtcctctggaaaaaatcaatggccgaattgaatcttttcgcagcgaatattatcgggagtattttgatgcaaatgcctaccggactcactctttgccggagataactgacgggcagcgaggtgcggctgccggtgcagcgatagttgcaggaagtcctggcgtcggggctgtgatgatggctgaaagtgaatcttcaaatgattcggcggaatatgtacaggggatgattaatggtcagccgttccgtggttgggtgggtgtcacccgacttcaggctggcgataatgtggacatggttgttgagtggcagcatgaccattatgaagtctatgccattgcgttaccgaaagagcggatagtctcgatatgtccgaaatgtgatatggggcatattgcgcatatgctttggcggattaaaaatatgattattttaacagctatactcatctttatgtttgcatgtatttgccttgttaaatccttaaatgaggtgggctggggacagttgaatttttggaaagaatattttgtttttctcatgatgatgctagggctggcttttctttttactggagcgattgctattgcagcttataaaacctactcttccacttgttgtaagctggctgaagagatatttcagttgctgggggtgaataattttgtagcagtcaatctcaataaattaacccaaaaacgcgaaaaaaaaatgatgcagaagagggaatggtacgatccgggtgataaaaataaaccggcctgcccttcttctaagtttatttattcgggggagtggtggttttactattag

SEQ ID NO: 180159 - DNA, 1008 bp, Klebsiella oxytoca
gtggtgaaggggctgcgggaaaatgccggtaaactggaagtacagctctttagcacggatgcgtttatcgtcacggtgggagacagggtaagccgcattctgctggtggataaggcaggcgagaagctggcgaccacggccttcaggctggtatttatggtaagggcggggataccgtcagagaccgttcacgcgttagtggatgagtatctgaaagatgccccggcgttgcgtcagacggtgctggaaggtatacggcgcagcggacgttttatggcgagccggaatgaagtcaccgcgattagacagacgatgagcagcaggctggcagagcactttgcaacagaaaagggtcaggctgaataccggctggcgggaataaacagcctgttgctggtgctgaatgcgatggattttatctacctgtgcggacaggtcagggaagagaaaaagccgctgtcgagcctgatggccagcgggctggcgatggtgagtcaggggacgtcagttattttaccggcaatagagaaaggactggaagcccgtgagcttacggtttcctgggtcaaaggagtcggggcggcagcaggtggggcagcttcgatgttttcggtatatgcggatggtgcaaatacttacgaagagtttcagaataatcgatttgtcctgatgagtgtgatggggttgaaaacatttgtggatgggctggctgtcacaaaatcggtcggtcttctgctggaacagtttagtaaaccgatagctaaaaaaatcgctggcaaaattacaggtgctttggcctgggagcttttagggatccgaatacttgcagtactgatgacctgggaagtcttggtggcaataactttgctgcaggtggttgtgacctggatatcggacgatgagctccaggtgtggtgtaagaaatgtgtgtttggcacagcaccattcaaccgcagtgtgacagaccagaataaagccctggaagcagcaataaaggatatttcatga

SEQ ID NO: 180160 - DNA, 492 bp, Klebsiella oxytoca
atggctgatacgttccagaatgaggtgcccaaggcacgcattaatttaaagctggctctgcacacaggaggcgcgcagaagaaagtcgagctgccgctgaaactcctcaccatcggtgatttcagtaatggcaaagaagaccggccattatcggaaagagcaaaaatcaacgtcaataaaaataacttcaacagcgtactttcggaattcagcccggaaatcagcctcacggtacagaacacgctggccggcgatagcgccgaagaaaatattcagctccgcttcgccgatatgaaagatttcgaaccggagcaggtggcccgccagattccccagctccgcgccatgctggcgatgcggaatttattacgcgacctcaaatccaacctgcttgataacgccactttcagaaaagagcttgagaaaatcctgaaagacccggcgctgacgcaggaattacgcgacgaaatgagcgcgctggccccgaaataa

SEQ ID NO: 180161 - DNA, 1029 bp, Klebsiella oxytoca
atgatgacatctcgccgtcgtttcttacgcttgaccggcagccttgcgctggccggggcctctctgccgctttgggctcacgatatggcggccatggagagcggtgaggaacacccggccctgcgcctggcgcagccgtacaaaatcaagctggcgattaacaaaagcgcggtgtgcctggcgccggttgccgtcgcggagcagcagaagatcttcagtaaatacaatctcgacgtggagttcgttaacttcggcaactcgacggacgtgctgctggaggcgattgccaccggcaaggccgacgccggcgtcgggatggcgctgcgctggctgaaggcgctggagcagggcttcgacgtgaagctcaccgccggaacccacggcggctgcctgaacctgctgacggcgaaaaactcgccgttcggcggcctggagagcctgaaggggcaaaccatcggcgtcaccgatatggccgggccggataaaaacttcttcgccatcttgcttaagcgccacggcatcgatccgataagcgatgtgcagtggaaagtctatccggcagatttactcagcgtggcgctggataaacgcgaaattgccgccatcagcggcagcgaacctttcagctatcgtctgctggacaccggtaaatatcagcttatcgccagcaatatgaccggcgattacgctaacctgagctgctgcgtactgggggtcagcggtagcctggcgcgcgatcataaaccggccgccgccgcgctcacccaggcgattcttgaggcgcacagctatgccgccgcgcatccggagagcgtggcgcaatccttcctcgcccatgcgctgaataccaatgaggcggaggtcagcggcattctccacggccaggggcacggccatcatgcggtgggcgaggcgtttgtcaaagagctgacccagtacgccgtggatcttcagcgggtgcaggtcattaaaccgggaaccgatccccatcagtttgcggagagcatttatgtcaacgttttcgcctga

SEQ ID NO: 180162 - DNA, 444 bp, Klebsiella oxytoca
gtgatcggtcagacaagcgatgactgggcgcggcggttgagggaggttcgccagctgatggcggagcaggcggccagtctcgacgccagcggcgactttccccgcgacaatatcgaccgtctgcgccagcgcggttttttaagcctcgccgtgccgcagcagtacggcggggcaggtgccggcttagccgagcttcagcaggccattgcggccatcgcctggggcgaaccggcgacggcgctgatcgtctgcatgcagtacctgcaccatctgcggctggcggaaaacgagaactggtccgagccgctgcgccagcgggtttttcacgatgccgtcgagcggggaggcttgatcaacagcctgcgcgtggagccggaactgggctccccggcgcgcggcggcctgccgcaaaccgtggcgacccgccgcgcggaagggtggtag

SEQ ID NO: 180163 - DNA, 732 bp, Klebsiella oxytoca
atggatttagaaaacatctttcgtgacgttaagctaagcaaaacggaaatgaccgtgctgcgttttattcagaacgatcctgagcaatgcgttcgcgaagggatccgcgccgtggcggagcactgttatagcaatccgtcttcgctggtacgcctggcgaagaagctgaaattcagcggctggctggagctggtctattttattaaattcaatatcactatgcccaaactcgatgtgaccaacgacatcgattatatgagcattcagccggtggagcggataacgccattgctggaaagcctgcaacatcaccgcattttgattcacggcagcggcttttcgcagctgatcgcccagtatatttataataaatttttggtgaccggggtgaatgccagcctcgcgctgtggccggattacgaaatcctcgagcagaagaacgccgccaaatttgattcgatctggattatttccaaatccggacgcagcagttcggcgctgaactgggtgaaggcgctggaagggaaagagattaacctggtctgctttaccggcgattatcaaagcccgctggcgcaggcggcggatacggcgtttatcatccatgatccgcagaagttcgatgatgatatttactggagtaaccccttttttggctactgcatactcggctttgagcggctgctgaagatgtggtttatgcagacggggatccccggaggcggcgcctga

SEQ ID NO: 180164 - DNA, 543 bp, Klebsiella oxytoca
ttgacgcgccttgtccgggctacggcgtgcagacggctggaaacctgtagcccggctaagcgcagcgcgagccgggaagcagctgcgctgatgcatcaggttcggcaccttccccggaggcggcgcttgacgcgccttgtccgggctacggcgtgcagacagctggaaacctgtagcccgactaagcgcagcgcgagccgggaagccgcagcgctgatgcatcaggtttggcacctttcccggaggcggcgcttgacgcgccttgtccgggctacggcgtgcagacggctggaaacaggtagcccggctaagcatagcgcgagccgggaagcagctgcgctgatgcatcaggttcggcaccttccccggaggcggcgcttgacgcgccttgtccgggctacggcgtgcagacggctggaaacctgtagcccgactaagcgcagcgcgagccgggaagcagctgcgctgatgcatcaggtttggcaccttccccggaggcggcgcctgatgcgcctgtccggctccaaagcgcttacagcgtaa

SEQ ID NO: 180165 - DNA, 540 bp, Klebsiella oxytoca
atggcacgctttcttatctgcagttttgcgctggttctgctttatccatccggcatcgatatgtatctggtcggtctaccgcgcattgcgcaggatctgggggccagtgaagcgcagctgcatatcgccttttcggtttatctggcgggaatggccgcggcgatgctgtttgcgggtcgtatcgccgataaatcagggcgcaagccggtggcgattttcggtgccgttgtcttcatactggcctcccttctctgctcgcaggcgcaggtcagcgcccacttcctggctgggcgttttattcaggggattggcgcgggcagctgctacgtcgtcgcctttgcggtgctgcgcgataccctcgacgatcgccgccgggcgaaagtgctttccctccttaacggtatcacctgcattattccggtactggcgccggtactcggccacctgattatgctgaaatacccgtggcagagcctgttctataccatgacaggcatgggcgttctggtgggactgctctcggtctttatcttgcggtaa

SEQ ID NO: 180166 - DNA, 219 bp, Klebsiella oxytoca
atgaaaatatggcagaacatcgtggtggttccggtaatttcgctgaagaccgtgataaagcatctgaagcaggacgtaaaggcggtcagcacagcggtggtaactttaaaaacgatccgcagcgcgcatctgaggccggaaagaaaggcggccaaaatagccatggcggcgggcgtaaatctgataattcctgatattaatcgcctcattctcttgtaa

SEQ ID NO: 180167 - DNA, 549 bp, Klebsiella oxytoca
atgaataaacgaaaatatctcaccgaaactgagataaaaaaaatcatcaacgaggcgtataagggagcgaacccggagagggatcgttgtttaatctggatgtgcttcattcacggctgccgcgtcagcgaaattcgccactggcggctatctgaccttgacttgcataaccactcaatttacgtcaaacggcttaaaaatgggttttccaccacgcatcctctcttttccagcgagatgacctttatccgtgaatggctgtcggtgcgtaaaaactatcgcaacagcgacagcgactggctattcctttcgcaaaaaggaacgccgctatcgcgtcagcggatccacgtattgattagccactatagccaaagtgcgggtttaaggattgcggcccatccgcatatgctgcgccacgcctgcggtttttcgctggccgataagggcatggatacccggctaattcaggattatctcggtcacagaaatattcagcatacggtgctttatactgcgagcaatgctgcaagatttaaaaatatatggtga

SEQ ID NO: 180168 - DNA, 567 bp, Klebsiella oxytoca
atgaaaaaagcatttatggtaaaaagcgtcgttctggcaatggttatggctggcggtatttcttctgcgatggctgctttaccgaccagcgggtcttcttccaccgttcagggcggcaccgttgagtttaaaggctctgttgtcgatgcagcctgtgcggtaaccgcagacaccagcaaccagattgtgaacatgggtcaggttcgtctggctgccctcaccggtaaagactccgttgctaaccagaaaaccccgttcagcatcaagctggctgactgcgataccaccgtcgcttctcaggcatctgtgaccttcgacggcaacgcggcggcgggcgaagctggcgtgctggacaacacctctggcgcgggtagcgcggcaggcgtcggcatccagatttatgacaaagacggctctgcgctggatctgggtaccgcgtctcaggcagttacgctgatcgacggcgacaacaccctgaacttctccgctgactactaccagactgcggataccgcgactgccggtagcgtggacaccaccgctacgttcaacgtgacttaccagtaa

SEQ ID NO: 180169 - DNA, 1041 bp, Klebsiella oxytoca
atgaaaaaatgtgtcactctagcaatagtacttatggccttgataaaattaagcagcgttcctgtgtatgctaccgattatccttcaggctcatgctatattcctgatggttctacaaaaggaacgtatgattttaatatcaatacggttgtatccgatcctacgcaaaacgtccccggagagattttacccgccgtgaactcgagtagtagcggttcattctctgttgagtgttcttgccagagtgattcggttttttatacgcatcaatggacaacaacggatctggtttcgtcgggagcctccggtggtttaaatttttataaagccaacgactatctttcagtggcaggagaaattaaaaaccccggtgacggcacatattatcctttgcctttggttgacttatataagcccgttgggaatggcatgttatgtaatagtgtgacttcaggctttcattttggcaatgatgttagagttacgttcagagtagatcgcaaatttgttggagtggtaagtttcccacatataaaattatttgatttatggtacaccgtcggcagtgattttgtggaaggctcgccagtggctaccgcttatattgatggtcaactatcggtcccccaaacctgctccgttaacgccgggcaaatcgtgaccgttgattttggctcatttatgtcgggcgagtttaaaaacaagggccagatgcccgtcggctacacgccaaaaacgatttcggtacccattaaatgtaatggcatagaggccaatgctaatttgacggttcgcttcctggcggaagcctcggcggatgaaccggcggcggttaaaaccagcaacgatgatgtcggggtgcagatcaccgatagcagcggcaaggtgattgagccgaacagcggtctgatcccgttccagctggacgacaacctgcaggcgacggtgactttccacgccgcgccgattagcaccaccggaaatgccccggcagaggggaccttttcggcgacggcctatattcgcgttgacttcgcctga

SEQ ID NO: 180170 - DNA, 1542 bp, Klebsiella oxytoca
atgtcctggttactcgaaatgaaaaacattactaaaaccttcggtacggtgaaggcgattgataatgtcagtctgcggcttaacgccggagaagtggtctcgctgtgcggcgaaaacggctccggtaaatccacgctcatgaaggtcctttgcggaatatatccgcacggtagctatgagggagagattattttttccggggaaacgttgcggccgggccatatacgcgataccgagcgcaaagggattgccatcattcatcaggagctggcgctggtaaaacatctgaccgttctggagaatatttttctcggcgcggagatctcccgccacggtctgctggattacgaaaccatgaccttacgctgcgaaaagctgctggcccaggtcaatttagccatatcacccgatacccgcgtcggcgatttgggccttggccagcagcagctggtcgaaatagcaaaagcgctgaataaacaggtacggttgttaattctcgacgaacccaccgcctcgctaacggaacaggagacggcagttctgctgaatattattcgcgatctgcaaaatcacggtattgcctgtatttacatttcccacaagctcaatgaagtcaaagccatctccgacaccatctgcgtgatccgcgatgggcagcatatcggtacccgtaacgctgacggcatgaacgaagatgacattatcaccatgatggtcggccgcgagcttaccgccctctatccgagcgaagcccacagctgcggcgaggaaatcctgcgggtggaaaacctgacggcctggcacccggtgaatcgccatattaagcgggttaatgacgtctccttttcgctgcggcgcggggaaatactggggatcgccgggctggtcggcgcgggccgtaccgaagcggtccagtgcctgttcggcgtctggccgggccgctggcagggaaaaatctttattgatggccagcaggtgacgattcacagctgtcagcaggctattgcgcagggcatcgccatggtaccggaagacagaaagaaagacggtattgtgccggtcatggcagtgggtaaaaacatcaccctcgccgcgttaaaccagtttaccggtccgctgagcagccttgacgatgccggagagcagcactgtattcagcaatccatccagcgtttgaagatcaaaacctcatcgccggagctggcgatcggtcgcctgagcggcggcaatcagcaaaaggcgatcctcgcccgctgcctgctgctgaacccgcgcattctgatactcgatgagcccacccgcggcatcgacatcggcgccaagtacgaaatctacaagctgattaatcagctggtgcagcaggggatcgccgtcattgtcatttcatccgaactacccgaagtgctggggctaagcgaccgggtgctggtgatgcatgaaggtaaattgaaggctaatttgatcaaccagggcctgacccaggaacaggtgatggaagccgcactgaggagcgaacgccatgtcgaagaacacgtcgtctga

SEQ ID NO: 180171 - DNA, 1005 bp, Klebsiella oxytoca
atgaaaaatataaatgtgacagtgaaagaaactggtgctgaatacaccgtcgatggcaatcaagttaatctcaatacgcagtcagtggtcctcctgcacgttaagcgtgaggatattcgttcatatacccgacaaggtaatgatcttgttctaaaactccaaaacggtgacaccgttacaattaaaaactttttcgttgtggatgagcatggacagcacagtgatttggttcttatggatgatgagaccggcgcgctatggtggctagaaggtgcgggtaccgatggggcacactattcgctgattagcgatctttcagaagtcatcgcgaccggtggcgcgggacaaagtattgccggttgggttatggctggcgcggctttgctgggtattgcggcaatgttcgccggcacctcaaacaaagaccaccactcttcggtttctgaaagcgattctgatgctgacagtgattcagactccgacagtgatacggatgctgacagcgatagcgactctgattcagacagtgattctgattcagatagtgattccgattctgacagtgattccgactcggattcagattcagatagtgattcggatgctgacagcgacgcggatagtgattctgatgctgacagtgattccgatactgataccgagctacctaccgcggcacagaacatagcggtcattgacaatgtgggccccatcaccggtgtgctgcattctggtgatgtcactgacgatacgaccccggagattaaagggacagcagaggctggggcaacgataacgatttatgacggcgataccaaactgggttctgtcgtcgcggatgaaaatggcaactggagcttcacgttaccggagctgagcgagggttcccatagcctgagcgcgacggtgacggacaaagccggcaacgtcagcgagcgttcgccggcgtttgaactgaccatcgataccactgcgccggcagccaggccagcattccgcaggtaa

SEQ ID NO: 180172 - DNA, 996 bp, Klebsiella oxytoca
atgtcgctaatgaaaaaactgacgctttttattggcttaatggcgatggggaccacgtcggcatgggcgtactgtacgcgcctgtcgcagccgacggttagcctcgacatggttgtgggccgggtggtggttccgccggatctgccggtaggatcggtgatcgtgtcccgggactggaccatgtcggcgccgggcggggccagctatagctgcagcagcggcactaaccgctttgtggccaaaatcgtcgcccccggggcgaccgatctgggaaataaaatttattccaccaacgtgcccgggatcggcctgcggttcagccgcggcggggcgacggtcaatattatctaccctgacacgttctccagctacgtcagccggaccacgaattactcgctggaaggctcccgctttacgctggaggtgattaaaaccgcgagcgtgaccggcagcggaaccctggcggcaggtaagtacacctcttacgactgggagaacggcaataacccgatcctcgaaacccgcctgagcgccaacgccatcaccgtggtatcgccctcatgtaccatcctgagcggcaaaaatatgaacgtcgatgtcggtaccatcaagcgcagcgatctcaacggcgtcggcaccaccgcgggcgggaaggattttaatattgagctgcagtgcagcggcgggttaagcgagtcgggatacgccaatatccagacctctttctccggcacgctggccaccggcaccacggtgagccgaggcgcgctgctgaacgaaaaatccggctcctcgttggcgaaaggaattggtatccaggttctgaaagagggcgtaccgctggaattcaacaagaaatacagcgtcggtacgctgcgcacgcaagaaacccgatacatcaccctgcctctgcatgcgcgtttctatcaatatgcgccgaccaccagtaccggtgaggtagagtcgcacatgatctttaacctgacgtacgattaa

SEQ ID NO: 180173 - DNA, 2601 bp, Klebsiella oxytoca
atgttagaagcttataataagcatgtggacgaacgcgctgaaaaaaatattccaccgaagccgttaaccgctgagcaaacgcaagaattaattacattactgaccagcaagacctgcgatgataaacatgcccttgtacagctgttagcgcatcgcgtgccgccgggcgtcgatccggcggcgaagattaaagccgattttctttatcagcagatcaaagaagaaaacccggcgagtattattgcgcctcagcaggctattgaactgctgggcaccatgcagggcggttataatattcaaccgctcattcacttactggacgatccccgctgggccagcagcgcagcggaacaattaagcgccacgctgcttatttttgaaaaatttaaggatgtggaagaaaaggcgaaacaaggaaatgcctgggcgcaaaaagtgattcagtcatgggccgacgccgaatggtttttacgtcgtccggcgctgccggagaagatcacgctgaaagtattcaaagtgacgggggaaaccaatactgatgatttgtcccctgcgcccgaggcatggtcacgtccggatattcctctgcatgccttgtccatgttgtgtcatccgcgcgacggcgtcagcccggatgaaccgggaagccgcgggccgatacgacagctagagcagttaaagaaagagggctatccgctggtctacgtcggcgatgtcgtcggcaccggctcttcgcgaaaatcggccactaactctattttatggcaccttggcaacgatattccatgggtgccgaataaacgaagcggcggctttgtttttggcggcaatattgcgcccatcttttttaataccctggaagattccggcgcgctgccccttgaaatggatgtttccgcgctatccacgggaatgctgattgatctctatccgtatcgcggggaaatttgcgaagcccacagccagcgtcctgtcacctcattttccctgaaaacggacgttctgctggatgaagtgcgcgccggagggcgcattccgctgattattggccgcagcctgacggccagagcgcggcaatcactgaaccttgcgccctccgacgttttccgccggccgaaagcgccggcaccctccgccgccggctttacgctggcgcagaaaatagtggggagagcctgcggcgttgccgggatccgaccaggacagtactgcgagccgcgagtcaccaccgtcggttcgcaggataccaccggaggaatgacgcgcgatgagcttaccgatctggcctgcctgaatttttccgctgatttggttatgcagtctttctgccatacttcggcctatcccaagccggttgatgtgaagctgcatgaaacgctgcccgagtttatcagccgccgaaacggcgtggcgctgaagccgggtgatggcattatccactcctggcttaaccgtatgctgattcctgataccgtggggaccggggcggattcgcacacccgtttcccgcttggcatctcttttcccgggggctccgggctggtggcctttgctgcggcaacgggcattatgccgctggatatgccggagtccgtactggtccgttttacgggagagatgcagccggggataaccctgcgcgatctggttcacgctattccgctctatgcccgcaagcagggattactgacggtggagaaaaaaaataagatcaatattttctccggccgtatcctggaaatcgaagggctcgggatgctgaaagcggagcaggcctttgaactggccgacgcctcggccgaacgctccgcagcggcgtgcgtgctgcgtctggaagaggagaacgtggcggaatacctgcgctccaatgccacattgctacgctggatgattaatcagggttatgaaaatgccgacacgctggcgcggcgaattgcggaaattgaggcatggctggcgaatccgtcgctgctggtggccgatgagaacgccgaatatgccgcggtgattgagatcgatctcacggaaattaccgaacccatcgtctgtgcgccgaacgatccggatgacgcccggctgctgtcggaagtcgcgcgtacgccgatagatgaggtctttattggctcctgcatgacgaatattggccatttccgcgccgccggtaaaattattgccgacgcccgcgagatacccgtacggctgtggctggctccgccgacgaaaatggatgcgcgtcagcttgccagtgaaggctactttaatcagtttataaaaacgggcgccagaatcgaacccgccggctgttcactgtgtatggggaaccaggcgcgggtacgtcagggcagttccgttgtttcaacatcgactcgtaacttcccgaatcgtctgggcaccgatgcgaacgtttttttagcatcggcggagctgagcgccgtggcggcgatgatagggaaaatgccgaccgttgaacaatatttctggcacatggataaaatcaaagcaacaagggacgatatttatcgttacctgaacttcgatcggctgccagagtatcagtcaacgaatgatggaaaaaatattattaaaacattctctggctaa

SEQ ID NO: 180174 - DNA, 219 bp, Klebsiella oxytoca
atgatgtccgactttaatgacacaaactgtgttctcattattaaccggctacgctcatctgacactattatcggtgagttatcagctaaagccgttcgtgactataataaagatgatgcaaaaatattattacaaggaagagatgaaaataaaggggaatttttaccatcacaaagtagcatattgatgggcactaataacaaagtatctttaccatag

SEQ ID NO: 180175 - DNA, 741 bp, Klebsiella oxytoca
atgccgcaatcgctgcttgagtatataaaagggcgtctgaatacagaggctcccgcgccgctttatattcaacttaaacaagctattgaagcggcaatgaccgagcggttgctgacgcacggcagcatcctgccttccgaacgcaaaatgtcgcagacgcttgagctatcgcgcgtgacggtcgtgaaggcgcttgatgcgctgctggaggccgggctggttattaaacgccacggaaaagggaccgaggtgaatctgccggtaagctataaccttgccagcggcggattttctgcccagctacaaaattcaggcacggtgtccaaccgatggctggtgagggaaaagctggcggcggatgattttctggcccgtgagctggagatcgcggtcggcgatcgggtggcgaaaatcaaacgcgtccgtctggtcgatgccctcccggtgtctctcgaaaccatgtttatccccgagcgtttcttaccccgcccggatctacttgaaggttcgctgtacgcgcactgggcggaaaatgatatttatcccgatcttcaggattactcactgacggtgcatattccttcggcggaagagttgaatttgctcgacctgccgcaaggcgtgccattgatgaaaattacgctgaaaagccgcaatgctcagggagaggtgcttgagtacggaaccgcattctgcctgagcaattactttaattttgatttcagagtgaagctgcaataa

SEQ ID NO: 180176 - DNA, 372 bp, Klebsiella oxytoca
atggcatcgccgcatctcgtcggcttcggccagcgtacccagatgctggcctgcttaagtttatggctcgatcggacgctggccctcgccgctgagctgccctcggtaccgctggagatcgagctttatgccgaagaggacgagggctggctctcgctgtatctcaacgacaatgtaccgctgctgcaggtgcgctacgcccactcacccgatgccttaaactctcccggcaaagggatggagctgcggctgatccaaacgctggtcgcctaccatcgcggcgcgattgaactggcttcgcgcccgcagggaggcaccagcctggttctgcgcttcccgctctttgataccctgaccggaggtgagcaatga

SEQ ID NO: 180177 - DNA, 219 bp, Klebsiella oxytoca
atgctcaacgtcgttgtgtctgcagccttcaagaatgttcagataaccaatcaggttagcgtcagcataagcgaacgggttttccagggagtagcgaactcctgcctgcgcggcgagatggatcactcggttaaatttctcgttagcaaaaagccgggcaataccttcacgatccgcgagatcgattttgtgaaaactgaacagtggagattgcagtaa

SEQ ID NO: 180178 - DNA, 1440 bp, Klebsiella oxytoca
atgaaagttaactggcttttcaaaaacgtcacggtcattgacggcagcggcggaccgcagtttcgcggcgacgtggcggtgaagggcgatcggattgtagatatggccccggcgctgaacctgccggcggagcaggtgattgacgggcaggggcgcgtgctggcgcccgggtttatcgatgtgcatacccatgacgacatcaacgtcattcgtatgccggcctatttgcccaagctgagtcagggggtgacgacggtgattgtcggcaactgcgggatcagcgcggcgacggcgaccctgcgcgacggcgtgcctgacccgatgaacctgctgggcgagcaggagcactttgtttaccccaccgttgacgcttacgcccaggcggtggaggcggcgaagccgtcattgaacgtcggcacgctgattggccataccgcgctgcgcaataaccatatggacgatctgttccgtccggcgacggacaccgagatcgccggaatgcgggtgcagctgcgcgacgcgctgcgccagggggcgctgggtctgagcagcgggctggcctacgccagcgcgtttcagtccaccaccgaagaggtgatggcgctggccgaggagctggcggcggaggggggaatttataccacccacctgcgttcggagttcgagccgattctggaggcgctcgacgaggcgttccgcattggccgccacggcaacgtgccggtggtggtctcgcaccataagtgcgccggcgcgaaaaactggggccgcacccgcgagacgctggccttcttcgatgagatgcgccagcgccaggagattgcctgcgactgctatccctactccgccagctcatcgacgctggatatgaagcaggtgaccgatgagttcgatatcgtcatcacctggtcggaagcgcagcccgagcaggccgggaaaaccctgcggcagattgccgacggctggcaggttagcctgcacgaggcggcggcgcggctgatgcccgcaggcgccatctactacaacatggacgagcaggacgtgcggcgggtgctgcgttacccggtgaccatgatcggctccgacggtctgccgaacgacccgatgccgcatccgcggctgtggggcgcgttcccgcgggtcctgggccactactgccgcgatgaacggctgtttccgctgaccaccgctatccacaaaatgaccgggctgtcggcggcgcgtttccagctggcggatcgtggattggtgaaagtgggctactttgccgatctggtgctgttcgatccgcagacggtgcgcgatgtcgccagcttctcagacccgaaacaaccggcggaggggatcgaggcggtgatggtcaacggcgtgatgagctacggcagcgacaaaaagattatcgggcgcgcggggcgtttcctgcgccgccaaatgaactaa

SEQ ID NO: 180179 - DNA, 1488 bp, Klebsiella oxytoca
atgaataatatgtcatttctgatttggttttcgatttatgcctgcgcgatgattacgttaggttggtatgtatcgcgtaagcaaaaaaccggcgaagattttttactgggtggtcgttcactgccgatgattctgactctgggatcaaccgtcggtaccatggtgggcaccggctccagcgtcggtgccgtcgggtttggctacactaacggctgggcggggatgctatatggccttggcggtgcgatcggtatcctgctggtggcgtggctatttgcgccggtgcgtaaatttcgcttcatgaccatgagcgaagaaatgtcttattacaccggcggcagtaagattattaaaaacctggtcgctattcttatttttattgcctctatcgggtggctcggtgcgcatattttaggtggcggtctgtatctcgcttgggccagcggtatcgatattaatatggccaaaattattattgcgctggcctttgtggtgtatgtcggtatcggcggttactctgcggtcgtctggatcgatactattcagtcgattgttctgttcgtcggttttatcctgatggcgattctggcggtacatcacgtcggcggctggagccatattcagcagacggttgatccggcggcacaaagtttatttgccgttgataagctgggcatactccccgcgttctccctggcgatggtgattggcgtcggcgtgctggcgacaccttcttatcgccagcgaatctattcggcgaagaccgtctcctcggtacgtcagtccttcaccatcacgggtctgctgtatctcggcttctccttcctgccggcgattatcggtatggcggtgtggacaatgaatgccaatctggaaaatagcggtttcgccttcttgtttgccacgcaggtgctgccaccggtactggcgatggcgattctgattgccggcatgtcggccaatatgtcttcaggtagctctgatgccattgctgcggtctctattatgcttcgcgacctctataccctgacgacaggacatatgcctgcgccggaaaaagcgattcgcctgtcccggatgttcctcgtgctggttatcgccctggcgctgctgttcgcactgacctccaacgacatcatcagctatatcaccaaaatgatctcgatgatcatgtcggggatgtttatctgtaccatgcttggccgcttctggattcgctttaactggcagggcgcggttgccgcgctggccggtggggcaggagcctcggtagtggtgctgatggacagcgactggctggctttctggggcaatccgtgtattccatcggtcctgaccagcctggtcgcctctgtgctggtgacgttggtgacgccggccagcagcatgagccgtgaagaagcgcttgagacgatcacccgcgaacgtgaaagtcgaccctctgcgccgccgctacccattggcaaacgcaatacgtcgcggggctaa

SEQ ID NO: 180180 - DNA, 705 bp, Klebsiella oxytoca
atgaacccattcaaaggccggcattttcagcgtgacatcattctgtgggccgtacgctggtactgcaaatacggcatcagttaccgtgagctgcaggagatgctggctgaacgcggagtgaatgtcgatcactccacgatttaccgctgggttcagcgttatgcgcctgaaatggaaaaacggctgcgctggtactggcgtaacccttccgatctttgcccgtggcacatggatgaaacctacgtgaaggtcaatggccgctgggcgtatctgtaccgggccgtcgacagccggggccacactgtcgatttttatctctcctcccgtcgtaacagcaaagctgcataccggtttctgggtaaaatcctcaacaacgtgaagaagtggcagatcccgcgattcatcaacacggataaagcgcccgcctatggtcgcgcgcttgctctgctcaaacgcgaaggccggtgcccgtctgacgttgaacaccgacagattaagtaccggaacaacgtgattgaatgcgatcatggcaaactgaaacggataatcggcgccacgctgggatttaaatccataaagacggcttacgccaccatcaaaggtattgaggtgatgcgtgcactacgcaaaggccaggcctcagcattttattatggtgatcccctgggcgaaatgcgcctggtaagcagagtttttgaaatgtaa

SEQ ID NO: 180181 - DNA, 1011 bp, Klebsiella oxytoca
gtgatatttgcggttgccggctcgggcaagaccacgctgctgatacgacggttgagtgaggacaggaggacgctgctcctgaccttcaccgtgaataatgaagcgcatctgcgggcacagattatcagacgttttggctttatcccggaagggatcagggtgatgacctggtttgagtttctgcacggtttttgcttccggcctttcctgcaggagcagctggcatcgcgtggcctgagcttcgaccagcccccacccagaataccgcgcacgaatgcccggcattatcaggatcccgccggacggctgtatcaccggaggctcgcacatttactgacagcccgggggttgctgccggatatccgtatccggcttgcccgttactatgatgaactgcttgtcgatgaagttcaggactttgccggacatgactttaattttctgctggagctctgccgcgcggaaatcactgtgctctgttgcggcgatttttatcagcatacctttgatacaagccatgacggcaacgttaattcaacgctgcacgacgacatcacgcgatatgaggcccgcttcgacgcagcaggtttcgcggttgaccgggacacgctcaaccggacatggcgttgctcagcttcagtgtgcgagtttatcaccgggcaactgaacatccgtatcgctgcccatgggatacatgcctccctgattgaaacgatcgcagatacagagcgctcagccaccctgcacgccgataatacggtgattaagctcttctatcgtgaacatcaccgttacggctgctattccatgaactggggcgccagtaaagggctcgatcactttcaggatgtctgcattgtgatgggatcctcccactggaagcttctgacccgtcaggaactggcaacccttccaccgtcgtcccgtaacaggctgtacgtggcatgctcacgggcgcgcggcaacatttattttgttcccgaaactcatctgcgccgattccgaaactga

SEQ ID NO: 180182 - DNA, 729 bp, Klebsiella oxytoca
gtgctgtttttagactggccccctcagtttgaagcggcctaccgcgacctgctttccatccgtacagaagatgatctgacccggattttgctgcgtaatgcacagtacctccgcatgcgaaccagccaggttctgccacggggacagcagttctacgccgggactgcgctgtattttgccctgttctgcgatgtcgccggtcgtgatgaacagacgattgaagccttctgggccagtatcgcgcgtttctggggagcctggtatcgtcggcaggattattatcagcagatcaaccagctgcgcggagtcatgggcaaggcgccggcgaatggtctcagcgaggcgcatgcggtgggcgtttacagccgggtcgcagtgtttcaggatgaaagcggccagaaaggacacagtcaggtgctgctgacccttcgcacagagaatacgcaggcgctgccggcaggcgagttcgatcagtttgagttgccgttctgtaatggtcacattctggtgcctgatccgggctatggcgcccccgttgtttttctcaacaatgtactcggcctggggttccgcttccgggaaggaacctgctccatgcactgctacactgtggaggacgcccggctcggggctacccagacactgacggaagtggcggaagcgctcgtcagtaatgttgatgctcccctgcgggcctacgctgcaaccatcccggtaaatcagaggtag

SEQ ID NO: 180183 - DNA, 426 bp, Klebsiella oxytoca
atgagcaacattaccatctatcacaacccagcctgcggcacgtcgcgtaatacgctagagatgatccgcaacagcggtactgaaccgaccgttattctttatcttgagactccaccttcacgcgatgagctggtcaaactaattgcagatataggcatttccgtccgggcgttgcttcgtaagaatgtcgagccgtatgaggaactgggtcttgcagaagataaatttactgacgaccagctcatcgactttatgctgcaacatccgattctgattaaccgtccgattgtagtgacgccactgggaactaaactttgccgtccttcggaggtggttctggatatccttcctgatgcccagaaagcggctttcaccaaggaagacggtgaaaaagtcgttgatgatgcaggtaacagactgaaataa

SEQ ID NO: 180184 - DNA, 1290 bp, Klebsiella oxytoca
atgttactggcaggcgctatttttgtcctgaccattgttttggttatctggcaaccaaagggattagggatcggctggagtgcaatgctgggcgcaggactggctctgatatctggcgttgtgcatgtgggcgatattccggtggtgtggaatattgtctggaacgcgacggcgacctttattgccgtgattattatcagcctgctgcttgatgaatcaggctttttcgaatgggcggcattgcatgtttcgcgctggggtaacggtcgtggccgtttgctctttacgtatatcgttctgctcggtgcagcggtggcggcactgtttgccaacgatggggcggcacttattctgacgccgatagtcatcgccatgctgctggcattagggttcagcaaaggcaccatgctggcattcgtcatggcggccgggtttattgccgatacggccagcctgccgcttatcgtgtcgaacctggtgaatatcgtctcggcggacttctttggactgggcttcactgagtatgcgtcggtaatggtgccggtggatattgccgctattatcgctacgctggtgatgctgcatctgttcttccgcgaagatattccgccgacttacgacctggctcttctgaaagcaccggcaaaagcgattaaagatctggcaaccttcagaaccggctggatagtgttgagccttcttctggttggctttttcgtccttgagccgttgggtatcccggtcagcgcgattgctgctgtaggggctgtcattctgtttacggtggcgaagcgaggccatgccattaacactggcaaagtgcttcgcggtgcgccatggcagatcgtcatattctctttgggaatgtatctggtggtctatggtctgcgtaatgccggactaacagaatacctctccggtgtactgaacgtgctggcagataaaggactttgggcagcgacgtttggtaccggcttcctgacggctttcctgtcttccataatgaacaatatgcctaccgtgctggttggtgctctctctattgatggcagcactgcaacaggcgttatcaaagaggcgatgatttatgccaacgtgattggctgcgatctgggaccgaaaattacacctattggtagcctggcaacgctgctctggctgcatgtcctttcacagaagaacatgaccatcacctggggatactatttccgcaccgggatcgtcatgactctgcctgtgctgtttgtaacgctggccgcgctggcgctacgtctctctatcactttgtaa

SEQ ID NO: 180185 - DNA, 1752 bp, Klebsiella oxytoca
atgaaattcttaaagaatatcccgtcttacctgtttttcaccggtaagggaggtgtaggtaaaacttcgatttcctgcgcaacggctatacgtctggctgaactgggaaagcgtgttctgcttgtcagtaccgacccggcttctaacgtcggtcaggtattcgatcagactatcggtaacactatccagcccgtgactgctgtgcctggactttcggctctggagatcgacccgcaggacgccgcccagcaataccgcgccagaatcattaatcctattaaaggttttttgcctgatgacgttgttaacagcatcagtgaacagctttcaggagcttgtacgacagagattgctgcgttcgacgagtttactggcttactgaccgatacttctctgctgacccgcttcgatcacatcatttttgatactgccccaaccggccacactattcgtcttcttcagcttcccggagcctggagcagcttcattgaaagtaaccctgatggtgcctcctgtcttgggccgatggcggggctggaaaagcaacgcgaacaatacgctcatgccgttgaagcattatccgatcctgaacgaactcgcctggtgctggtcacgcgattgcaaaaatcaacactacaggaagtcgggcgtactcatgacgaattatcagctattggccttaaaaatcagtatttagtcattaacggtgttctgccagctagcgaagcagaacgtgatgcactggccgccgtaatatggcaacgagagcaagaggcgctggcaaatcttcctaccgggttatctgatttgccgacagacaacttataccttcagccgctgaacatggttggtgtgcccgcattgaaaggcctgctcaacgaacacgctgagatagcattgcttcctgaacaaagcatacaaaacaaaccagagaatatgtcgttctctgtcctggtcgatgatatcgcccgcagtgaacacggtctgattatgctgatgggcaaaggcggtgtgggtaaaaccacaatggctgcggctatcgccatcagtctggcggataagggttttgatgtgcatctaaccacctcagatcctgctgcacatctcagtacaacgctgaatggcagcctcaaaaatctgcaggtcagccgaatcaaccctcaagatgaaaccgaacgctatcgtcagcatgttctggagacgaagggcagggatcttgatgaggccggaaagcggctgctcgaagaggatttacgttctccttgcacagaagagattgcggtgttccaggcgttctcacgcgtaatccgtgaagcaggcaaacggtttgtggtcatggatacggcaccgaccgggcatacgctattactgcttgatgctaccggggcttatcaccgtgagattgctaagaagatggggaataaagttcattttaccactccgatgatgcagcttcaggacccggaacgcaccaaagtcctgctggttactctgcctgaaaccactccggtactggaagcggcaaacctgcagtccgatcttgagcgtgcggggattcatccctggggctggattatcaataacagcctctctattgcacagactcattcaccactgctgtgtctgcgtgctcaacaagaacttcctcagatcgaggctgtgaagaaccagcatgcaaggcgcatagcgttagtacccctaatggcatcagagcctaatggcatcgagaaactcagagagttggcagtttaa

SEQ ID NO: 180186 - DNA, 363 bp, Klebsiella oxytoca
atgaaaacgttaacggtgtttgatccggcgatgtgctgcagtaccggcgtttgtggttcagatgtcgatcaggttctggtcgatttttctgctgatgtgcaatggctgaaagggcgtggagttcagatcgatcgttacaacctggcgcaacagccgatgagctttgttcagaatgagaaagcaaaagcattccttgaagcttctggagccgaagggcttccgctgctgttactggatggtgaaacggtgatggccgggcgatacccaaaacgcgctgaactggctcgctggtttggtataccgctggaaaaggtgggtttagattccaccagttgctgtggtggtaaaacttcctgttgttga

SEQ ID NO: 180187 - DNA, 354 bp, Klebsiella oxytoca
atgccagaaatcgcatccctacaacttttcaaaatactatctgatgaaacacgcctgggtatcgtactactgctcagggagatgggggagctgtgcgtttgcgatctctgcacagcgctggaacaatcacaacccaagacctcccgccatctggccatgcttcgggaaagtggcctgttgctggatcgcaagcaggggaaatgggttcattatcgcttatccccgcatattccttcctgggctgcccaggtgattgagcaggcctggttaagccaacaggacgacgtacaggccatcgcccgtaagctggcatcagcaaactgctctggcagcggtaaggctgtttgtatctaa

SEQ ID NO: 180188 - DNA, 1998 bp, Klebsiella oxytoca
atgagtgataatgatacaatcccgaagaagtctacaagccagattaacaaagcggtattctttacatctgctttgctaattttccttcttgtcgcctttgcctccgtattcccggaggtcgccgacaaaaattttaaactactacagcaacaaatcttcacgaatgccagctggttctacatccttgctgtggccctgattttactaagtgtcacgttccttggactctcacgctacggtgatatcaagctgggcccggaccatgcgcagcctgatttcagctaccattcctggtttgcgatgcttttttcggcagggatggggatcggcctgatgttctttggcgttgccgaacctgtaatgcattatctttcgcctcccgttggcactccagaaaccgttgcggcagccaaggaagcaatgcgtctgaccttcttccactggggactgcacgcatgggcaatttatgccattgtggcgctgattctggcgttcttcagttaccgtcacggtctgcctttaactctgcgctccgcactctatcccattattggcgatcgcatatacgggcctttaggccatgcggttgatattttcgctgttataggcacggtctttggcgtcgcgacatcgctgggttacggtgttttgcaggtgaatgccggtttgaaccatcttttcggggtgcccatcaatgaaacggtgcaggttattctgatcgtggtcatcacggggttagcgacgatttcagtggtgtccggcctggataagggaatacgtatcctgtctgagctcaatctgggtctggcgttgttgctcctggtgctggtcctgtgtctgggaccaaccgtgcttctgctgaagtcatttgtggaaaatacgggcggttatctttcggaactggtgagtaaaacgttcaacctttacgcgtatgagcctaagtcgagcaactggctggggggctggacattactgtactggggatggtggctttcatggtcgccgtttgtggggatgttcatcgcacgggtctcccgcgggcgaaccattcgcgagtttgtcaccggcgtgctgtttgttcccgcgggttttacgctaatgtggatgacagtgtttggtaacagcgcgatctatctcattatgaaccagggggccacagacctcgccaatactgttcagcaggatgtggcgctggccctgtttaatttcctggagcatttcccgttctcttccgtgctgtcattcatcgcaatggcgatggtcatcgtcttctttgtcacgtctgctgactcgggggcaatggtagttgatactctggcatcaggtggagtggcaaacacacccgtctggcagcgaatattttgggcctcgctcatgggcattgtcgcaattgcgcttctccttgccggagggctaagtgcgctgcaaacagtgacaatagcgagtgcattgcctttctcagtgatcttactgatatccatatacggacttttaaaagctttgcgccgggatttgaccaagcgtgaaagcctgagcatggcgacaattgctcctacggctgcacgtaacccaattccctggcagagaaggttacgcaatatcgcgtatctgccgaagcgatctcttgtgaaacgttttatggacgacgtcatccagcccgccatgacgttggttcaggaagagctgaacaagcaggggacgataagccacatcagtgacgcagtcgaggatcgtattcgtcttgaagtcgatttgggtaacgagctgaattttatatatgaagtgaggcttcgcgggtatagctcaccgaccttcgcgctcgccgcgatggataataatgagcagcagactgaacaacatagatattatcgcgctgaggtatatctcaaagaaggcggtcaaaattatgatgtgatgggctggaaccaggagcagctgattaatgacatactggaccagtacgaaaaacatctgcacttcctgcacctggttcgttaa

SEQ ID NO: 180189 - DNA, 1278 bp, Klebsiella oxytoca
atgatttcacgctggaaatggattctgaagcagacagttaaaaagctatggttcagggcaacgttattcgccattgtagcgataataacggcccttttatcaattctttttaaatcaatgatacctgagtcggtttccgtgaaggttggtgcggaagcagtcgataacattctgaacatactggcatcgagtatgctggcagtgaccactttttcgttgagtatcatggtcacagcctacggttcagccactactaatgtgactcccagagctacgcgtttagttgttgaagacgtaaccacacaaaatgtactggccaccttcatcggttcttttctcttcagtctggtagggattattgccctcagtatgggagcttatggagaaagggggagagtcattttattcattgtcacactggttgtcattgccttaatcctcatcacattgcttcgctggatacagcatttgacctctctgggaagggtaggtgagacaacggcaaaagtagaacaggcggccatcgaaacatttattgcgagagcaagaaatccctgtctcggcggatatccatggcttgagaacaatgaacagccgaaaggaacggttgcagtttatccgaagaagattggctatgttgaatatattgatatggtgaaacttagcaagctgctgaccaatgatccccgtcatgtatacctcgtggcgcagccaggcagtttcatacatccatccatgcccgttttgtacctgagtcaaggccaggagtcatcaatcagcgccgatttacttgagacgattattgtctcggatgtacgttcatttgctcaggatccccgattttgtcttagcgtcatggccgaaatagcctgccgggcactttcccccgcagtgaacgatcctggaaccgccattgatgtcattggcagaggtgttcgtatactttccacttacgcgcagaataaatctgatgaaatagaagtgaaatatccttcagttcatgttgcaccacttcagaataacgatctactggaagactttttctcacctgtcgcgcgcgatggtgccggtatgagggagattcagataagagtccttaaaggactgtctatgctgagtaagggttggcctgggatattttctgaggccgcgcataatttagcatttgaaacattagagcatgcaatacgtgctgaccatatagattctgacagatgtctaataaaatcaatttattataatttatttagtggtgaagactctaataaaaaaccatag

SEQ ID NO: 180190 - DNA, 429 bp, Klebsiella oxytoca
atgcagcttctgttcgtcagttctgagtccactttcacctattttgaagccacccggggctatctggagcgttacggtaagcctctggcgttctacagcgacaaggccagtgtcttcaggagcaacaacaagcaggccaacggcggagatggccagacgcagtttgaccgtgccatgaacgagctgaacatcactggtatctgtgccaataccagttctgccaagggccgttttgagcgggctcacctgacgttgcaggatcgcctcgtcaaggagctgcggcttcgcggtatcagtacacccgaggcagcaaacgcctttgccgaagagttcatggctgactacaaccgccggtttgcgaagcccccacccgatgatttcgatgttcaccgtccgctcgagaatgataaaaaacctctatctgcctga

SEQ ID NO: 180191 - DNA, 276 bp, Klebsiella oxytoca
atgcattcatacgaggatcgtatttgggccgtcgaactttattaccggtacggtaaaaagacctctgcggttgtcagagagctgggatatccttccacaaaacagttgagccgttgggtgcggatttatgaacagaaggacgatttacccagagatttaaagccaagggaacttctggacagatacatacgctggtataacgagaagcgtatcaagctatcattaggagcaatgagtccggtgaagtaccggcagcatcttgggatcacaacataa

SEQ ID NO: 180192 - DNA, 267 bp, Klebsiella oxytoca
atgaaatcagatgttcaactcaacctaagagctaaagagtctcagagggcactcatcgatgccgctgcagaaatccttcataaatcgcgaaccgacttcattcttgagatggcctgcaaggctgcggagaacgtgatccttgatcgtcgtgttttcaattttaacgacgaacagtatgcagagttcatcgatatgctcgatgcaccagtcgaggatgagcctgccattaataaactactggcaaggaaacctcagtgggatgtataa

SEQ ID NO: 180193 - DNA, 705 bp, Klebsiella oxytoca; identical to SEQ ID NO: 8686

SEQ ID NO: 180194 - DNA, 264 bp, Klebsiella oxytoca
atgggccatggccttcggcggcggtgtcgggaaggtgtgctggccggacggatactgttgaactacgttgtctggggcaacggaagtgtttcggcccggctctggaacgcgatccgcagcgacgactgggcaattccgcacgttagcctgagcagcctcggggaaatcgtcgtctgggcgcgcccagacgagtttccgccaaggaacatgcagacgagcaaggggctgcgggcactcggctacaacgtgaggatcggtgtttga

SEQ ID NO: 180195 - DNA, 294 bp, Klebsiella oxytoca
gtggcgcacgtatccggtgaacgcacgctggccacgctggagcgtcttccgggcctgctgtcggcctttgaggtcgtggtatggatgacggatggctggccgctttatgaatcacgcctgaagggagaactgcacgttatcagcaagcgatatacgcagcgcattgagcggcataacctgaatctgaggcagcatctgtcaaggctgggcaggaagtcactgtcgttctcaaaatcggtggagctgcatgacaaagtcatcgggcattatctgaacataaaacactatcagtaa

SEQ ID NO: 180196 - DNA, 1008 bp, Klebsiella oxytoca
atgggtagcaccggaagtgtaagctcctgggatgaagcgttattaattgccgccatccaataccccgttcccgttattaaaggaccggaggatatccagatacaggtcgataagatttgtaaggccgttgactccaccaaagccggatatccgggacttgatgttatcgtcttcccggaatattcaacccagggactgaatactaaaatctggacctatgacgagatgttactcactctcgatagcccggagattggtcagttcaaagaggcctgtatccgcaacggcatctggggggtattttccttaatggagcgcaatgaagacccgtctcttccaccgtacaacaccgctattatcattaacgatcggggcgatatcgctctgcattaccgcaagctgcaaccatgggttccgattgagccctggatgccgggaaatatgggaatgccggtatgcgatgggcctaaaggttctaaactcgccgtctgcatatgccatgacggcatgtttccggaactggcgcgtgaggctgcttataaaggctgcaatgtctatatccgtatttcgggctattccacgcaggtgaacgatcagtggatctggaccaaccggacgaatgcctggcaaaacctgatgtataccgtttcggtgaatctggccggttatgacgatgtcttttattacttcggcgagggtacggtctgcaattatgacggtaacgtcattcagcaggggcaccgcaacccatgggaaattgttaccgcagagctgttcccgcgcctggtggataaagcgcgtgaaaactgggcgttggaaaacaatattttcaaccttggctgccggggctatgtcggcaaaccgggaggcgaacgcgagaattacctgacctgggtgcgcgatcttgccaatggcgaatacaaacttccgtgggatgaaaatgtcaaaattcgcgatggctggaagtattatcctgatggggtgcaattaggcccgctacctaaataa

SEQ ID NO: 180197 - DNA, 690 bp, Klebsiella oxytoca
atgctgaaaatttctgattatgctgtcgcatatggtcagagccaggtcatcagtggactgaatctgacgttagcagagggtgaaatcgtcgctctggtagggcgcaatggtatgggtaaaaccacgctgatgaaatcactgattggtatgataccgtcctgtgccggtgagttagagtttgccggtacaaatattaccggcttgcttagttaccagcgcgttcagcatggcattggctttgtcccgcaggggcgaatggtattttcaaccatgacggttgaagaaaatataaaaacggggattcgccaatcccgttcgttacaggttcctgaatacctgtatgactatttccctgtgctgaaagaaatgcgcaaacggatggcgggaaatctttccggtggtcagcagcagcagctcgttatggccagagctctcgccggtaaacccaaattacttttgctggatgaaccaacggagggaattcaaccgtcaattattaaagaaatggcaaaaatattacgtaagattcgtgatacagaagggttgaccatattagtttccgagcaggttttaagctttgtactcgatgtgtcagataaaattgttgttattgagaaaggcaatattgttcatcaacaggcgcgttctggtgctgatgaagaacaaattgcgtcatatctgtcggtttaa

SEQ ID NO: 180198 - DNA, 750 bp, Klebsiella oxytoca; identical to SEQ ID NO: 111893

SEQ ID NO: 180199 - DNA, 1116 bp, Klebsiella oxytoca; identical to SEQ ID NO: 111892

SEQ ID NO: 180200 - DNA, 927 bp, Klebsiella oxytoca; identical to SEQ ID NO: 111891

SEQ ID NO: 180201 - DNA, 1281 bp, Klebsiella oxytoca
atgaacattcgtgatttaccccagccacatagcaatatgaaaatcccgagcccaggccggtttcaccaggcgtgcctcaaagcgaaacttttggcgattgccggcctgatgatggcagctaatacggccatcgccgccccggcgacgtcagtggttaataccacgggcctggcggtcaccgacaatagcgtcaaggtcgggatactgcattcatccacaggcacgatggccatcagtgaaaccggctcgattcaggctgaaaagctggctattgagcagattaacgctgccggaggggtactggggagaaaaattgaatatgtacaggaagacggggccagcgactggccgacctttgcagaaaaagcgcgtaagttactggtcagtgataaggtcgccgctatcttcggcggctggacttcggcttcccgcaaagccatgctgccggtacttgagcaatataacggcatgctctattacccaaccttttacgaagggcttgagcaatcgccaaacgttatttataccggacaggaagctactcaacagataatctccggcattgattgggtagttaaaaataaacatgcaaaaaccttctacctgcttggctctgattatatttggccgcgtactgcaaacaaaatcgcccgtcaccatattgaaaagctggggctgaaagtcgttggcgaagattattacccactcggtaatacgcagttcaattcggttattaacaaaataaaactcaagaagcctgatgttatctatgccattgttgtcggcggttcgaatgtggccttctataagcaattgaaggcggcggggatcgatatgacgcaggagaaaccgctgctgctgaccatctccgtcacggaagatgagatccgcggtattggcggcgaaaatatcgtcggcgcctatgcctcgatgaagtatttccagagtatggataatccggaaaataaaagctttgtcgccgcatttaaaaagcgctggggtaatgacatggttatcggcgatgtcactcaggcggcctatcttggcccatggttatggaaagcggcggttgagaaagctggctcgttcgacgtggacaaaattcgtaaggcctcgcccggtattgagttcaaagatgcgccggaagggtatgtacgcatccatgataaccatcatctgtggtccaaaacggttatcggtcgcgctcgtgcggatgggcagtacgacgtgatttatcagacgccagaacttatcgaaccgaacccattcccgaaagactaa

SEQ ID NO: 180202 - DNA, 3381 bp, Klebsiella oxytoca
atgaccgttcagcaaaaggcgtttaaatcgcgcagacgctacaaccagtgggtgaccaatcagactctcgaggattttgcgctccgctatacgccggtctcggcacgacgctggagcgcaaagcgagttgttatgacagcgctcagcgcaattacctttttggcgcttgaagccattggcggcgcgctgacgttaacctatggatttaattatgtggtggtggcggttatcttagttagcattattatctttgcgctatcaatgccgattgccattaatgccgcaaaaaacggcctggatattgatttgctgacccgcggcgccggatttggctaccttggttccacggtgacctcgttaatctatgcttctttcacctttatatttttcgccctggaagccgctattatggcgatggcgcttaatatgctgtttggcctgccattgcactttggttatctgattggttccgttgttgttattcccctcgtcacctgggggttcacttttatttcccgttttcagcagttcacccagttttgctggctggcgctacagctattaccctttattttcattttaatacgtgaacatcatgtgctgcaaaactggatcgacttccctggttttattacagcccgcgatggttctttcgatttccttcagctcggcgccgtctgttccgtactgctctcactggtaagtcaagtgggagagcaggtcgatcaggttcgttttttaccaaagccacaacatccggcccgctggagatggtatggcgcagtaattgccgcaggtccggggtgggttgtcatcggcgccatcaagatcctgctcggctccttcctcgccgtgctggcgtttaattacggactcggcgcggaactggccagcgaacccacccatatgtatctggtggcatttagctatgtcacccattcatcatcaacgctactggcattaaccggtatttttgtggtgctctcccagctcaaaattaacgtcaccaatgcatatgccggctcgatcgcatggtctaattttttcctgcgcctgacccatcgtcacccagggcgcgtcgtgtggctgttttttaatgtcggtattgctctgttattgatggaacttggcgtttatcgcgtatttgaggatatcctgggcatttatgcggtggcggccacatcctggcttggcagcgtggttgccgatctcacgttaaataagtggcttaaattacgaccagcggaaatagagtttcgccgggcctatctctacgatatcaatcctgtcggcatcggttcgatgacgctcgccatgctctgcggtctctcagcctggatgggatggcttggtcatcctctacaggtttttgcctcaatgttatcgttgtgtctgacgtttatcaccgcccccttcatcgcctggctgactcgcggacgttactatttttcccggacgccggtgcaggtcacggcaacggaatgctgtgtctgcggtaattattttgaaaaaccagagatgagctattgtcctttttatcagggcagtatttgctcactatgttgttctctcgatgtccagtgcaacgatacttgcaaacctcatgcgcgctatacggaacaggcttcaaagcttatcgggatatttattaaagaaaaatcattacgcaaaattgatcccagagtgtggagttttatcagcattttgctgttattcagttccgtcatcggtctgcttttgatgctggttttcgctcagatgcgcgatgaattcggcagcgagcaggaccttctcgccgcggcgttatggaaagttttttttatcctgcttatcgtaaccggcgtcaccacctggctatttgtcctgacaaataaaagtcgccagattgcgcaagaggaattgcgcctgcaaagcgaccgtctgatgaaagaaattattgcccatgaagcaacggaccggcaattgcagcaggcaaaggaagatgccgacgatgctaatcaggccaaaagccgctatctcaccggcattactcatgaactcagaacgccgctcaatgcgatgctgggttatgcgcaattactcgaacgtgctgatgatatccccccagcccggcagcgcggtatcggtattatgcgcagaagcggcgagcatctggctaatctaattgagggattactggatatttcgaaaattgaagcgggaaaattagaaatatatcgtgaagaagtgcgcattggcgatttggtgcagcaactggtcgccatgtttgaacaacaggccagcgataaaggactgacatttcactacaacgccccacactggctgcccgaggcggtgatgacggatgagaaacgcctccggcaaattcttatcaatctgctttctaatgcggttaaattcacggacagaggcagtgtaaccctcgatttccagtatcgtagcgaggtggcgtttttctcggttcacgataccggcatcggcatcgcccctgagaacctggaacgcatctttaagcctttcgaacgcgtatccggcgatagtcgtcggatcgggacgggccttgggctgacgattacccggcttctgacttatatcatgggtggcgatctccaggtggaaagcatccgtggcgaaggcacaacgtttaaactcaccctgatgctgccaagctatagcggggatgcctaccaacccgccgagcctgcggtaatcaccggatatccaggcaagcgacacaccctgctggtagttgacgatgatgaatcccatcggcagctgatgatggatttactcacgcccataggcttcacgctgctaacagccgaaaatggtcatgtcgcgctacatttagcccggcaaaatcatatcgaccttcttcttctggatgttgcaatgcctgaaatgtcggggtgggaactgctacgtcagttacgtaataagggacaattagcgccggtaattatgatttctgcggaagcggatgagggtaaatgccgccatttcactggcgaaggggaagttcgctacctggttaaaccgctgcgtttccctttactactggagaacatcggtgaaatattgcatctccagtggcgcacggaatgtcagccgccaaagcagccggaaatacatgaaccacgctcgcagcttacccgtgtccagattgagtcgttaaaagagatggccagattgggttatgtgagagggtttcgtgaactgctggacaaacatatttccgctaaccagatcagcaaagccgagggcgaaaaatttgccgagttgctgaggcgctttcgattcaaagagatagtcgagagtcttgaacgcccggagggagagaaaaatggcaatagcaaagccgacggtacttatcgtcgatga

SEQ ID NO: 180203 - DNA, 921 bp, Klebsiella oxytoca; identical to SEQ ID NO: 111888

SEQ ID NO: 180204 - DNA, 150 bp, Klebsiella oxytoca
atgcgcgcccgctggatgtggaatatccgccagcttctgctgagcgtctggttcgaaggcgtggccctgccgccgtccctgtcacatatcaccaccgaatcacaatggcgcagtcttgaagtggtcaacaaaaactggccaccgcgttag

SEQ ID NO: 180205 - DNA, 246 bp, Klebsiella oxytoca
atggggcgctggcttgctggcagactcatgaaagagctgggactggtcagttgccagcagccgactcaccggtataagcgtggcggtcatgagcacgttgctatcccgaatcatcttgagcgacagttcgccgtaacggaaccaaatcaggtgtggtgcggtgatgtgacctatatctggacgggtaagcgctgggcgtacctcgccgttgttctcgacctgttcgcaagaaaaccagtgggctga

SEQ ID NO: 180206 - DNA, 303 bp, Klebsiella oxytoca; identical to SEQ ID NO: 96991

SEQ ID NO: 180207 - DNA, 249 bp, Klebsiella oxytoca; identical to SEQ ID NO: 161833

SEQ ID NO: 180208 - DNA, 285 bp, Klebsiella oxytoca; identical to SEQ ID NO: 161834

SEQ ID NO: 180209 - DNA, 1356 bp, Klebsiella oxytoca
atgaaaaagacccgctataccgaagaacagatagcatttgcgctgaaacaggccgaaaccggcaatcgggtggagaaagtctgcagaaagatgggcatctctgaagccacattttacaactggaagaaaaagtttggcggcatgggcgtgacagagctgcgccgcctgcgccagcttgaggaagaaaatcagcgtctgaaacgtctggtggcccctaatgcttttacgtcggaatttcggactctcgtcatctcacttgtcagagataaatatccggatttcggccccacttttgcctgtgagaaattacgggagctccatgagctggctttgtcggccgaaactttgcgcaagtggatggttgaggaaggtttatggcgtgagcgccgccgaaaaactgcccgcatttatcagcgtcggcaacggcgcccatgctatggcgaacttatccagattgatggttctccgcatgactggtttgaagagcgagggcctcgctgtacattaattgtctttattgatgacgccaccagtgcacttatggcgctccgcttcgctccttcagaaacgacccgcgcttacatggaaacgttacgtgattatctcgacaaatatgggcgtccccttgccctgtattctgacagacacagtattttccgcgtgaataatccggaacgtgaaggcgagctgacgcaatttacccgtgcaattaaaactcttgggatcgagccaattcacgctaacagccctcaggctaaaggccgggttgagcgtgccaatcagacgttacaggacagactggttaaagaattacgtcttcgcaatatcagtgatatcgaaacagctaacctgtggttgtctgagtttgtgaaagattacaactctcgcttcgcttcgatcccccgtgaaaatggtaacgcccacagggagattcttcattctccggaagaacttaactacatactcagttatcagtcccctcgtgtgctttccaagaatctgacctttcagtataaaacgagtgcatatcagatccgttcagaagggcaggtataccgtctcaggcatgcgattgtcacggtttgcgagaactttaacggtgaaataacggtgcttcatgaaagtcggtcgttgggttacgagaaatatgtcgatgggcctgaaccaaaaccgcttgatgatgaaaagagcgtacatgagcgtgtggataatgcaaggtttggtttgcgatcaaaatattacgtaaaacctgctgctgaccatccctggatgacacggagaacgcagagtaaagatgatgtgaagccgccaacgttacccagaaagaaagtaggcccggatacgaccccaaaatag

SEQ ID NO: 180210 - DNA, 501 bp, Klebsiella oxytoca
atgttttcagccagtccagatgctgtcagcattcgtctggccgaatatctatcgggcccatcccgttttctccggatgataaaaaaccctgaccgtaaggcgagagttgagaaaatactctctgccagaaaatgtaatctttcgcatcagttggcactcctgatgcattttccaaaagtaactttcatgaaaaagttacttttatcggcaatgttctttggtgtgttctccatgctgcaggtccatgctgccaacgtcatggagggcatatttaaaggcatggtggcttcaacagctcccgcttccgtaagaacggcatcacgtgtcggagctgttggggggagttactcataccgccagcctcaggtgaataccaacctcgtcaatgtcagtttcccgaaagccagcgtcgggtgtaacggcatcgatattttcctcggcagtttcagcatgatcaatggttttgatctcctccctgaaaacagtaccaggctaaactga

SEQ ID NO: 180211 - DNA, 414 bp, Klebsiella oxytoca
atgggctttaaaaagagcgaggtaagccagctaaatagtctggcaagtgccataaagttaatagaatttgatgccaataaatataccataacacatttgtatggtcgtaaagttgccgacagcctggagtactccaaagggataaatacaagaaaaggggtaggtaaatggctcggtgaaaaatccgccatgttgctgtcaaatgtcgttgtaaacaatgctattcatattttcggatatgaccatcaaaatcctacagaatcaaccagagaaatggattttaatgcacttgttgatttgttaattaacacgggctatacgccggaatactacccgctcaaggtcaacaggattgtcgaagttctcaacgggatgtcggaagctgactataaagacttattgcctggtatgtaa

SEQ ID NO: 180212 - DNA, 240 bp, Klebsiella oxytoca
ttgagcgggaagcagtatgtttataaacccgttgaccttgagttattcaggaaaaacatcgtctctatacagatgaatttcctggtcaatctatggaatatggacagatttaaaccggcttatgtcagggcttatttggctctgtctaatgacgcttttcagatgctcctcgatacagagatgtccgcctttgtggaggtgaaaaaggtgggttctttttacccggtttataacctatga

SEQ ID NO: 180213 - DNA, 465 bp, Klebsiella oxytoca
atgaacccgataattacgacacatcaggaaatcgttatcgaaaactcggttcgctatatcgagttactgaaatcagaagcgacaaaaattctggatgaatactgggtgacctggaaggcacgaaatcagttgatatcccaaaccacgtatgcaaacgggggggaattcatgcccggtcgattcgcaccggtgtttaaaaaggtcggctcatcgcaaaagctgacaattgtatggaaagatttttcgcccaggttcaaaaacaaaattgaacatcatggcgtggttgttaaacctaaactcggaggatacagcgttagttgttttaaaaatgccctagactgggaactggagatgatcctgaaaacagaaaacaaaattaaaccgatccgtgaactactcgcggaataccatcaacgaaaactggccgatatcaaaagactggaaaaactgaagaggttaatataa

SEQ ID NO: 180214 - DNA, 4848 bp, Klebsiella oxytoca
atgaatctgaacggccccgcaaacggcggtggagcagcaaccagtagcggcattttatttcaacagcaactgggagctcactttgctgctcagatcctatctggtagccgactggatgcaagattaggactgggcgaagcatcccctgtctggttgcgctttgaaacggaagcgcccgttgacgatatactggtggctacatctgcggatggttttatcgccattcaggcaaaaacaacgctttcgctttcagatgataaaaaaaatcctttttatcggactgtagaacaatttgtccgccaatggttaacatgccgggatggcaatggttctctggaatggaacaggcctcttgattcagataaggaccgtctggttttagccgtaagtaccagagcaccagcgtcaattcgggaggaacttcctgtagcattgtctcttttttctcagcacggtcctggtgcaatgaacaaaaggcaggcaaaggcgtttagcatttttgaacgctgtatttccgctgcctggggcaacataacttctgagcccctgcctcctcacctcgtttctgaattttgccgcctggttgttgttttggtcgtggatgttgaaaatatggcttcaccggcctatttacaacttgctcagagccttactaaagattccgacgcaacgacggtcctgagtatttttaccgaaatttgcggcacaatgatgtcccatcgcggtggcggcgatctgtcaatatttcgcaatgagcttgcaggaaaagggattgagctcgcagcaccacctcgatacaagaatgatattgcccaacttcagcaacattctcaggaaattgctgattccctaaatcgatatgaagctattgaaagtcagaccggtcaacctgttaccctccgcagagaatgccagaacgaagttgaacaagccgtgcagtcaggttctctattaattattggtgaacccggagcgggtaaaagcggagtcctgaatgcactggcacgcagtttgcgggaacgaggagatgatgtactggagctggcggttgatcgctattccgttgagtcgcttgaaggtctgagtcgagaactcagactggagcatagtttgaccgacgtgcttgaggcgtgggatggcccatctcagggctggctgattatagacgcgctggatgccaccagagggggcaagggagaagccgtttttcgcccactcattgaacaggtgttgacctggggtggtcgttggaaaatcattgcctcaatacgtagttttgatctgcgcatgggagtaaagcttcgtgacttgtttaaaggcgtccctcctgttgctgaacgtgctgatgctttgttttcttccgttcgccatattgttatcccacgttggtcagatgatgaatttcgccaactactggaagtatccccctctctggctacggccctagagggtgcctccgacaaactgcgagatctggcgaaagttccgtttaataccagactgctggcagaactggtttcgcaagaaactgatgtcaggtttacggctatctcatctcagacagaactattaaaactgtactggcaacatcgagttgggaaacatggacttaacgcaacgcgaaatataaaaacattagtggatgccatgattgatgggcgttcgctcagtgtttcatccctgcttacgggcacggatcctgacatgcttgatacactgtgtcatgaaggcgtattgaatcgggaacaaaatgaccgccggatacaatttcgccatcaccttttatttgactatgctgcggcacagacatcgtttgagccagatgcgctaattgcggggagattgcattttcagaaagaacacgctcagggattaatgctatcccccgcacttggctttgtgcttcaggaaatatggagttatgacgataatcatcgtagcttttggcaagcagtgagttatctggtcaatgacaaagatggagatccgattattcgtagttcggccggtcgaattgcagcagagtatcccatagaacaggacgatctgctctggcttgctggacgtgtagcagttgatgacgagaaaataataaccactttgggccatatatgcggcgcgctggcaatacgatttgaggatgaaaaaaatgttgccctgccgccatgggtgtatttggtatcagctctgacgccccaagtcaataaagttgcagaaactttgcgattcttattgcatccactcatcagacaggttgctgagccagtcttacgtaatatgctcggtacaaccagccgtgcaatgctttcgcatggcttaacattaagtgatccgcaatactttgtcggtaacgctatttcgttcgttgcagatacaatcgacaccgatgttcaggcttcctgtaatttactggcacaaatcatttctcctgagcggcttcaacgttttggctccgaagaaatccctacactttgtcacaacatcgagaaaatcggagaacatgcaccggatttcgtggcccgtatcttcgaatttgtctatagccatgacatcgtagacgatcgggaaacaaatatgggggagagtcgaatccttccgttgagatcaaatgcccgacaggattatgaactggcaagatattcacttagtgagtatttttcttattttattgaacaataccccagccatgcaattagcgctacggtgagtgctctcgatggttacgttgctcgaagacatccgatggatgcgcctactgagcatgtaacaatttccgggtacaatattattcttcagaccgatcgcagccacatttgggcatataacccagacaaccagcacgcacatgacggtgaagtactggttaataaactttttcaacgtttgcaaattgccccaagttcagatgcacttattcttgccaagcttatctgcgaaaaagcgtcactggcagtattctggagcaggctctttctggctgcaaataaacgggatgacgacctgattgattttctgtggcctatagctgcacaagaaatatttatccgaagtgaagatacccgtaaagatgccattgatattgtgggcaagggagttactcgccgctcagaagaagaacgagagaagctagaaagctctgcttttcagtatgatttttctgattatctttatccagaagaagcaaaaaacaagctgctatgttgtctttttaacgctatcggtacggagaatttatgcactcagtctgcccgagatttcttgagaaagttttcgtgtgacgttgaaacatcaagcaatgaacgactttttaacgtttctccagtcagagtaacaaccgggataccttatgattttattgatgatttagaccagaaagaaccggacaatacaattattatcgatgctgtaaaaacagcaagggaagcgctgaggcttgagtcgaacaatactcttccctccggactatcattagaaaatatcttcaatatccttgaacctgttcatagtctcctctacctggaaaatactcataattatgtacgcattaccgcagaagacgtaattatcagagcctgtaatgcaatcattgaacagaagttattgcccgcagcggatgaagaacaggcagaagaactcacatcgcattttttaaaattcctcgatatcgcttcccattctgctggccctaaacttaaggagaatacggaagaagaatttgaaaacagtaccagttggggttctcctgcaccaagacttgatgcagcgcagattatccttgatattattcctttgcgtcccgatctttatggaagattaaaagctgatattgaaagaatgctgattgatcctcatccggcggttcgcttccagacgtcagtacgcctcttacggctatgggatattgatcaggatagtgtatggcgctatttgaacgaaaggatagaacaggaaaccaacaccggtgttcttgagcacactgtggcgtatggtataagacgtttgctacatgttgatccttcacgtattttcagcctcattcagaaattactgagtcggtttagtggcgatccagaacgtcaaaaacgcattcgtaaaattgttagcagcgatataactattctctggggagtgcatgagaccagaggtgcttataacatactacaaagttgggctaatgctcccaccatttataacgatgaacttaataatgttctgttcacattaagggaagggttcattcttggacttaccggacaggccgcaccaaaagatatagaaataagacaacgagcactggatattgcttatgacattatcgatgctgccggaataaagctggaaaagtattatcaacaaacgaacctgacagacattgacaaagaaaatgtaaaacggtgtgcggaagtcatcgacagagcctgttcgcaactacgcttcgcttgcgaaggtaagcataattccgacgaaccgccattgaaaaatgagggacttaagcaattcctgaataagactgagaagcacctgcagcgtatcggtgattgtggtacgccgcacactatctactatcttctcgaactccttgaaacactggttcctgtcgcgcccgaaaagtgtttcgatctactggctaacgcgctttatcacggaaggaaactcggtttccagaacgaaagactgggaatggctcaactggtaaaaatgatggggatatttcttgccgattataaaaccatctttgacgatcaaaacagacgtacccgtttgataaacagtctggacatctttatggaagcgggttggcctgcggcccggcgtctgctttataggttaccggagttgattcagtga

SEQ ID NO: 180215 - DNA, 1956 bp, Klebsiella oxytoca
ttgaatattacagaacaacagattgtaaagctggggccaccagtagggaaagcagatgcttatttaccacttgaatttatggaaccgaaaacattttcgctattttgttgtgagctcatcaaaaaacggctgaaaattgaaaacggcgagatagttgatgccatgaccattggtatttccggtcaatcacaatttggggcggatattgttacgcatcgccaacacggcaatcaggatgtttattcgttatacgaagttaaacgttgtaaaaaattcacaaacagtcactatatctctactgttcgtcgttttagtgaacaccgggaaaaatggcaggtgaatatcaatgagttttacattttcctcagtgagaaagcgtcggcaaaattaatagcggaatacaaaaaacaagaggctatctttaaggaactgaatatagtacatcgtctgcttgatacggaattgatccacgactggctgaaaaatctgtattgtccagatctgttgtatcgattttgtcacgagagctgggtatctcttttttatggcgagcgagcactgttaaatatcaaagactatggcgtgtgggactataacgaatcttatgcctggcgaaattacacgcatccatatgaacacattactgttgatacctatacacttcagaacgatcatgtgtttattcaggcgtttttacctaatctaaaagggaatcccctctcctgttttattgattttcgtaatggccgctatagccatgttttgctgacgatgagtcagaatgacctgctaaattcggccttcgaaggggcaggtagtccaccggaggcgggagtaagaccgtggattttaaaagaacatcatggcgaaaattattattgcgatatcggtaactgccgccttgtactaaccctaaatgaaacccgctctctctgtgatgcttttgataagttctggaggggctataaacagcgcatggaagagattgaccggatttgtcgcactgttgatttctcgaacagtacaccacccggtgataatattcatctcattaccattccttactggctatggggtcgcatcagcaccttttgtcaacatcatgactatctggataccgaaggcgagtggtcgatatttaatcctgcccgtgaacgcattatggtctttacccgttataaagacgaagtaatgaacgaaggacatcacgtcacactattagccagccgcgaccctaattttaatcgccttactaatcatcgcgtggcgctaatctggcaacctcccagtcgctacgatatcaataatatggaagaggacgccatcgggcctcgtaattactgggatgcgctgacgacatatcgatggctgattgagaaattaatccctgcggcagatagctggtactgtgctaattactttccagaacgcaggggctggcaacgactgccatttcgcgcaccccgccatatctcctgtacatccgatgatatttattccaactaccaaccggaaagtaatatctctgttgaacaggtagatagcaaacagagtctgctggcgttgctgactgaactacaacatttttttaatatctacactcgccaggtgtactttaaggcaagtgaatttgagcaactttgcgatgcctttctctttttattgaacaaaacaaccgtcaattactggggctatatccgcagtagcgtcggtgcttcgcaggaggagcgagagtctgtggtaacagcattgcaaaagtatcggagggaaagtacggtttatgaaagcaattcgtcactgtatgactatctgtttcgcggcatgatggcactatttggcgacggtgactgccatattaacgaagtggaagcgattaaggttgcgacattgttgcgcccctttgtggataaggtgtcggagggacgttttttgcggcgttgtcagaagcggttatag

SEQ ID NO: 180216 - DNA, 558 bp, Klebsiella oxytoca
atgtatcggctggagacttcagagcaaacagaccctgttgcagtgagttccgactacatctctgagtatctgaaacaaggaggcatgaaccctgctaacaagatgctgattgaaattgacttggaagaagccagcagtgacgatcttgcagaacatctgaaagtactgattgctctatggcaaaagcacctaaaaacgcctaagccacctaaacgaaggtttcggtttggtcataagacctttgaaaggatacttgattacaaagtcatccctttgatggatttaatctcatgggaacagctctataacgaaggtaagaacatacctttcaacatcttagctgacattctacatggtactggtggggttcgcagccgtgataacatcaaagatactgattatgattacgcgaaaagttatctcgataaggatgagtactttaaggttttaaatgatttctatattaaaaacaatatgttaaaggaagggatgttcacaatctgcgaacgtccctataaagagtatcccgccaaaaatttccgcgaaactcacggttag

SEQ ID NO: 180217 - DNA, 219 bp, Klebsiella oxytoca
atggttcaaatcaaaacagataaacatcccaagcttattcgtttacctgaggtaatgaatagaactggattcgggaaaacatggatatatgagcttattaaaacaggttgctttcccgcacagataaaaacaggtgtaagagcaatcgcctttattgaaagtgaggtagatgcgtggattgaacgggctattcaggcatcacgaaaacaagcagtttaa

SEQ ID NO: 180218 - DNA, 318 bp, Klebsiella oxytoca
atgagtaaagcgataacagaagtccacgaaatcaaagtctacaatgaatcaaccagattattccttgtgaagtcattttattgctatgagctttatatcagtaatatgcaggaatacatgggcgatagatttgttaaaatggttgaagacagaatatatatggatgatgtttttgacaaggtaatagaaaacagtaaggaaggatttaataagtttcttaaggagtgtaaaagctcaggctctctcagagatgttttattcgatgaggtcaaagtgaatctgaggcatatgcacaacgttatttttaactcaaactaa

SEQ ID NO: 180219 - DNA, 237 bp, Klebsiella oxytoca
atgaatgataatattgcaatatcagtaagtctgctatgtgagcaaacacctgaaatactctgcaccatccaagcaagcgtcagtacgttcattgcgctatgcgggtattcagccgaggaagtaatggatgatgaaaacctgacagatacgttgaacagttatgttaataacgaactggtaagtgaaatggatttaaagtacggatcagtgattattaatctggtttataaaaaatag

SEQ ID NO: 180220 - DNA, 297 bp, Klebsiella oxytoca
atgcctaaagaaactgtagtaacaaataagtctacacagctgttccttgatcttgctataagatcattggaggcaagctggaagctttttcaggaagtgaatggagatggagacgctaatgactatcttgatgatcctgatttcatgagtccatttattatgaacatcattgaccatattcagaataactttgagagatttacaacccaagaaggtgatagtgggagtattaatgaagttaacttcgagcagattgctgttgtgttggtgtgccattcagaacgattcaggaaatga

SEQ ID NO: 180221 - DNA, 243 bp, Klebsiella oxytoca
atgattgatgaatttcatgtgttgtatatgtataaaaaaatccaagccgaagctgcggcaacagatatgaaaacactggaacggtttttgaataagttccgcaaagttgttgcggagcgccgggaagaatactatcaggagattggtgagaaaaaggctcagaatttgagggctaagagattacaaaagttgcttgagaaaatggcgtgtaaccgggtttctccagaagatctacaggaatga

SEQ ID NO: 180222 - DNA, 639 bp, Klebsiella oxytoca
atgacaactttttactataaagatgtacccaattatcttataaatagttttgtagccgtaagagattcatttagtaatctagaaaatttattatgtgtagtaaatatcataaatcattgtcaagttcatcgggagagcaatggactggattttgatattgccattttgacctctggtataaaccgtattttagtaaaaaaaaatgacggtttttttactatgagttttccatttcaacttatagattatggatataatttatccgcacatcttgacgattatggtattacaattgatgctgcgttcatttcttatatgaagaatgctcttgaaacagccacatcaaatgtttactgtcatgatgatattgctttatcattgaataatagttttggcttggagggattggattgcactatatatgccgacattttttcacatctattattaaaagatcatggttattttagatttgacgatgatcctgtcaatgaaaatgcaaggatacacccacggtaccattttgattttttttgtacaaattcttcaagcgtcaagcttggtcatcctaatttaataaattcggacttcttttttgacttgtttgatgtaaataaagatcgtccatatttaacttaa

SEQ ID NO: 180223 - DNA, 1983 bp, Klebsiella oxytoca
atgtcaaattactgttactatgcagatgatgcccttgagctagtcgaaaaatctgaattaaagaaaattatagatgaatatgctgagcataatacaaagcaaacatttgtccttcgcagaccactgtctaaagatgattcacattatgactataacaatgcaatcgtcatcttctctgctggcatcaaaccttgcttcataaatctagatgacgatgaagaaaactttgaagaatatatcgacgaatttttggaagatgtagcctatttatctgaaaaatttaaatatcgagaaaaaataggtagaaagaagaaatggcaagatcttttcatatctgtgaatgaaaatgatttttctttcgatgatttaacccttgatacaaaagagtctcggattgttgatttaatcatatcacttattgttggtagcattaatgatatgtctcgcattgatctaaatgcaaataacatccttgactcagttaagtcaaaaataatacttttcgatacagatcaaactagttttgtatttaaatccggcataggaaaaaaattcgtaatacaagggcttgcaggctctggtaaaacagaactattattgcacaaactcaaagaagtttactcaaagaatagcgaagcaagaattgcttttacttgtttcaataaaatacttgcttcgtcaatgaaaagcagaatccccgatttttttgacttcatgagggtagaaagacaaatagattggaataataaattattttgttttcactcttggggtagtagtagagatccattttcaggaatgtatcgttatatatgccactattacaacctcgctttcgggacatattcatcaggcacttttgaagggctttgcaaaagagcaattgaagaaattaaaaaatcaaactgggaaaagaaaaaagcatttgattatatttttgtggatgaaagccaagatttcccacagagctttattgaattatgtgaattggttacagaaaagaaagtatttgtcgctggggatgttttccaaaatattttcatgcctatcgccgagaatgttaaccgcgcagatatggtactcaaaaaatgttataggacagacccaaaaaacttaatgttctcgcatgcattaggaatgggactatacgaaacaccagttcttcgttggttaaaaaatccagagtgggattcttgcggttacacatatcaagaaaagaatgatcgtgtgctattatcaagagatccacttaggagatttgaagatattcctgtagattatgaaagcacctcgcttcacttaattgacagtgggaataatatttctgataaaataatagacttaattcataatattaagcgcagacatcccacacttcagcaaggagatattgcggtaatattccttgatagaggaggatatatttatgacgaaattgataggcttgtgcctaaaattgagtccactttcggttgggagacaaacgtatcttttgagagcaaagctcgggatgcaaataagttcttcatatctaatataaataatgcaaaaggtttagaatttccatttgtcatctgcttcgcaaaggcattaactcgtaactcatcatttagaaatgccctatatactatgatggctcgctcatttattgaaagtcatttaattttgaatgaatccgctgattcgccagtaattaatagtattacacaagggttagattaccttataaaaaataataaaatggatgttagaaagccttctcaagaagaaatcgaaaaacaaaatgattttatagtccttgatgaagcagtatctgtagaaggcttagtcaagagtttttgtaagagccggggtgccacaccaagacatattgcaaaacttattggtagagttaaaagcatgttgagcgaagatgaggattatgacgcagaatatattaatggtcttatagaattagagtacccaaggactaaaaagctatga

SEQ ID NO: 180224 - DNA, 549 bp, Klebsiella oxytoca
atgatagaaaataagatacaaactgaagtaaagaaatcaagaagaggtctcccacgtcatcttaaaaacccatttcttaatgatacgagtctacatacaaaaactggcgtcagacgtattacaacaggaaaagatcgattagcattagtgaatgaaaatacgggagagcaagttggtaatggcggtttttttcaggctatggaggtagataagacacagttcgtgaaactttatgttgacggagtatctgctattgaaggactgtcttcatcgggtaaaaaagttttcaagatcctttatcttgctatcagagataataaggatactgacactatcttgatgtcatacgatattgttgatcaagatgtcgtaaaaatatccagaacaacatatttcaaaggcatgaaagaacttgctgacaagaagtttatcgcagagaccatgatacagaactattactttattaacccggactatatgtttaatggtgatcgcttgacctttatgaagacatactatttaaaagataaaaccacaaaaataaaataa

SEQ ID NO: 180225 - DNA, 1218 bp, Klebsiella oxytoca
atgaacttaattaagagtatttcttcaatcgccagctcctcggtcctctcgcaggcgatcggcgctttttccgtgtggctgatttcccatcgctacggcatggcggaagtcgggcactatgcgatgatctacagcaacgtgctgattggcgcgcaggtttgcacctttgcgtcgcagctgctgatcccgcgccaggaagagcatgagctggggcagaatgtggtgttttgcctgctgcaaagcctgcttctggcgctgccgtgggcggtcatcaccggactgatattccatctcaatatcgcgtttctctacctgctcaccttcggctatgcgctggttttgatcgccgagaacctctcgctgcgcggcggtaactatcagttcctcaccttccagcgtatcgccgtgtcgctggtggtggcgatagctctgctggcgatgccgaataccacgctgttctatattgcctggatggcgggtattttgctgctgctcggcctctgcctgctgcgtttgtttcgcttcagcaccctgacgccggcgcacttttcaccgcgagcgaacggcctttttgcgcgccagcactggcagcacctcagccgcgtcggcagcgcggaagtgctggcgatggccagcaataacctgccgacgatgttgataaatatctggttttcaccgctggtcgcgggctatttctcggtagtgagccgcttctgtttatcaccggtgatgattgtcggtaacgcggtgcgcaactccatcttttcaaaatggtcgatggattttcgcaacggcacctttaactatccggagtacaaaaagattcgcctgctgctgatggccgcggcgctgatctgtatccttgggatctggattttctatccgctggtcatgcgcctgggcttcagtcaggagtggctcaattccattccgacctcacgctatatgctgccctatctgttcgccgcgctggccgtcagtccactgaccgttattgagcttatctttggttctaaacgctattttttacgtattcagatcgagcagctgctgatcattatcgtcgcttttatcgcgctgcctgaattgggccagcgctatgagatagccctcctgacgttctccgtgctgaccagcattcgctatctgttcatcctgctgaaaatgaacaaacgggcgctacagctctcccggcaggagcagaaaatatgcagctaa

SEQ ID NO: 180226 - DNA, 1248 bp, Klebsiella oxytoca
atgccttacgcatgggctgacctgcaggcaaaaccacataccggtgtggctggcatcgatttcgagagccaggtgggttatgacgtcggttacaatgacaacgtgacctggcaacgctacggcgggaatgaaatcggctccgcttatcaaggcgttaagccgattttcaaagccatcggcgagcgctacgaggaccgctatttattgatgtactccggcgattaccgccgctacgccagcgatagcgcagataaccgcgacaaccatttttttatgtttaacggcaagtggcgcttcggcagcatgcacgggctgtcgttggatctcgatgaaacgttcggccatgaagagcgcggccgcgataccaccgaggggtttctccccgagcagtttaaagagtttggcattaataagcccatcgccacgcgcttctttaacagtgaactgcgctatagctacggggcgccggaaggccgcggtaaagcagaagttgcgctaatgcataagcagctgcgctttcgcaatctcgacagcattgaggacgccagcgccgactttcattattacatgcacgatcaggagtggcatgaaaacagcgtggtcgccgagctttttgatcaaaaagccaaaacgctgcgctatcgctacagttttattaccaaccagcgtcgctatgagctcaacccgttaaaagacagtaatgaatattacctgctggtcggcatgaaaaatcgtctttccggcaagaccgagatccacggcaacgtcgcctggctgtataaagattttatccataatcccgactcgcaggggttcaacggcctgaactgggatattaacgccgactggaaaccgcttgaacagataaagctcaacctacacagttcacaacgaataaaagatcccaccgactccggcggctatattctggtatcaaatttcggtctgggctatgagcaccactggctggtcgacaggttctccactctggttgattactcttatattacagaggattacaaacaccagaccaacggacgcaaagatcgatcaaacctcgtttcgctcaccttcaactacgactaccgtccatccgttaattttcagctgaagctgcaatggaacacgatgcattctaataaagaaaaagatgccttttatattggcccggactatgaccatgaggtcgagcgcacgctgggctacaacgactcggccattatttttatgacgcaggtacaaatatga

SEQ ID NO: 180227 - DNA, 1632 bp, Klebsiella oxytoca
atggcggtggaaaaactgattgtcgaccatatcgatacctggaccacggcgctgcaaacccgctccacagcggggcgcggcagctcgggcaagattgacctgtacggcattaagaagctgcgcgagctgattctggggctggcggtgcgcggcaagttggtaccgcaggatccgaacgacgaaccggcgtctgaattgctcaaacgtattgcggcggaaaaggccgagctggtgaagctggggaaaattaaaaagcccaagccgctgccggagattagcgaggaggagaaaccgtttgagctgccggaggggtgggagtgggtaacactggcgaccataggtgaaatagtcggtggaggtacgccaaagtcagataatccacaatactgggccaaaaatggtattaagtggcttactccggcagacctatatgggctcaaagggaagtacatttcgtctggagcccgtgatatttcacccacaggactgtcaaactcatcagctaggttaatgccaaaagggagtgtacttttctctagccgagcaccaattggatatgtcgcgatagccgatgcagaactatcaacaaaccagggttttaaatcttgtgttccatatatcaaagatagtgcagaatatatatattacttcctaatggcatcagcaaaaaaaatagatgcagaggcaagtggtactacatttaaagaagtatcaggggcaattgtatcgaaaatattatttcctttaccgccattaagtgaacaactaaaaatcgtctcaagggcaaatgaacttatgtccctctgcgaccaactggaacagcacaccctgaccagtctggacgcccatcaacagctggttgaaaccctgttaaccacgctaaccgacagccagaacgccgatgaactggccgaaaactgggcgcgtatcagcgatcatttcgatacgctgttcaccaccgaagccagcattgacgccttaaaacagaccattctgcaactggcggtgatgggtaaactggttcaaagcagtgatgttgtcgagtataaaaagctaaaaacgtttctttcttttggcccaagaaatgggttttctcctgtagaatcaaaaaataatactcggatcaaagtcttaaagcttggtgcaacttcttatggagaactaaatatacaagaatccaagtttgtagatattgacatcgataataacagtcatctgtatattaatgagggtgacattttaattcaaaggggaaactctgcaaattttgttggctgtaatgttttggtaaaagaaaatcacaaaaatatcatttatccagatctaatgatgaaaataagaacaaatgaagatctcttacccgaatatgcttctatttggctatcatcacctttagccaggggatttatgtgggacagaatgactggaacatcgggaacaatgcctaaaatcagcaagaaagtagtcgaagaaattccgattatagttccatctattgctacccagcaaaaatgcatagcattcgtgaatctggctatcaagatttgctctgatcttaaaattcgtctgcaaactagccaacaaactcagctccacctggccgacgccctcaccgacgccgccatcaattaa

SEQ ID NO: 180228 - DNA, 267 bp, Klebsiella oxytoca
atgaaaaagacccgctataccgaagaacagatcgcgtttgcgctgaaacaggccgaaaccggcacccgtgtcggggaagtctgccgaaagatggggatttctgaagccactttttataactggaagaagaaattcgccggtctgggcgtgaccgaactgcggcgtctgcggcaactggaggatgaaaatcaacggctgaagaaactggtggctgacctgagtctggacaaggagatgctgcaggaggtactgaaacaaaagttctga

SEQ ID NO: 180229 - DNA, 753 bp, Klebsiella oxytoca
atgcagagcagaaccgtttaccactggcagagccggcgggatgatcgggcgataaccctgcgtatccgggaaatagcggaaacccggatccgctacggttgcccgcgtattcatattcagctgcggcgggaaggctggcctgttaaccacaagaaaacacaccggatttactgtctggaaggcctcaacctgcgcagaaaacgcccgcgcaggcatgtcagtgcagcacatcgtcagcaacgtccggtcctgaccggtgtcgatcagtgctggagtatggatttcgtgtcggataacctgtttaacggacgacgtttcctggcgctgactgtagtggataattttagtcgggagtgtgtggcgatccatgccggaaagtcgctgaaaggtgaggatgtggtcggtgtgatggaagggttgcgggtgctgggcaagcgcctgccggtacgtattcagacagataacggcagcgagtttatttcgaaaattctggataaatgggcgtatgagcacggtgtcacaatggacttctcccgccccggaaaaccaacggataacccgtttattgagtcatttaatggcagtctgcgggatgaatgcctgaacattcactggttcctgtcgctggaagatgcgcaggacaaactcgacaactggcgcagggaatataatcatgagagaacgcattcatcattaaatgacatgactccggctgaattcatccgaagtctccggaaagacgaggatctctga

SEQ ID NO: 180230 - DNA, 849 bp, Klebsiella oxytoca
atgaaagcggctgccgatgagttatgcgtgacatccagcgcggtcagccaacagattgctaagctggaaagcatgacgaacagccggttgttcatacgtagtcctcgccgtctcgaactgacaaccgaaggacgcatctatctgcgggcgataaggccggctttcaatcagatagcagaagcaacacagcgcttaatgaatgaaggaaaggcaaacaaagtgacggtcagttgcacaagtggttttgccatccaatggctcctgccgcggctgcctgcatttgaaaaagctaacgcgggcgtggaagtgcaaatcagtaccaccaacaggcaggttgatttactgtctgaagggattgatttcgccatccgacacggggctggtgactatcccgggctggagtctgagtgcctgataaacgataaactcctcccggtctgtagcccccggttaatcgcatcagaggacgagctctcatcaccgggcgatatggctgaatacacgctgctgcacgatgaacacaggctggactgggctctctggtttcgtgctctgggtattagcaatttgaagacagacacggggcccgttttcatcgattccaacggcgtgattgaggccgcaatcgcgggcaaaggtatcgcgctcgtgcgcagttctcttatttgtgaagaactgaagagtggtttgctgattaacccgctaaaaataccggttgatacgccgattgcgtactatctggtgtacgacgagtccgcggtcttgcagaagatatgccggcgtttccgtgactggataaccacgaccgcgaccaaagaatttcccgcgatagacaagagggttatataa

SEQ ID NO: 180231 - DNA, 888 bp, Klebsiella oxytoca
atgcgcattgctgattatcttcggttattgttgctcgccgctatctggggcgcgagttttctctttatgcgtatagccgtaccgcagtttggcgctattaacacggcttttttgcgcgtcttttttggtttcacaggactcgcggttattttatttatctttaaatcttcttttgactttaaagataaatttaagtcctctgtgatgcttggcgtcattaattctggattacccttcctgatgtattgcctggctgccaaatggttaccggctgggtattcagccattctgaatgcaacaacgccgttgatgggggcggtgattgggtttgcattttttgcagagaaattaacattcagaaaatgggctggcatgctcctgggcattgtcgggatcatcgcgatcgccacaattggtgaacccctgtcagctgagaaacaaattgccggcgttattgcctgcctcatcgcgaccagttgctatgcgatcgccggttttctgacgcgtagctggatttcaaacaaaggtggactcgatcctaaaatcgttgccttcggtagtcagataggtgcgtccttttttttgctacccttttttatatggagcacccatagtggaccgaccgttaactggttacagcaagaggcatggataagcgtcattgccgcaggagcgatctgtaccgcatttgcctacatactctatttccggcttatcgctgatatcggacccttacgttcattaacagtgacctttttaattcctccatttggcgtgctatggggatacatggtactgaacgaaaccgttaacaatggttttgttatcggggcgatcattataggtattgctgtctggatggttgtgagcccggaaaaaaataattag

SEQ ID NO: 180232 - DNA, 1959 bp, Klebsiella oxytoca
atggcaatcagtgctgccctgcaaaaaataccatcacaggcagggaaaacaaatatccttgaaagtcttggaaacgacctgtcaaagatgcttccgttgttcgacaacaacaatgaaaagctaaagcagtttatccagctttcaaaagattttggcgttgcgccgccccaggaagatattgataatctagtaaaggttaatcagtttttccaggatattgagaccagtgcgcgtggcttgaaaatggaaatcgcttctggcctggcaaaagtcgatctctcaccgttgcaggctggtcttgatgatattcgtgatgtatttaccgaccctgcagttcttcagggaatttctgaccttgtaggtgaggcgatcagcctcgctggtgtggttggaagaattgctggtggtttgggtgccattgcatcctacacccgatctcgcgttggtgccgtatcagggaattacgatgcttctgatatgaacgacgtagaacagcgtattgaatttctgaacaagaggggcaaccagagcaaggaacaaaaagaagagttagattttttaaataagcgtcgccaattcctacaagctatcaaaggatcgatactcacaccagaagaatcgcaaagggccgcgaagggtatgcagtccctgctttctgggatgggcatagatcctgttattgttgataacaacaatctcggtaagggagaatcgaatcagaagcaaactgccaagaaaaatccagttgataacgcattccaaagtagattgttagatctacagaaacaagctgcacttattgaaactactggaaagaaaacagccgaagttaccgagcttgaaaaaattaattttgatatcactagcggcaatcttaagaaattgtcagaggctcaaaaagaacagctccgcactgctgcgaaaactctagactctaaaaaagaagagcttagacttaatcaggaaaatgcaaagattgcagaatatgtttctggattagagaaacaaaataagttaatacgtaaggggtttgataaccaaattgttggccgttattctggtagccgtgaacgttcacggatgcaggaaaataatgaaattcgactagactttgaatctcggcaagaagatttattaaaccagcttcagtcaggtgatattgataagagcctatacgataaaaaaaaggaagcattacagagttctctagatgaaagactgaaaattcaagaagaacattataaaagtgtagatcaactacaaaaagatggtgtggctggtttcgtttctggtatctcagaccaagctgctgcgtattctgatttatatactaatatgtcgcaggtgggtgcagaaacttttagcaacctaacgaatatggtaatcacctgggccgaaacagggaaacttaatgctgaagagtttgctgctactttcattcagtctgtaggtgctgcattactgcaatatgctgcagcgcaagtagctatggctgcactgagcgcatttactgcttggatcggcgtgccttatgtagggccagcagtggcatcaacccaagcaatagcggcggcagcggccgcaggtgtatttatgacggctattggctctgctcttcagggccaagctcacgacggtattgactccgtacctgaaaccggaacttggcttcttcaaaaaggcgagcgagttactactgctaaaaccagcgcaaagctggatgccactctggatagggtcgcgactcagtcaaccggtagcggcgctatttattcgcctactatcaatatcccaataaatgggaacccatccgatgcaactttggcgctggtgcgtaaagccgcagatgagggtgctgaacggggatatagaaaggcggtgaactcagttgcaagtgggcagggtgatttgcaccgagcattaaccagcaaaactaactctgggaggaaaatcggctga

SEQ ID NO: 180233 - DNA, 480 bp, Klebsiella oxytoca
atggctatcacctcaacgctttactatccctccgattacctgccagggcctcttaaagatagttttggtttaactccggtttctccgctgaaacggacctcgatggttactggtcgcgcgcggcagcggcgtgcttatacctcgacaccaacccaaacagatctggcatggatatttaatgatgcgcaagctcaggccttcgaggcgtggtttcgcgatgtgctatctgacggggcggcctggttcaacataccgttattaactcctgtagggcttaaaaattatgtatgtcgcttcacggacatttataagggacccactccggagggtgggtatcactggcgatatacggcacctgttgagctatgggagcgtccattacctccggctggatggggacattatccggaatggatagtcggcagctcactgcttgatattgcgctgaataaggagtggccaaagcatgacgcagattaa

SEQ ID NO: 180234 - DNA, 483 bp, Klebsiella oxytoca
atgacgcagattaaccgcctttatgccagcagcgggccggaggtgatcattgaaacgctgcagataactatcggttctgatgttcactacctctgccagggttacgaggatatcacagcgacgacggaaaacggcgagaccgtaacgtttaccgcctgcgcgatggatattgcgctgccggcgcgtaacgaggacggcacgcaggacctgaaattcgctctgtgcaatatcgacggcgttgtgtccacggcgatccgcaatgcgctggcgaaccgcctttcggcgtcgctgacttaccggagttatatctccacagatttagcggcgcctgcagcggtaccgtatacgctgcaggtcaaatctggctactggacagcgacagaggtgcagatcaccgcgggctatatgaatgtcctcgatacagcctggccgcgataccgttatacgctccctttattccccggtctgcgttacatcagctaa

SEQ ID NO: 180235 - DNA, 381 bp, Klebsiella oxytoca
atgtttaaccctgacaaatacctttcagtcacctggctgaagggcggtcgcacgtacccagaacttgactgcttcggcattgtgaacgaaatccgggcggaccttggactgcctctctggcctgagttcgccggagtgaccaaagacgacggcgggctcgaccgtgaagcgcgacggatgatgctttctctggagcgctgcgaaccgcgcgaaggtgccggggtggcctgttattccggttcaaccgtcacccacgtcggcatcgtcgtcaatatcggtggcctgctgcacgtggcggaatgcaatccgggaacgaatgtcacctttctgcctttgccgcgatttaagcggcgatttgtcaaagtggagttctggcaatga

SEQ ID NO: 180236 - DNA, 3069 bp, Klebsiella oxytoca
atgaccattcgtttttatccgtcgcggctgcccggtgagccgctcgaaacgcatgagcatggcgttaccagcattcgcagctggctggttgccaatgtcgaagactatgaggatcgggatgttccaccgctggctattgaactcgatggccagccggtaccacctggcgaatgggcgtttcgcatcatccggccggagagcgacgttcgcatatatccggtgcctttcggacttgaagtagcaacgatcgcgtggataggggttggtatcgccgtggcaacggcggcctactcactgttcatgatgggtaatattgatgccggtggttacacgtcatccaccggacgaagcctcgacctgaaccccgcgaaagcaaacagtgcgaaactgggtgatgcgattcgtgaagtttttgggcgcgtgcgtatttatccggattatgttgtgcagcccgttacccggttcgatgctgccgatccaacgaaaatgcgcgtacagatgctgctgtgccttggtgtcggagctctggattataccaatggcgatatccgggttggcagcaccccggcatcgacgctgctgggattcagcagcacgcattatcccccaggtgcggacgtatccggcgatgagcgcagtgaaaactggttcaattctaccgaggtgggcgggacgtcatccggtaccgggctggacatggcccagacgtcgccggatgcggacgacattatcgcagacagcatgaccgtgaccggagcagacgtaacgtttaccgggctggacacggatgatggtgatgatgacgacgagaacgacaattctctgccggatagttgggtagaaggcgcgattgttgagataaaggctcccgccaattaccagatatcaacggcggccgggtacagcgttatcgccagtcctcttctgacagagatcgcgccagtagtcggtatgccggtgacgctcagtttcaatagcgtcgattacgatctgtttattgcgtcatatacaccgggtcaggccgcagtccccggcgtcggtggtagtgctacaaaaattcaggccagcgcagccccgaccacctatgacttttcgaccagctccagcacgttcacgatcacgtggcaggggatcgcttacacggtgtcgctggtggcgaactatgtctcgatgtcgggactgctggcggccatcaccgaggggctcactggctccggcctggtcgcgcaggataacggcggcactgtactgataaccgaggcggccagtccgttcgcgggaggcgcaatcacatcatcctcgctgcctgctgccgttttcggtgatgccccggtttacacctccggcacggcatcaaccggcggcagcccggcggtaacggcaaatgtgacgcttgcctataacagcgccacgggaaccgcattttcgggcatgcctgaaggcgtgcaacggctttcacttgctcaccgcgggaatgagtaccgaattgtgtccgctgacggtacaacggcgacggtggcacgcctggttaacggtgccgttgatgagtcatggccggggttcaccgccaggacgatgatcgactacgaggcaaccggactcaacgacacactgagctggctgggtccgtaccttgtctgtcctgaaaatgaaactgtagatatgttcgaagtgaatttttcctttccgaacggcatctgcggttttgacagcaagggcaagaaacgactccggcatgttgagtgggaaattcagtaccggatttatggctccggctcagggtgggtcagtaaacagggcgagtacgcgctgaaaaatgttaacggtctgggctttactgagcgggtcacactcggttctccggggcttgtagaggttcgctgtcgacgtcgcaacgagcagggctccaataatgccagggattcgatgtactggcaggcactgtgcggacgactgctgactcgcccagcatcctatcccggtgtgtcgctgatggcggtgaccgtcgagacgggcggtaagctggctgcgcaatctgaccgccgcgtaaacgttgtggggacgcgtgcctatgaaaccggaacggccagaaccatttctggcgcgctgctccatgtcgggaactcgctggggctggagatggatgtcgataccattaacgcactggagtctgcgtactggacgccgcggggagagtattttgatttcgctaccggcgacagtatctcggcactggaaatgctgcaaaagatcgccaacgccgggaagtcacgttttctgctgagtgatggcctgtcgacagtaaaccgggaagggattaagccctggacaggtgtgatcaccccgcatgagatggtcgaagagctgcagagtggtttcactgcaccatctgatgatgattacgacggcgttgatgtgacttacgtcaacgggaccacctgggcggaagagaccgttaaatgccgcactcccgataaccctacaccggtgaaaatcgaggattacaaactcgacggggtactgagtcaggatcatgcctaccagattgggatgcggcgcctgatgaaatacctgcagcagcgcgtaacgttccagacgacgaccgaactggacgcactctgctacaacgttggcgatcgtattgtgctgaccgacgatataccggggaataatacgatttcctgtctggttgaggagatgacaacggctgggggtgtaacgaccttcaccgtcacggagccgctggactggtcttttgaaaaccctcgcgcgctggtccgttaccaggatggctcggcctccggtctgatggtggcgaccagagcaggggattatcaactttcggtcccgcatctgagtgagtttgatgacctgctgaaaatcaatttatcgtctgcaaccatcgagccgatacggctggtgttctgcggatcaacgcggcatgtctatgatgcgctggtggcagaaattgccccacagtctgacggcacctgtcaggtgaccgctaacgaatatcttgaatcgttctacgcctacgacgacgccacataccccggcgacgccgcttaa

SEQ ID NO: 180237 - DNA, 3807 bp, Klebsiella oxytoca
atggctgcagatctgaatccaccgctgggtacgacgacgcctgaaatattcatggataacgtcaagcgcgctgacgaactggttaacggtccggctgggacggttgacgatcgcggcggggaaccgctcgatacctggcgccagatgatggcgaaaaatgatgaggtcaggcagaacatcattccgttgagtaagcagtacatgaccctgacggcggcgcaggcggatattgcgaatatccctgtgaactccacaacctacgtgcgcagtcaggacggcagcgcgcttgctgatgagtacatgaatgtcgccggaacgctccagcctaccgggcgccggatgccatcgcaggcaacaatttatcctttccggctggcaaatatgttcgatgatggtggttttcgttcaggtcagccgccgaagatgaaaaacgccgggtcatcctatgtaacaggtaagcttgttgccattacggatacctacctgctcggaattggttgtaaaaatggagtccgtcttcctgatggtgatacctatgccagcatgctggcatcgccggtaaaaattcctgaggcgctgtatggtaagtatgtgctgatgtcggcgctggtattctctgctgatggttcttttggctcagattccacttgctcatatctggctgacgcgggcctgaataacatcaccagcccggcggttccttatgtcaatttccgtcgcgacatttctgcaaatatccgctgctacggcactctggcttttgttcctgccgacgggagtgccagatacctgcatattggtaaagcaggattaggggctccctcagattcgagatttattacgggtctgtgctatgtgttcagtgaatctgcgatgacactcgacagcattaaatgggacgcaccatacccggccagcgactttgcaatcaaccatcgcgaactggataagaagttcaattaccgcggcaatatcatcccgttcggcgatatggatggcggggcatttaacccgcttattcgttccggctcatccgtagttgccctcaccacgcagcaagcgctgctggaccgcgggtataaaaacgccctgcaggcacgcactggcgggactgaatttatccgtagcacaggaaatgcagacctgcgtggtaaaaccatctgtggctattatctggtttatgctgagaatgctgctgatattgataatcttgactacgcgaacatatttcagagcaatgatgggaatctcgcgcagatcacctacagcaacgatattggtaagcggaaggtaggcgataacttgtggttgctatgggctaagggtgtcgtcaatgctcacacaaatgcagtaactgaattatgtctcggctggtccaccgctccggttacagctaatcgattcgcaactgcattttatctgtcagttggatcagctgattttgatattcagccattgctctggaggctgactgagcgtggtgttgccaagcgcgccatcaacgaactggacacattgaaccaggtcagatttgcaggccaggacgttctccagtttaactttgagcgcaacctgctgacgtatggagacatggatgggggaagcctgaatccgccggttcgtggtgggtcggcagttgtatccctcactacgcagcaagcgctgctggaccgcggatataccaaagctatcaagtggcgcactgacgggtcagcgacggagtttgttggctataccagtgctacagacctgcgggggaaatacgttggagcctatttcctgatttatgcagaaaatcccgctgacgttgcgggtatcgcccgggcgcagatattccaggttaatggctcgactctggcggaaatcgcatataccactgagcgcgggattagaaatgttggcaaaaacctctacctagtctggcaggctgggcaggtcagcacctatacggcccctgtctataccctgtgggtaggctctggtgtggcacccgcaacctccgagcgctatgcgacggccttcttcctgatggcggcagatgccgcgataacgatggacccggtgctgcgacgcctgacagagcgcaatatggccaagctggtcaccgggcagtattcagtttcctccgctgagttcatcagtgaaaaaatcaccgtcaaaaacagcagtaaaactgtttttgcgggggacagttattccgaatcgatgcatgcactgaaagataagtcgtatgccgccgtgctgtcttcgttgacagactggcggatagagccatatggcgtatcagggaacacctatctgatgattaacgatcgcatcctgaataacagcaaaacgttcgggtgggggatcggagacatgggggccagccacgtggtgattatcagccagacgaatgatgcggccattcgcgcaacaaactggcggtactggcaggccagcatggagagagtcgtccgctctgtacgcgcgttaggagcaaaacccatcatttgcagtgagcatccacaaatcgagccgtatgcctatgcgcaaatgaaagcggttgcggatacgctgggcgcagagttctgggatatcacgactgaggcgcgaaattttgagtttttctcagaaccacgcatatgggccggttctcacccaggaacacgaaccaactcccagctctggtccccgatattaaaatgcattaatgcgatgccgcgcccgcgcagtggaattaaaatatttcggccacggccaggtgtcactatcagctcagtgagcgatctggtttatggaaatattctggagagggcgaagaagttcaaagagatcacattgggccataccgccattccggatgcgaaacaggcctacttcgatgacttgactgtattgaataacgatatcggcgcaaaccggacccgttacaactctgaatacggtcagctggcgcagggaaattctctgtcattcacaaactttgctctggtggaagctatcctcccgtcgtccggagagggcgtgtcatctgtgaatctggtgactaaaggggattcagtaacgatttatgcactgaactatctggttgcacctgaccagagcagcccggaagccacattcaacagcccggtcgcagcctggcagcaaatcagtggcccgctgacgggaagtgatgcggtgaaattcatgcagggggataaaatcagctttttactggtggcttccgggaatttcagcctgtcagacatccatgttgattacacagggcgagacagcaagcaggtcaataactggcaatcgcaggaaaaacgagcccgagggagtgagctgctttcgcagactcgctttggtgatacggaaattgcttcatggaatcgcattggaggtgtgccgcgttatgtcccggcgggtgggaatcctccggcaggatgcacaaaagttgtggcggttgatgatacaaattttgtgtctcaggactttatggcccccacagaacaggatgccgtcgagctggaaataaaaatctggtgtcgtcgatggctccccctgttcagttcaacgtccgatttttcaacctctccaataacaccagactctcaggattttgccgagttaaagcttcttatcgggcagcaggccgacggaaaagagacgctggcgatgcaatacagcctgcctgtggggttgggatggatggagcacaaggtaagatactgggctgtcggcgggaatgctgccgcaacaaaagcattgcggcttacacttttgggagatacaggaaagcagatcgagatagcgtgggtttcgatcagggaagtttaa

SEQ ID NO: 180238 - DNA, 990 bp, Klebsiella oxytoca
atgaataaaatcacagcggcaatcgtaacatatagcgaaagagcgcattttgttgaaactgttgtgggggagtgcatcaagcagggagtttgtgattttgtaataattgataatggttctagcaacgagaataactcaaaattaaattcaattaaaacaagatatagtgatgtgaaaatatcaataataagaaatgacacaaatgaaggatctgccccgggatttaagaaagctatcaagattgcctctgaaattaataaggaggacgggtgggtttttgttttggatgatgacaataaaccaagggataattgcgttaataatttattgtttgtatcgaataaaatgggcggcgaagaaagggtttattcatgttttagggatgatagagagcattatattaaattccttgaaactctggataatgattttatattgggacctaagaattcattcatggcattttcaatctctaactatataaaaaataaaataaaaaagaaatctaaaaatattaataaaaaaaatgggtttcataaagaagttgtgacaataccatgcgcaccgtacggtggtattttttttaaatcttctattattgataaaatcggccttccaaatgctgacttatacctatatttcgatgatactgaatacacacttggaatggcaagtaaaggggttgaaattttgttggtgacggattcaagagttcaggatatcgatgaatcatggacattaaacaaaaacaaacaaagatttcactcaccttacctggagggctctgaagtaaaaagtatttattctttcagaaatagagtttatcttgagagaaaatatcttgttacaaactctttaatgtatgttattaacattgtttcgttaatgataataataggtattaaagcaattgttagatgtaaaatgaagcgatattttgcattgtgcaaagcaattgttgatggttggaacatggcgagtttaaaataa

SEQ ID NO: 180239 - DNA, 327 bp, Klebsiella oxytoca
atgactgccagctattttccttcacctgctgccgactacgttgagtctgctctgactgtcacggctgcatgtgacatcagcgctaactctcaggttatagagacagaccgcggctatgtcgttctcgatttatcgctgaaggtgacgcaaggaagcgtccttcttatccgcctggctggcgaactgcagtttgcaaaattgatgggacgctcttttattacagccgaaggcgagagcattgaaggtgaggcgctgaaagacgtggaatcgctcggagtcgcaacccatgcgattaacgacttgagacagtatacaagtcctgtttga

SEQ ID NO: 180240 - DNA, 1212 bp, Klebsiella oxytoca
gtggctcttatgacgcatgatgctttttcccttcgcggcctcgcggcaggctgcgcgcttttacttctcgttgcgcctgcggtgcaggctgcggaacaactccccgatgcgccatccattgacgcgcgagcctggatcctgatggactatgccagcggcaaagtgctcagcgaaggcaatgccgacgaaaaactcgacccggcgagcctgaccaaaatcatgaccagctacgttgttggccaggcgttaaaggcgggtaagattaagtctactgatatggtgaccatcggacgcgatgcgtgggccaccggtaacccggcgctgcgcggctcttcggtgatgttcctcaagccggggatgcaggtgtcggtagaagatcttaacaagggcgtcatcattcagtccggcaacgacgccagcatcgcgatagccgactacgtggcgggcagccaggacgcgtttgtcagcctgatgaacggctatgcgcagaaaatgggcctgaccaacaccacctttatgaccgtgcacggtctggacgcgccgggccagttcagtaccgcccgcgatatggcgctgctcaccaaagcgatgatccatgacgtgccggaagagtatgcgatccataaagaaaaagagttcaccttcaacaaaatccgccagccgaaccgcaaccgcctgctgtggagcacgaacctcaacgctgacggggtgaaaaccgggaccaccgccggggcgggctacaatctggtttcttccgcgacgcaaaacgatatgcgcctgattgccgtcgtgctcggcaccaaaactgaccgtatccgttttaacgaatcagaaaaactgctgacctggggcttccgcttctatgaaaccgtgacgccgattaaacccgatgccaccttcattacccagcgcgtctggtttggcgatagcagtgaagcgaagctgggggcgggcgaggcgggttccatcacgctgccgaaaggccagctgaaaaacctcaaggccagctacaccctgaacgatacgcagctgaccgcgccgctgaccaaagggcaggttgtcggcaccatcgactttaaactgaatgataaaaccattgagcagcggccgctgattgtgatggaagcggtaaacgaaggcggtttctttagccggatgatcgatttcgtgctgatgaaactgcacggctggttcggcggttggttctcttaa

SEQ ID NO: 180241 - DNA, 759 bp, Klebsiella oxytoca
atggaaactcgtcgtgacgaacgcatcagccagcttattcaggcactcaagcgcagtgataaactccatctaaaagaagcggccaccctgcttggcgtgtcagagatgaccattcgtcgcgacctcaacggccacagcggcccggtcgtgttgctgggcggctatatcgttctggagccgcgcagcgcaacgcactatctgctgagcgatcagaaaacgcgccttgtggatgaaaaacgccgcgcagcccgccatgcggcaaagctgcttgagccccaccagatggccttttttgactgcgggaccaccacgccgtggatcatcgacgccatcgatagcgccctgccctttaccggcgtctgctattcgctcaatacctttctttccttacaggaaaagccccagtgccgcgcgattttgtgcggcggcgagttccacgccagcaacgccatttttaaaccgctaagcctgcaggatacgctgagccacctgtgcccggacatcgcgttttattccgccgcgggcgtcgattgcgagcagggcgcgacctgttttaacctggaagagctgccggtcaaacactgggcgatgaaaagcgctcgctaccacgtgctggttgtcgatcacagtaaattcggcaaagtccggccggcgcggatgggggatttatcgcagtttgacgtaatagccagcgacgtctgtccggatgacgatctgctcgcgctggcgaaggaaaaacaaatttcactgctttactaa

SEQ ID NO: 180242 - DNA, 594 bp, Klebsiella oxytoca
atgctggaaaatattaactactcgctgtttgcattcctcaatgccacccccgcgtcgccgtggtgggcaattgaaatcgcgacgtttatcgccaaagacctgattattactgtgccattattggtattcgccttatggctttgggggccaaaccagcgtcagctagtatttaaggtgatgatggcgctcgcgattagcctcacgctttcatggatattcggcgtgttttttccgcatgaacgtccgtttgccgccggtgtgggctataactttctgcatcattcacccaataactccttcccaagcaatcacggtactatctgctttaactttgcgctggcctttatgttctggcaccgcctgtggtcgggcacgctgcttatcgccgttgcctgcgcgattgcctggtcccgggtctatctcggcgttcactggccgatggacatgctgggcgggcttctcaccgcgatgattgcctgccttagcgcccaactgctgtggcaaagcggcggaaaaaccctctatcagcatctgcagcggctgtaccgcctgttcttttcgctgccgattcgcaaaggctgggtgcgcgaatag

SEQ ID NO: 180243 - DNA, 1131 bp, Klebsiella oxytoca
atgcattgcgcactttatgacgcgggccgctgccgctcctgccagtggctggaactgccggtatcccaacagctcgccgataaaatggccgatctgcgcgcgcttctcgccgatgcgcctgtcgctgaatggtgcgcaccggtttgcgggccggaaagcgggtttcgcaacaaagcgaaaatggtggtcagcggtagcgtggagcgcccattgctcgggatgctgcaccgtgatggcgccccggaagacctgaccgactgtccgctttatccgcaaagcttcgcgcccgtcttcgctgcgctcaagccgtttatcgcccgcgccgggctcacgccctataacgttgcccgcaggcgcggagagctgaagtacattctgctgaccgaaagccggctcgacggcggtatgatgctgcgctttgtcctgcgttcggagaccaagcttgcccagctgcgcgccgcgctgccggagcttcaggcgctgctgccgcagctgcaggtgattaccgccaatattcagccggtgcatatggccatcatggaaggagagcgggaaattttcctcaccgaccagcaggcgctggcggaaaatttcaacggcgtgccgctgtggatccgcccgcaaagcttctttcagaccaaccctgtggtagccagccgtctgtatgccaccgctcgtgactgggtgcgccagctgccggtcaaccacatgtgggacctcttctgcggggtgggcggctttggtctgcacagcgcaacgcctgagatgcgcctgaccgggattgaaattgccccggaggcgatcgcctgcgcgaagcagtcggcggcgcagctcgggctgaataatctgcattttcaggcgctcgattccacgcagtttgcgaccggcgaaggcgatattcccgatctggtgctggtgaatccgccgcgtcgcggtatcggcgacggcctgtgcgactatttaaaccgtatggcgccaggctttattatctactccagctgcaacgcccggacgatggcgaaagatatcgctcgtctggccggttatcgcattgagcgcgtccagctgttcgatatgttcccccataccgcccactatgaggtgctgaccctgctggttcgcgaagtataa

SEQ ID NO: 180244 - DNA, 2502 bp, Klebsiella oxytoca
atgatcagtcttattgagtatttatgtgatcgaattaaaagtagctatgagtttaataattactatcatggtctcttggaacagttagcttattcatttttcgagaagaacaggcatgattttgtttttacagcacaacacgagagacttcttcattttagtcagttcttatctaattccagcactgaaagcaatagagctatcgccttgaaagtaatttcaggaataaatgaattgttccctcataataactatacaaaggcgataacaaaatctattcttacaaattttggtttgttttcagcagtgacatcatttactgacccatctgtttccctctcaacttcatccacattgataggagacattcgtagggctactcaggctataccaaattcagagtattcattcactaataggcaatatgatatctacaatgagatcctaattaatcgtttctttagtttttcaggaccaacatcattgggtaaatcatttgttattaaaaattgtgccattgacttacttaataaatttgatgttattgtttttattctacccacaaaagctttgcttgaagaatacttggttgattttcgcgccatgttaaataaacgaggagttgataatgtaaatatcaccaaatccgtatcaggtgttaaaccgggtgagaagaatttaatgatctttacccaagagcgatataataacttcctttacgagtcggattatctcgatattaatgttgatgttcttttcatcgatgaagcacataagttagcagataaaagtagtaagagatctttaacgttatataaagtcatttcggcctcgctggagaaatattcgggcttgaaacttattttttcaagtccagtcatctctaaccctgatatatttttcaaatattttaatgttaatggtaaaagcctaagtatcgcggaaagtcctgttgctcaaagcttgttttttgctaatatttatagcaaagagtataagtattttgatacagtgacaaaaaaagttattgattttgatatatttggtggttttgaatctgatttcgatttaattttcaaaattggctctcaacatgattcaaatcttgtctatgtttcaagtaaatcacaatgtgtaaataaagcattggaattttcaagtttcctgatttcaaagggtatagttgctgaggaagatgaagagttacttaccgaatcgaaattaatttctgagtgcattcataaagatttttcattaccacatctattaaaatatggtatcgcgtatcatcacggaaacttgccagcatttattcggaaaagaatagagtctctttattcaagtaaaaagattaagtacatattttgtacctcgactttactggaaggtgtcaatttaccaactaagaatgtttttatttatccatttggtaaagcaagtaacagcaatggattttctcttgatttttggaaccttgctggcagagcaggtcgatataagagcgagttgacagggaatatcatttgtattgggaatgaaacaaattcttggggtgaatttgagagttctgtttctaataaagacataataaaaattgataacgagatttcgccactgcttcaatctcctcagcaaatactcaattatcttaatgaaagtgtaaaatctcacaaacctaaagtggttgaaatttcaacaatgattttatctgagattttaacatatctgaatgaaggtaagattggtgggttactaagggcattcgattcagaaattagacaagaaataatttcatctggacgtaaacatttagctaagaaaaaccttcttgacattgatatctccactttttctgaaaatcatcggtttaactcagatatacaatcctcagcatataagttagcttctaataaaaataacatcctaatgacatttcaaagagatgatgtgtttaaatatttacagaaaataaatgatgtttataaaatagtgaagtcaacagcaatctacccttttagtatcatgacctattcttggttaagaggtgaatccattaactcaattataaataacggtattaagtacagtaaaaaagtctgtgagcttgctccttatggttgggttgattttgacagtagcaatacataccacgtaaatttaaaaatattagaggtgataaattctattgagacagatatcacttttaaattggaaagttctttggctcattattatcagttatgtaaatctctacatggtgagaacgcatcaggtataaacttatctaaatttgttgattatggaacaattaatgctaaagaaatgtctttgcaggaatacggtttctcaagggctgctgcatccgaattattaaaaaaacacagagttttcattgagtttgatagcaatgacagtttaaagaaaatcaatgttaaagggctgataaattctgttgatagtggtgggctacttaaaaaagaaattgaatggcttaatatttaa

SEQ ID NO: 180245 - DNA, 1230 bp, Klebsiella oxytoca
atggcaaaaatcgctaagaagctcactgacactgaaatcaaaagcaccaaacctgccgagaaagaggttaacctttttgacggtgatggtttgatcctacgaatcgcccccctctcgaaaggagggaagaaaaattggtatttcagatatgcagtgcctgtgaccaaaaagcgaactaagatgagcttaggaacctatcctcaccttacacttgcgaaagcacgagccttacgagatgaaaatctctccttgctggcaaatggtgttgatccccaagtccataacaacaataaggcgaaggcattaaagagtgctactgaacacactcttcaagccgtagcaaggaaatggttggacgagaaggtaaagacctcaggtatctcacaagaccatgcagaagacatctggcgaagcctggagagaaatatctttcccggattgggtaatgttcctatcaatgagatccggcctaaactcttaaagcaacatcttgatccaattgagcaacgaggagtcctcgaaactttacggcgaatcatttcccgattaaatgaaattttccgttatgcagcaactgaggaacttatcgaattcaatccggctgacaaccttgggcaacggttcagtaagccgaagaaacagaacatgccagccctgcccccaaccgaactcccccgcttccttacagtgttaaacaacgcatcagtccgtatggagacacgattgttgattgaatggcaattgctaacttgggttcgtcctggtgaggctgttcgcacaagatgggccgatatagatactgacaactcaatgtggaacatcccagcggagtttatgaaaatgaagaagcctcacaaagttccactaagcaaagaagctttgcgagtattggattcaatgaaagccatcagtgggcacagagattgggttttccccagcatcaaatctccgctcaatcacatgcatgaacaaacagctaatgccgctattattcgaatgggctttggcggtgagcttgtagcccatggaatgagatccattgcacgaacggccgcagaggaatctggtaagttcaggacagatgttttagaagcggcccttgcccactcgaagaaagatgaaataattgcagcatataatcgtgcagaatacttaaaagagagagagatactaatgcaatggtggagtgattatgtcatgactcaaaaatatcaaacactcgctgcatga

SEQ ID NO: 180246 - DNA, 147 bp, Klebsiella oxytoca
atggcggccagggtgtcgaacaaagtgggtctggagtcggacgcgcagaactttctgctgatgcacgcgatgggtccgaacgtggcgggggtgattggctcggcgattgccgccggggtgatgctcaagtacgtgctggcgatgtaa

SEQ ID NO: 180247 - DNA, 210 bp, Klebsiella oxytoca
atgacggatggctggccgctgtatgaatcccgcctgaagggaaagctgcgcgttatcagcaagcgttacactcagcgcattgagcgacataacctgaatctgagacaacatctggcaaggctgggacggaagtcactgtcgttctcaaaatcggtggagctgcatgacaaagtcatcgggcattatctgaacataaaacactatcagtaa

SEQ ID NO: 180248 - DNA, 1554 bp, Klebsiella oxytoca
atgcacgaatatttaatgtttgctctggcactctctcctttgctgctgatggtatttttaatactgaaattaaaaatgcccatccattattccgtactgatctctttggtattcaccgctgcactatcggcaatattctgggaaatgcccatacaaaatctgaaagccgcgatagggtatggcgcactgaagggactatggccgatcgtgattgtgatcctcggcgctattttcagttataacgtcatgcaggcgaccaaagcgctggatattttgcgcgatattctcgccagaattagcgaagataagcgtattcaggtgctgctgatttcatggtgttttggtggatttcttgaagccgcagcgggctatggcacggcggtcgctattccgatcggcattctcattgcgctgggattcaacccgttgaaggcggcgattgcctctctcgtggcaaatacagttcctaccgcattcggcgcggtcgggatcccggtttctattctggctgaacaggttaatctgccggtttataccttaggcggaaccattattttgcagctcgcgttgtttaatatcctgctgccgtttgtgattgtctgcattattggcggtggcctgaaagccattcgcggcgtatttctgatcacgttgatttgcggcatttccacgctgattccgcaatattttgtcgccatccatcttggcgcggaattacccgcttttgccggtagcctggtcagcctgtttgccgtggcgatggtcagtcgcctgcgcaaagggaaaaccgatccagagtggcgcattgaggtcagccatacccgcgaaaccacgccgcgctcggcaaaagtgttgttccgcgtgggctctatctatctgtttatttttgtgtttatcctgctgtgttcgccgctgttcccgacaataaaaggcgcggcgtcccaactggcttcggtgctgcatttcacgttggctgacggcaaaacgatggcactgaaagttgaatgggtgaccacaccagggatgctgattatctttgcgaccattatcggcggttttattcagggagcgtccgcacgcgggatgctggaagtatttatcaaaacgattttccagcttaaaaactctatcgtggcaattatggcgatcgtcgcgctggccacggtgatggatctcagcgggattatctccacactggcgcagtcgattgtcgatctgaccggcagctcgtacgtcttcctcgccccagtgattggcgcgctgggcacgttcgttaccggcagcgataccaactcgaacattctgtttggcaagctgcaaaccatagctgccagcaagttacatatcgatcccaactggctggcggcggccaatacctctggcgctacggggggcaaaatgatttcgccgcaaagcatcgccatcgcggtttctgccaccaaaatggacggtcaggccaatcagatcatgtctggcaccatgaaatactgctgtgcctacattgtgatccttggcctgaaagtcggtctcttttattactggtttatggcgtaa

SEQ ID NO: 180249 - DNA, 1698 bp, Klebsiella oxytoca
atgaaacatactgataataagacctttttgacgactcttacccaattggttggccctgctcatatcctcaccgaaccgtcaaaaactgcgcgttaccgtaagggattccgctcgggtcagggtgatgctctggcggtggttatccccggctctttgcttgaactctggaaagtcctcagcgcctgcgttgaggctgataaaataatcctgatgcaggcgtcgaacacaggcctgaccgagggttcgacgccaaatggtaatgactacgaccgcgagatcgtcattatcagcacgctacggctggacagtctgcatgtgctggatgagggcaagcaggtgctggcttatccgggcaccacgctgtactcgctggaaagggcgctgaagccgtttggccgtgagccgcattcggtgatcggctcttcgtgcatcggcgcgtcggttatcggcggtatctgtaataactcgggcggttctctggtccagcgaggcccggcttacaccgagatgtcgctgtttgcccgcattgatgaacagggacgcttgcagctggtcaatcaccttggcattgagctaggtcagacgccagagcaaatccttgcccggctggataacaatgtgattgaagccgcgctcgtcaaccatgacgggcgtcacgcgcacgatcacgactatgttagccgcgtgcgggacatcaatgccgacacgccagcacgttacaacgctgacccggatcgcctgtttgaatcctctggctgcgcgggcaagttagcggtgtttgccgtacgtctggatacctttgaagccgagaagaaccagcaggtcttttatatcggtaccaatcagactgatgtcctgactgagattcgccgccacatcctggcgaattttacaaacctgccggttgctggggagtatatgcaccgcgatatctatgatattgcagagaaatacagcaaagataccttcctgatgatcgacaaacttggcacggacaaaatgccgttcttcttcaacctgaaggggcgtaccgaggccatacttgagaaggtgaagatctttcgcccgcactttactgaccgcgcgatgcaggcttttagccatctgttcccgagccatctcccggcgcggatgaagacctggcgcgataactatgaacaccatctgatgttgaaaatgtccggcgagggtgtggccgaagcccaggcatggttaacggactattttaaatcggccgagggcgcgttctttacctgtaccgcggaagagggcagtaaggcgtttctgcatcgttttgccgccgcgggtgctgccattcgttatcaggccgttcattctgacgaggttgaggatattctcgcgctggatattgcattacgccgcaatgataccgaatggtatgagcatttaccggcggaaattgacagtcagttggtgcataaactctattacggccattttatgtgccatgtattccatcaggattatatcgttaaaaaaggcgtagatgcccacgcgttaaaagaacagatgctggaattactgcgccaacgcggagcgcaatatccggcggaacacaatgtcggccatctgtataaagcgccggaaaatttggcacgtttttatcaggaaaatgatccgaccaacactatgaacccaggtattggtaaaaccagcaaacataaaaactgggcatga

SEQ ID NO: 180250 - DNA, 720 bp, Klebsiella oxytoca
gtgaatgtaaatttctttgttacctgtattggtgacgcactgaaatcacggatggcacgagactccgtattgctgctggaaaaactgggttgtcgcgttaatttccccgagaagcaagggtgttgcggtcagccagccatcaacagcggttatatcaaagaggcgatccccgggatgaaaaacctgatcgccgcactggaagacaacgacgatccgattatctccccggcgggctcctgtacctacgcggttaaaagctacccgacgtatctggccgatgaaccggaatgggcgctacgtgctgagaaagtttccgcgcgtatgcaggatctcacctcctttatcgtcaacaaactgggcgtggtggacgttggcgccagcctgcaggggcgcgctgtgtatcatccttcctgtagcctgacccgcaaactgggggtgaaggaagagccgctcacgctgctgaaaaacgtgcgcggactggagctgctgacgtttgccgatcaggacacctgctgcggctttggcggaacgttctcggtcaagatggccgaaatatccggtgagatggtgaaagagaaagtcttacatctgatggatgcaaagccggaatatttgattggcgcagacgtcagctgcctgctgaacattggcggccgactgcaacgggaaggccagccggttaaagtgatgcatattgctgaagtgctgatgagccgctga

SEQ ID NO: 180251 - DNA, 1428 bp, Klebsiella oxytoca
atgtcgataaaaaccagcgatgtagaatttaaactgcgcattcgtcagcagatagaagatccgatcatgcgcaaagccgtggctaatgcgcaggagcgtatcggcgcaaatcggcaaaaaatggtcgatgagttaggccactgggaagactggcgcgatcgtgccagccagatccgcgatcacgttctgagcaacctcgacgcttacctgtatcaactctccgagaaagtgacggaaaacggcgggcacgtctatttcgccaaaaccaaagaagatgccactcgctacattttgcaggttgcgcaaagtaaaaatgcgcagaaggtggtgaagtccaagtcgatggtgaccgaagagatcggcgtcaaccatgtgctgcaggatgccggaatccaggtgatcgaaaccgatctcggggaatatatcctgcaactggatcaggatccgccttcgcacgtcgtggtcccggctattcataaagatcgctatcagatccaccgcgtgctgaacgaacgtctggggtatgacggcccggaaaccccggaagccatgaccttgttcattcgtcagaagatccgtgaggatttcctcagtgccgaaatcggtattaccggctgtaactttgccgtggcggaaaccggctcggtgtgtctggtaaccaacgaaggcaacgcgcgcatgtgcaccacgctgccgaaaacgcacattgcggtgatgggcatggagcgtatcgcgccgacctttgccgaggtggatgtgctgatcaccatgctggcgcgcagcgccgtgggtgcacgtctgacgggctacaacacctggctgaccggcccgcgcgaggcggataacgttgacggaccggaagagttccatctggtgattgtcgataacggtcgctcgcaggtgctgggctcagagtttcgcgatgtgctgcgctgcatccgctgcggagcctgtatgaacacctgtccggcgtaccgccacatcggcggacacggctatggctctatctatcctggacctatcggcgcggtgatttctccgctgctcggcggctataaagattttaaggatctgccgtacgcctgttctttatgcacggcctgtgacagcgtctgcccggtgcgcattccgttgtcaaaactgatcctgcgtcatcgccgggtgatggccgaggagggcattacgccgaaagccgagcgacgggcgatcaggatgttcgcttatgccaatagccatccggggctgtggaaagtcgggatgatggcgggcgcgcatgcggcgagctggtttatcaatggcggcaaaaccccgctcaaggttggcgcgattggtgactggatggaggcgcgcgatctgcctgatgctgacggcgagagcttccgcagctggtttaagaaacatcaggcgcaggagaaaaagaatggataa

SEQ ID NO: 180252 - DNA, 696 bp, Klebsiella oxytoca; identical to SEQ ID NO: 26682

SEQ ID NO: 180253 - DNA, 438 bp, Klebsiella oxytoca
atgggccgttttgatgaatggttagacgacacaaggccggtaacagtcgcaccggttaccgacatcggcgataccatcggcatgctgatgtcgcacggtaatatttctccctacatcatggcgtggttgataaccgtgctgattcgtctggcaacgggtcagggcgtggtctccgccatgacggcggcggggattattagcgcagcgatcctcgccccggcaaccggtcaactggtcggcgtcgacccggcgttgctggtactggcaacggcggcgggctccaacaccctgacccatattaacgatgcttcattctggctgttcaaaggctactttgacctgtcggtgaaggatacgctgaaaacctggggtctgctggagctggtgaactccgtggttggcctgattatcgtgttgatcatcagcatgattgcataa

SEQ ID NO: 180254 - DNA, 312 bp, Klebsiella oxytoca; identical to SEQ ID NO: 146615

SEQ ID NO: 180255 - DNA, 420 bp, Klebsiella oxytoca; identical to SEQ ID NO: 26685

SEQ ID NO: 180256 - DNA, 1203 bp, Klebsiella oxytoca
gtggctgattttccccgcgccagtaacgggcgataccagacagaaggcctaagcgcgcgcgagttcgaacgcctattcaaccagattgagaaggataagcgaagcaagcgccgcgctgctcgccgcactctgacgccgttttcactgaagaacaaaacagccgaagatatcatctcgctgggcaagaagaaaaaaggcggtacgttcttcaccgtcgaagatctaaaggcatttgaaggtcgccgcaaggatattcgacagacgttctattcaggcatagccgggatcacctatgcccagctcatagccggaagtgaggcgatcgacgttaaacgtgctaacaacgccgtagacgacggttccggcattaagcgcgccgtgccttcatcattgaaacataacgtcgtcacagtcagcgtggaggcttcagatcgctccgaagaccagcatcaccgcgtaaaagtgcgctttgaggaatgggattcactgattgatgagctgggggatgagactagcgcggtaaaagtgacgaaaaagctgtgtgccggtcgcgtatccttcgattgtgattgtggtcgtcatcaatactggtatcgctacatcgcgaccgccggtaactttgccctggcaccgccaaaagaatatgccttccccaaaatccgtaaccctaatctcaaagggatcgcctgtaagcacgtgatccacgcaatgacccgactccagtcggcaagctggcaattgcggatcggtcaggccatgctgcaggccgctaaacgtgtagggttcggtgacgacaaacgacgtactactaagcatttcactgaggaagaccggaaaagattcaacaagaaccgtaactcacagactaaccagggggcgatgcgtcaggagtgggataaataccagcgccgccagaaagcgctgggtaatcagattgcgcgagacagtacaaagctacgcaccctcagcgacaaactgttaaaagcccggaaaatgacgcaaaaacaacgggcaaaggcagaagaaagtcagcaaaagcttaaagccgagcaggataaaaacaaggtgctgcagcagcagctcgccgaccgtttcaaggtggaacgccaggcgtttattgatgcgatggtaatgactggtgtatcacgtcaggatgccgagaaacgcttcctggactacgtgaaaaacaaaggcaggggttaa

SEQ ID NO: 180257 - DNA, 330 bp, Klebsiella oxytoca; identical to SEQ ID NO: 26687

SEQ ID NO: 180258 - DNA, 660 bp, Klebsiella oxytoca; identical to SEQ ID NO: 26688

SEQ ID NO: 180259 - DNA, 588 bp, Klebsiella oxytoca
atgcacaagcaagttcaccctaaatccctttactggggaagtactgtcattctattaagcaccattgataataccaattcaactaacattactcctatttcatcaagctggtctctctcgagcaatattgtaattggtctcagtctaagctcgaaggcaattgaaaacatcgagtattgtccagaaatggtattgaacattgcatctgatgatctttctaaaaaaattgagtctattgcaaaatatacaggaaggaatccagttccacctgagaaattaaagtcagaatttaattattgcaacgataaattttctctcggagaatttacatcacaagtgtcacatacggtacgaccactccgcatacaggaatgtccactgcaagtggaatgcctagtcgaaaatataatcaagcgagacagccatgctattgtggagttgcgagtaaatcatgttcatgctgatgtatccctactcaaagataatgacatcattgatgccgacttgtggagaccattaatttataattttagaagttatcatgggattaccgaaagcattggtagaaactttaaatttgataattag

SEQ ID NO: 180260 - DNA, 411 bp, Klebsiella oxytoca
gtgctcaacgaaaccgtactgccgttctttgaagagcatgaggccagggtgcataccatcttgtcggacaatggtcgggagttctgtggtcgtccggaccaccacccctatgagctgtttttgcagctagaagggatagagcaccgaaccacgcaagtacgacggtcgcagagcaacggctttattgaacggctgcaccgcacgctgctggatgaacacttccgtatcaagggaagaacgacttggtatgaaacggtggaacagatgcagacagacctggaaagctactttgaccactacaacaccaagcgggcacatcagggtcgcatgatggcgggacagactccctactgcatgtttaaaaagggtctgaaattgatccccaaagaacagcgcgttaaagtcgcgtaa

SEQ ID NO: 180261 - DNA, 1083 bp, Klebsiella oxytoca
atggcgaagactaaatcagttcgcccaccgtttgtcgtgggcggcgttgatacgcataaggacctgcacgttgctgcagtagttgatgaaaacaaccgcgttttaggcagtgattttttcgcgacaacccggcagggatatcggcagatgctgacatggatggcatcttttggaacggttgcccgcataggagttgaatgtaccggttcttacggcgctggcttgctacgccacctgcaaaatgccggcatcaccgtgctggaagtgactgctccggataaaatggaacgccgcaggcgtggaaaaagtgacacaattgatgctgaaagtgccgcccacgcagctttctcattgatacgcactgtcacacctaaaacacgaagcgggatgattgaagcactccgcgttctgaaagtctgccgaaaaacagccgttgcagcacgtcgtattgcgctgcaaatgatccagatgaatatcgtttcatctccggatgaactacgtgatcaattacgtaatctgacccggatgcagctgattcgaaccctggccgcatggcggccggatgtgacggcgtatcgtaatgttcaggatgcttatcgtattgccctgaaatcgctggctcgacgatatcttgaacttcacgatgaaatagcagacctggatatcatgatcgcgtcaatcgttgatgagctggcacctgagctgatcaagcgtaacgctatcggctatgaatccgcttctcagctgctcatcactgcgggtgataaccctcaacggctgcagtctgagcctggcttcgcggccttatgcggagtcagtcccgttcccgtctcatcaggaaaaacaaatcgccacagactgaaccgtggtggagatcgcgcagcaaatagcgccctgcatatcatcgctataggccggttacgtacagatacgaaaacgcaggagtatgtcgcgaaaagagtcgcggaagggcactcaaaaatggaagcgctgcgctgcctgagacgttatatcgcacgcgaggtcttcacactgcttcgcaatcaaaatcggcagattaacagcactcaaataacgacttga

SEQ ID NO: 180262 - DNA, 321 bp, Klebsiella oxytoca
gtgtcgcccaacaggctccagcgacagttcaatccggatgctccggatgagcgttgggtaaccgacataacctatatcaggacccacgaaggctggctgtatcttgccgtggttgttgatctgttctcacgcaaaattatcggctggtccatgcaatcccggatgacaaaggacattgtcctgaacgcactgctgatggctgtatggcagcgtaatccccaaaaacaggtgctggttcattcggatagtaagaatgtctgtgtcagttctcatcatcatgcttgctgttttgttcgcgcggtgagatcactgatgcagtga

SEQ ID NO: 180263 - DNA, 240 bp, Klebsiella oxytoca
atgaaccgtgaggaggcgagtctgttcttccggctgctgaaccgccggtatgaaaaagcgagcatcatcctgacgtcaaacaaagggttcgccgactggggtgaaatgttcggtgataacgtgctggcgacggcgatcctggatcgtcttctgcatcactcaacgacgctgaacataatatcggttgaaagagaaacgcaaagccggagtgctggcaaaaagcgcaacgccaatcagtga

SEQ ID NO: 180264 - DNA, 1743 bp, Klebsiella oxytoca
atgaaattgtactcttatcaacgctggtcaagtgcagtacaggcagatgggacaagtaaggctcgacagtcacacgcagcagagcagtacgcaagggataacaacctagaaatagtagaaatcgtagactctgggatatctggcttcaggtcgttgaactcgaagaatggagcactttcgcagttcctagatgctgtggatgcggggttgataataaaaaactcatacctgtatgttgaatctctagaccgtattacacgtgatgagattgatattgcgttagagttgttcatgggaatactacggcgtggtattactatagtaactggtatggataataagatttatactcatgccgggattaagggtaatccaattgatttactaactagtattctattattcacgcgtgcacatgaagagagtaagacgaagcaacagcgtactaatgggaatgcacttgcattaattagaagatttcaagagggtttaccaactacaataaaatctattggttctcatccttggtggattgattcaagtacagataagtttgaagcagttcgtaaacatcccattctatggaaatgtgcttacgacgcagttaatctatttctagatggtactagtgtctttaaagttactaagtatttaaatgagacatacccaaatgcatataagggtaaagcatgggcaatcgcaaacgtgcgtaaactacgtttcaataaggctgtatatggtacaagggaaataacagttgacagtaaagtttatgtactagaacattactacccagctttaattagtgaaggtcaattcttacgccttgagaagattcgagagactacaaagtatattggtaaggtaggtgaacatactaataatattaatttactctctggtatgaaaatatttcgatgcggtcattgtggtggtactatgatggcaatgcgtcataatgataccatccgttacctttgtgaaaaggggagaggttataaccatgattgcaagacgtggtcacttcccggtattctcgtagaacatacattaatgctgattactactattgcctatatcaacattcaaagaaaaggtggaattactcgcgaagactatagccaccatatttcaagcacagaagagttgattgcagatattggtactaaaatctctcgcatgactaagttagtctctggtggtcttggagatatagatgaagtaattaatgagatgggagaactcgacaaagtaagaaaacagtatgtaatggaattagaagtactacaacgtaaacaacttctatctcaagataatagctttgaacagttaatgatggacttctttacttatgcacagtatggagtactacaagatccagtacatgagtatagaaataaactgcgtgatattgtctatagctcaattggagaggtaaaggcatggaaagttgatagacgtttaatgatctcatttcagatcaaaggggatgatgagtactatacattctctgctggtgacgaaccgtataattatatattctattatggctctccggtgcagctaggagaggacttaacggtacaggtagcatacgagttacccgcagatattaaacgccgtatacgcgattacagcaatgtatacgatgcctctatgaagatattaggaactgccaacgccctattatcagtggtaaactatcccgacttagacgggagtttattttggcctagaaagtaa

SEQ ID NO: 180265 - DNA, 363 bp, Klebsiella oxytoca
atgactaaaacgccagcagcattagcaaccctgatcgccaccattgacatcaacgtatctaggaacgctcatatctctcacgagtatggtaataataccgattgcctattagaactaatgaatacatttccaaatggtgaagtatatgaaagtaatgtgatgtgggatgaagaaggttttgaatacactattcccaatacagggtactcaattggtgtgaatcgtcggtggatggggattattctaaatggtaaaactatatgcttagtatcacccaagactaaaaactacaatcatgttgcgatgcgggatttaaccccaattgagcggacgtttgaagaaattctagtaaaacacttctaa

SEQ ID NO: 180266 - DNA, 1941 bp, Klebsiella oxytoca
atgaaaacatataaagagttcaatctcaaacaaaacgagtacatcacagatgtggctgatgaaatggatctacaagatgggataaatcttgtaatcgcagatgtaggtacaggtaaaagttactacttctcaaaacaaactaatacggcctttgcggctccactagttagtattgttagttcaattgatggtactaatgtttctacttggaactccctagttagccgttttcattctaccagtgataaaagcgtattcaagaatgaaacgttagttgtagatgaatgccacggcttattcactgactacagttataaggcaagtgtaattcgtgatttggttgcgatcttccccttcttcaaatcagtagtgctaatgtccggtactatcaaaccggagtatatcaacactgtacagattgaccgtgtttatcgcgtccgtaagccctctcaggcaacgaaagaggtaaaccgctataactactcaaaaaatggtaaagccctcttagaaacacttatattgcgtaataaaggcactggtaaaaaggcaatcgccctagtgaacgatatcaagctatgtaagcgtatcgcagaggtatacggtagtaaggcattggtagtatctagtgaagtgaaagaaacagaagaggtacaagcattctttagtgctaaacgcatggatgactatgaactagtcatcggtacagattcaatccgtgaaggtctaagcattgaagataaactagataaagtgaatatctacattttcggtcacactaacccagatggtattgaacagttcacaaaccgctttcgtaatgtcagtaagactaaaacactacactatataacgcctgtacgcgattctaacgctatcaaagatttcgacattgaaatgtatatggaagatgccgaaagctttagagaggccgttacagtggcatatagagggtttaaggatgattcctttagggaacattttagaacccaatacaaccaagatatcaaaggtagtcatgttcgatacaataaagatttcgatggtttcaccgtagataaactaagtattgatgcgacatacgcagatcaccgttctaaacagtgtgagtatgatccggtactatggcaaatgtgtatgaatgaatatgattttgtatatcgtggtgctgctgtactggaaggtaatgaagcacaggcagtagaaataaatgaaagtataaaggcaatcaaaaatattcaaaaagcagaacgtgaagagatcctatcctcactaattgaatcatatcaaactggtaaatttgagtactcaggtaaacatgaagagtatgacgcactatgtgagagtatcggtaaactacgtaaggtaggattgaaagattcacagattgagttagtagtaaatggtgttattgctgataaaactttcattagtagagtatgggcagattacaactatgtagatgagcattcaaatattcgtaatatgatccttgggtacattgctaaagaatgtccaaacgatattctatctaaaatagatttacatgtactatgttcaatgatcgtgaagaaagtgaagaaggaattattcagtgacgataacaagatcatgaagaaaaacaaagaatggtctaaatggttagaatatcaagggggtgaaatagcagtgaaagataagtgtcaaatcaaagtaatcaatcgatacattacactagatactccagtacgtaagcgtactagtcagtgtaccgatagaatgtataaggcactactagagatgaaaaaagaagatcgttattatgagtacccaatcaagtacactaacctaactggttttagtattgataaggtagttattgatgaagagaaactaactaaggcgatctctgatgcggtagggctaaagagaaatatgatggccttacgcggcgttttcgcctaa

SEQ ID NO: 180267 - DNA, 156 bp, Klebsiella oxytoca
atgacaatcaaagaactaattgaaaagatcaaaaacaccgaagtaaccgaagatctcaccccgtatgaaatcctatgtagtgtactacgtgccacggatgatacggaaaagcgaatggcgaacgtaagcagttacccacgcccactaacaaaataa

SEQ ID NO: 180268 - DNA, 366 bp, Klebsiella oxytoca
atgaaagatgaatatctatatatggtacaagccaccagcaagtacaacccagaatacactactataaaagtaggatacacaactaaccccattaagagactaaaacaactgaaatcaagaaacaaacactttgaatattctgaaatggcactattcaaaaaccgagtaaaacaatacaactataagtacgatgaagaacgcctacactcacataacacatatcaccgtgtacgtgttggtaaagacactattcccgatggttacacagaacattatgaatattactatatgccagatctctataaccaactattgggtatgggctactactggataaacgaaccaatcattgaagaggccgcataa

SEQ ID NO: 180269 - DNA, 267 bp, Klebsiella oxytoca
atgaaaaaaaccgctaagtggtcaacactacgtaagcacatccaccagcaaggaggccaatcaaacggcctctataacgcccccaaacgctccccattgagcgacacacccacagtgggagaaactaaggaagagatgattaaagcctacatagagcgatacaggaaggataaagggcgtatgccgtcatatacacatatgaataatgaatttaatatgagagcaactaaggaatattataaggctatatataaaagatctaattga

SEQ ID NO: 180270 - DNA, 237 bp, Klebsiella oxytoca
atgattacactacaacaatatgataatggttactatgcactatacgtagatgataaggtaaggattgaaacaccatatctatttgaaacacttgatgagattgaacttatcattgagactcgtgctttcaaaaagcgtgagattgaatggcatatcgaatctattcctctagaagaacagtactatcatgaaattgatagtttacgaaatgtgatattaacggctttatccacttga

SEQ ID NO: 180271 - DNA, 3315 bp, Klebsiella oxytoca
atgagtgatatttttacagggaatagttttaagctatattataatacagacttaggtaacttaattccagatagctacaaaaatgttcaagtcgcagcactcgcagccatgccaagtgttacatttaattcagaaacaaataaaattgaagtatatgatagtgaccatacaacactaattgttggtggtaaaactgttggtgatcttgagatcacagtaaattatatacccgataatgaaactcacatgtttttggatgcggcagcaaaaaatcaaacagaatttcaattaattattgagtaccaaacagatgaagatggaatgatggactattccattttaaatggtgcaattagttcatattcacttactggtgataaagacgcagtagtacaaaaaacatatgtattctccacaatgaatgtaatggtacgttcagcacgtgcagttgcatcaatcccacttgttgaaggttcatatggtgttggctcaaatggtgtatctgtacctcaatatcaaccagaaacaccagaaggtaatagtttcattaaaatcccatctggaagtgtaaacagtccaactagtgcagatgtaatgggtattggtctaattgatgaaggtacttatagttcaattgcattaactaaatctggtgcacttgcaatttatgcaaagaatggttcaactgcgtggactcgtattgtaacttccccaatggcagatgcaaagtacttaccatttagtggtggtacaattagtggtaatctaaacattactggaattctatcactaacaaatgcactaactgttgcaaatggtggtacaggtgcgaagaatattacagatgcccgtactaatctatcagtttattcaaaagctgaaacagatgaaaaatatgtacctaaaacaacaacagtaaatgggcatacactatcatcaaatgtaactgtaacaaaaggtgatgttggacttggtaatgtaactaatgatgcacaggttaaaaaagctggcgatacaatgactggtgctttaattgtcgatagtactttaactgttaatcaactatcaacattaagtggtggttatgttggtcaacaagatgcaattgatattcaaaaccaaacaattagtttaaatagtctcaccattccatacggttcagcaggtaataccgctctttatggatgtccatcaactggtggtggtgcaaatatcactgataaaccatctggagtaactggtgattttctactttatgttgaactagtacgtgctgctaatgcaaatgattggacaaatagacaaatcattgtaactcatgttaataaaaaatcatacactcgttggttaactcatacaagtacaactgatacatggacagattggagtgaacagttaaatggcatagtacctataactaatggtggtacaggagcaactacagcaacatcagcaagaaataaccttggattgggttcatcgagcacagtgtatttcggttcacttgaactatcagctgcaactccatttattgattttcactttaataatagtacagcagattatacaactcgattgattgaacaagcttccggtactttatctctaattggtaatagtgccattagtggtaacctatcagttcagggtaatgttaatctaactaataacctaaccatcgcaaatggtggtacaggtgcaggaacagcagcaggggcaagaactaaccttgaagtctattcaaaagctgaagttgatggttccattgctcgtttaacgctaccgggaattagtaatggtaatgcaaactactataaagttgcaacactgaaagattcaggtgcatcatctggctatgttgaatttactgtatatggttcaggtggttatggttctcgtgtaactaatgttgattatataactttaagtgctcgaaatttatcattagtaacatcaacaaacgttgcaaactatataacacatacacgtttaacttattcaactgcatctgctctaagaatgggtatggttgttaatacagataaatcagttgatgtttatataattgctccaaatggatattggggtggtacaaatgcaataattaatgcaattagtggtggtggtacatatattcttggtgatattagtactaaaacatcaactcaagcatggactacaaccgcaccaaccgatattgtaacaataccatatagcgaattactaactaataatactactgggtcatcagtaacctataatgttggtacttctggtaatactattccacttcttgatggcagtaatgtatggactaatagccaaactattggtactagtggtgagaataaactaacaattgttaatagtactttacgagataatggtaatggtggtttcataatcagttccaattctggtacaacatcaggtaacgttggtttatatctacgtccagttggagatacaatttcaaccatacaacttcttggtaataacaatgggtggactgtatctggaaatactacatttaataatattgtatcatttacaaacgcactctcaattacatcaggtggaacaggggcaaataatgcaagtgctggttggattaatctacttaatggacggacagcagttactgcacgtaatgatcttggtgttaatacattctttagtaatggaagattaaacacaccaggaaccggtgtttatacgtatgatgacactcgttttggatgggatgagaaatacgcaactgtattacaattaaataatcaaacaaatacaagtgatgcagtcggcccaaatatttggcagagttactttgcattttgtactagtggtaacttgatttatgcatcaaacattaatggtacttataagtcagttcgcatgtggtcatcaaataatacaacagttgatggtagtggatttattaaacaagcatcaccagtaattcgtgtagttagtgatgttgatgtcatgactagtaactttcttgaaggtttcacattatcaggttatggtgctgttaacagtgaagctgaaagtgtagtaattgaaaaaatgggtgttggtgtttataaaattagcggttctaaaggtctgcataaagacggatggcaaattgaagtccccaaggatgtaaatggtaatagattatgttttgttgaaatcgaaactaatcaagataatatactaactctaaatgtgtttaaaccgaaacttgatcttgaaactggaggtattatagcaggggctgtaatggatattccggctggtaggtgggttgatatacgtttagaaatgtaa

SEQ ID NO: 180272 - DNA, 141 bp, Klebsiella oxytoca
atgatgcaactcatacaactggtgcatttgttgtgtataacgcattcatcgcaactgcatcagttagtggcgatcaaaacgaaacagttaagaaagcatttaacattgaagttgacggtggtcccgttgattctggtctaa

SEQ ID NO: 180273 - DNA, 300 bp, Klebsiella oxytoca
atgaatttagaaagtctaaaacaaaaactaaaaccacaacttgaaaaatttgatctagttggtgaagtcgtatatatccatcgtccatctgctgtagatttacttaagtgtgacacaatggcaagtactttagtatattgcgtaaaagatgagaatggtgatccaattttctctgaaactgatgttgaagggcgtattaatgttggtgcaattgatttcatgcatcagaaagtactatttgaagcaattcaaaaactaactcaaagtgcagatgtagttgatgagatagaaaaaaagtaa

SEQ ID NO: 180274 - DNA, 372 bp, Klebsiella oxytoca
atgattaataagcgggggttaagtccctctgaatttgatgaactcgatccagacctttttaatgcattaatggtttatgacacatatattgaaccttccggtactaagattgatatgttatttcactccaatttatgccattcaattacaatgaataatccaggaatgactaaggaagttgcaaagagtattaaaatgacggattacgatttcttgggtattttggatgactcaaaaacaactaaagagcgatataacgaaaggcttcaattaaaacaaaataaagaggaaaaggatattcaatcaatgggtgagataattaaaaatcttgctcaagcgaaagggaacaataaagatggcaagaagaaatag

SEQ ID NO: 180275 - DNA, 2172 bp, Klebsiella oxytoca
atggcaagaagaaatagtacagaaatagaaattaatggtgatagttctggattagttgcggcaataagtcaagcagaaaagaaactaggtagtttcggtaaaaatgttggtggtggcattggtgaggcatcaaatgcaatttcatctggtattggtaaaatgacaagtggtttaactggtttaatatctatatctggattggcagcaaccgcattaggtggcctagtactaaaactaaatgacacagtaagagagctaaaccaactttcaaagcaatctggtatatcagtttcagacttacagaaacttgagaaggcatttagaattactggccttggtgcagataagatggcagatatcaaccaagatgcactagataaaatggcagatgcatatcgtaatggtggtggtattgctgatgatatgctttcagtgggtttagatccaaagaaatttactaaattactgaatgatccaaatggtggtattaaggcagtaatacaggcattctatgaattaagagcagcaggtgcatcaaatgcagatcaaaaattctttcttgaatcattagcaagtgatgcaagtagattaactggagtactaaatgattcagcaaatgctcaagaagcatggaataaaatccaagcacaatcaatatcagtaactgatgaacaggcagcacagtttgcaacatttgatcaaaatctatcttcattgactgatacgggcaagacatacttatatgatttgttaacaccattagttacttcaactaataatcttgctgatgcaatgcgaaatgtaaactcaacaaatttccttgttgatattttacaaactgcaactgatttacaaatcaagattaatgaaattactcacatgttccccggattgagtacagtaatgggtttaatgtctgatggtgctgaacaatttagacaagataccggcccgcagatgccaaaacttaataatacattaccaactcaaacagcaacagtaactcttgatccaaatgatggttggaagaataaagaacaagaagcagcaaaagccgcagccgcagcagctaaggcacaagcagcagctaacaaggccgcagccgcagcgaagaaactcgttgaagaccgtttgaaagcacagaaagaacttaatgcaatttcatctgatgcaactattggtactagtgaacgtcaattagcagtgtttgatcgccagcaacaagatattactgacaaaattaaaaagaatgctgaagtactaaaactatcacaaaaagaacttgatggatatcttaataagaaatcacaatatgcagcatatcaacgttcacaaatgattgatggaatgattggttattcagatcctaatgctcaattgaaaacaaatattggtctcttacaatctggatcactcaatgatcagcaaaaaggattcctcgcaaatcaacaagcagaatcagttggtagtgatacaactcaagcaaaacttgcagcaaatcagcaggaaatgcagttacagttacagcagaatgatttactacttcaaggtcatgaagactatgaaaaacgtaaggcagagattactgcaaaatatgctgcacaagctgtacaaattcagagagagcaaacaacgcaacagttacaatcacttgaagaatcatttggtactattggtcaaggaatggcagatgcttttgataagtcatcaggtgcagcacaagcggcatttgcggtacaacgtggattatcaattagtactactattatgtccattcaagaagcactagcaaaagcacttgcattaggtttcccacaaaatatacctgcatacgcacaaattgctgcaatgggtatgagtattatttcaactgctaagggggcaagtagcggtcagttccatggcggtattgataacttaccatctagttatgataataaatcattcatgcttaaagcgggtgaacgtgtagtacagccagaagcaaataagaagttaactaacttccttgataatcaagagaagggaagttctattagtgaatcaaatattagtgcaccaatgaatgtctattattctggtactaatgatagagaattccaagcacaattgaagaaacaccaaaatagtattgttcaagctgtgaaagattctcaacgtcgtaactcataa

SEQ ID NO: 180276 - DNA, 555 bp, Klebsiella oxytoca
atgcttactttcacaaataacattaaggtttcaaatgtatctctaaagagtaatgaacctaaatatgagcaagtatcatggactggacaatcattacaacgtctaaccggtatccaatattatgaacttgaattcacattaaatttcaatattaaaaatcgcagtgaagtacaggcatttattggggaatatggacagggtaaaaactttgaatttccacttggtcatttatcaacatatgctggagcacaaactggtgcagtttcatgtacttcatctagagcggcaggaaatattgaaataccaactagtactcaatcactagaacttggaacactcattcaatttacaaatcataagaaaatttatcgcatcattgcccgtacaaatacatctgtaactatcttccctgcattacgtagtggaatacagagtggtgaaatgatggtatatgacggattagtactcaatgcacagcttgatgcatcaaatgatttttcaattccaattactaatgtagtacagatgaaatttacaggaagggagaaattctaa

SEQ ID NO: 180277 - DNA, 627 bp, Klebsiella oxytoca
atggatgaacttctaacaaatccaaatttaatcaaatatttcaacttagtaaaaggtgaaaataaaactaaattaacaattacagatgtaatgatgcttggacaacatgttagttgttttgatttatttcctgtgaatcagagtgcaatacactggactgatgcattcaaagcaataacacttggaggtgtaccatatcaatctgcaccagatattattcaagactcacttccatcattcagtgaagagaagggaattagtaataattcactatcatttaaggtaagtaatattgataactcaattcaaatgatggctctatctggtcaattgtttaaagcaaaagttaatatctatatggtagtacttgatccctatacaactgaaccaatttattcatcattaatgtttactggatatattgattactgtgaagcaaaggcagatccaatgcaagccattactgaaatgacaattaatatcaactcaatatatcaaaaattggatgtacagtcccgtactcttgcatctaactctgtatatcaaagttattatccgggtgatgagtttatgagtctattaggacaagtaaacaaggcagatcaagaatggagaatgaaaaaatga

SEQ ID NO: 180278 - DNA, 390 bp, Klebsiella oxytoca
atgattcataatgaaataatgaaaattattgaagatgcaatgaaacaaccatatgagtacggtaaaaatgactgcaatattgtggcactacgaattgtagatttactatgtggtacagaatggtcaaaagttgcagagtactcaacactaaaagaagggattcaacaattacaagatcttggtttcaattcaactcaagacattattgaaaaagaatgcaaacaggttgaagtaccaattgatggtgatatctggcttgatgatgaaaatccacttcaaatgggaattatcgtatcaaatcgtcttatatgtattaatgatgaacacactgcattcaagttagatatgaagaaaaaaaatggaagatattttagaggaatgaaagaatga

SEQ ID NO: 180279 - DNA, 1215 bp, Klebsiella oxytoca
atgcctgttgatctctctgtgattcctcccgcaactaagcggaaattacctccgtccgtaaaacgatggtcggttgtgctgcttgtcttcattgtttgtggtgggctttttacctcattgttgtggccctcacatagcatagtacgagggggattattctggaactgttttatcagcttaccatttataatatggttgtttatatttggtgttcgctggctatgttatttgacatccgtatggttctctgatggctggaatcatgaacgggaaaaagatattgggaatgaaattcagcgtgggcagcgttatctgacgctggaagctgtatgtacgcatttacaacacgttgtaacgtctggtgtcatgacggaccaatttataatacctgggggagttgagttacccacagtggtggatgaagtcacgcaaatagtgagctatcaaacccgttttggcgatgccaggttacctctatcaatcagaatagtcagggagctaaccttacttcttgaggacataacgttacagacagcgttaatgaaatgtaaggcttcaaagcggttgactgtggttttacagctcgatagtgatattgcattggcgtcagatactatttcagatattcaggaggaaattaaattacttgtgcctgagcatgcgcaagttttgttttcctctcaatttggattgaccgatattgataattggctggataaacctcgaactatagaaactctattgattttgtcaatgaaattaaaaacaaaattacgtaatggagaaggggaagctgcagtggcattgcttttaaacgccacacaagacgattcacaactgaaagagtatatagctcatattcacaggccggaaaaaacaactcatgcaggactaaatgcatcagtgatgcagtcattgttatggggaaagagcaatctcgaaaatatcgaatatctctggttagcaggaatgggggcgaaaaataaagagaaaacacaggttgctaataatctcggtttgccattgaatgatacaaaggcgaagttgatcgatattgacattaagagtggttttacggggagtgtatcgccgtggcttgctattgctttggcttctggtaatcacagatattcctcaccacagctgattgtcagtatgtctgaacatgatgatttcttgtggtcgttggtcgttaggcctcaagcacagttgtag

SEQ ID NO: 180280 - DNA, 267 bp, Klebsiella oxytoca
atgaagggcatcgttcgtattggcgataaaacaacgcatggtggtcaggtgctgtccggttccgggaccttgaaatttcagggggtgggtgtggcgcgtttaggcgatgcggtaagttgtcccatagaagggcatagtccatcatatatagcggaaggccaccctactatgaaagataatggcgtacccgttgcatttcataattataaatgtacttgcggttgcacattaattacctcactaagctgcgctacaacgagtaaataa

SEQ ID NO: 180281 - DNA, 1032 bp, Klebsiella oxytoca
atggattacgaaggattaatgatcaaatacaagtaccgggcctcacctgtactgacagaggatgaactcgctaatcaattacatcagaatgaaaaattagacctgggtgacaataaagtcatggatgatgcggcggtgattcatctcagttcaggttatatggaggtggttgataagtggtatgcgataaaaggatttttaaccgttccatccctggctctgtttcttctttttacttggggtgtatatgattttacgtcaacaatggtatatgagtacttatccgggcgtcagagagatctttttttctggggatttggcactggtgcagtaatcatttcttttcttctggcatggttctgttcatttatgatgagggttgaatgtttccgctggacgcattatcccgtcagatttgacaggaaaaacagactggtgcatgtattcagcgtggacggggaggtttacagcgccccctgggacgacattttctttacgactggatgttatacaaaaacaagatttaagcggaagaattacgatattcgcggacatgtgctggcggaagatcgcaaaacggtgctgaaaacgttcacgctgtcggtttccgctccgcggcgtgaagacctgtaccgcaactgggaatttgtgcgccgttatatggaggaagggccggaagcggtcgccggcgtactgaaactgatgcctccggtggagggacgccgggaagggatattttttggctactggtatctgatgttcagcgccacctacggggcgccgttttttgtggtgccctttctgatggcgctgtatctgacggcctggccgttccgggtctttgcgatgtacacctgccggatcccgcgctggagtgaggaagtcgaggccagttgcgtgattgcgtcggacgatccctgggatatcagtgccgcgcagaatccccgttcgctctggcgctggatgctgggaatggacaaggcgcgcagcatggtggataaaaaacgcgccatgatggaggtgaagaaatga

SEQ ID NO: 180282 - DNA, 198 bp, Klebsiella oxytoca
atgcagtacggcgaggaggacctgcgctttatcactcgcctgctggctgaggtcagtatctggttccgcttcgccgccgacacctggctgaacattgacgtggtgaagttttgcgatgaccagcggtacggcgctggcaccgggccaggatcatcacttggagtacgtatggaaattgttggccttacgctggggtga

SEQ ID NO: 180283 - DNA, 1383 bp, Klebsiella oxytoca
atgcaatggtggttgtatgaaaaacagaaagaggcggaaaaccctggtatttcattatggctcctcattttcacttatgtagtcgtcattacattttgtttattcattcgtgcaacaacatggccgaataataagcatattgacgctcttttttttcttccggcgttggcgctcccttttttaattattactgcactgatgtgctttgttaatatttttaaaagcgcacttgttcattatgctgaaatgcgtaagtttatcgcgttatcacaggaataccatttaaaacaatatgcccggaaaaatataattattgccggatggtctgtgatcactccgctggaacaacctgcattgaatctgttgaagctggaaggtgaattcccgctggccccgaaaaatccgttaaaaatcaggcaggaacaggggtttgattatactcgtatcgaacagatatttggtgaattaattgggccattggcaaccaaactaaaaaatcataactatcgtggttttaagacgacgttatgggtacggggaggggatgagtattgttgtgatgaattacagcgaatgttagggcgatttgacattaatcacaacagtgactgccagatagaatatctgtcagaatgtcctgattattcccttataaatacatggattaaacagtcggagacctcccgggtaaatcgcctgatatttatcatcgatatatatggtgatgatagcgattcaaaaagtatggaaagtgcgtgtgcacttttactcacaaaccgttatgtcaaaatcgaaagtgaaaaaccagtttacctctatcagccgatggcaggtgtgaatgatgttgaggccaaagtacctgtgtatctgcaaacagaaccggtagcctcaccaaaaacgctctggtacacagggttgtcccgggctgagaaatatccgctgttgaaagcgcttgatgagcagaaacaggctcctgaacgactggatattgaggcatcactgggtgaaagaagcgccggataccggtggcttgcactcgcactggctgctgacgcggtaaaatatgcgcagggtgggcaacttgttgctgtgtcagaaaataatcagtttagcatcgcggcattgtcgtccagacaacctcctgaactagatgattttaaaggatttgaacacacccaaccttggctttttggaggaatgtccggaatccttctgatgctttctttttgggtgtaccagtttagtttttttgattcgaagaacccattttccttatggggatttattgccggtagttttaccccactcattgtggggggcgttattggcatattggcaacctggtatagcagtaaaaatgcctgtgcagatatgggctggtaa

SEQ ID NO: 180284 - DNA, 258 bp, Klebsiella oxytoca
atgagaggtgttattcgtcttaacgatccgctggtgtgtggcggtcatgtatctaccgcttccggtgtcgagtttatgggtattaaggttgcattaaaaggcgatctggttatctgccccgaacataaagggacatttatcattgctgaatgccatccatcctggacaatgcttgggcgtggtgtggtggttgacggttgtaaggctgagtgcggttgtacaataaaaacaacgttaccaaatgcggggggcgtctga

SEQ ID NO: 180285 - DNA, 699 bp, Klebsiella oxytoca
atgaatttcactcagatgacaggcagtgtgttagcggcaatgctggtggtcagcggatgcggtgccaaagaaccacctatgcaggtggtttaccgctttgacgaccatcgttatctggaactcaaaggctggaactgtgagggagaactctggtacacggatacgcagagaggtattcattcacagctatatttccagttttttcggatattcaccaaaaaatttgtgcacccttcggaacgctatcttgttatcccaaattgggacccaggggctttcagagtatctaaagattacggaaaaacctggaccacggcgacatattctcccggagaaaacgaaccgaatggtgactcatcaccgccgagagacgacattctttccttcacagtcgtaaatgaccagggatttttgcagacgaagcaccggttgtatatgtcgtcaaagccgtttgatgatccgcgcattcttcccggtggtccggggattacctacactcttgatgacggaacggtacagagaattgaaccacaatatccaggctgggcctggggagtggtgtatttcaccaaagaaggattagatggcaaggttgtgcgtcatgaagctaattatcaggatcttcccgacgaagtaccggaagtgaaaaattaccagggctgggatcatatgcggtgcgatatggatgtggggaaataa

SEQ ID NO: 180286 - DNA, 699 bp, Klebsiella oxytoca
atgaatttcactcagatggcaggcagcgtgttagcggcaatgctggtggtcagcggatgtggtgccaaagaaccgccgacgcaggtggtttaccgatttgacgaccaccgttatctggaactgaaaggctggaactgtgagggagaactctggtacacggatacgcagagaggtattcattcacagctatatttccagttttttcggatattcaccaaaaaatttgtgcacccttcggaacgctatcttgttatcccaaattgggacccaggggctttcagagtatctaaggattacggaaaaacctggaccacggcgacatattctcccggagaaaacgaaccgaatggtgactcatcaccgccgagagacgacattctttccttcacagtcgtaaatgaccagggatttttgcagacgaagcaccggttgtatatgtcgtcaaagccgtttgacgatccgcgcattcttcccggtggtccggggattacctacactcttgatgacggaacggtacatagaattgatccgcaatatccaggctgggcctggggagtggtgtatttcaccaaagaaggattagatggcaaggttgtgcgtcatgaagctaactatcaggatcttcccgacgaagtaccggaagtgaaaaattaccagggctgggatcatatgcggtgcgatatggacgccggtaaataa

SEQ ID NO: 180287 - DNA, 699 bp, Klebsiella oxytoca
atgaaaaagttaacaacaggcattgttttagccggaacattgactgccaccggatgcctggcaaccaaagaagctccgacccaagtggtttatcgctttgacgaccaccgttatctggaactgaaaggctggaactgtgagggtgaactctggtacacggatacgcagagaggcattcattcacagccatattttcagttttaccggatatttaccaaaaaattcattcatccctccgagcgttatatcgcgataaccagctgggaatctggtggttttattgtatcaaaggactatgggaaaagctggcaatcagtaggattttcgccgggagagaatgaacctaatggagataatcgcgctccacgagaggatgttatttctttcacagtcgtgaatgaccagggatttttgcagacgaagcaccggttgtatatgtcatcaaaaccgtttgatgatccgcgtcttgctgttggtggacccggtattacttacacagcatcagatggtgctgttcatcacatagatcccaaatttcccggcagggcctggggtatggtgtacatgactaagcaagggttgcaagaaagcacagatcaatttaaatctaactggcaggatcttcccgacaaagtaccggaagtgaaaaattaccagggctgggatcatatgcggtgtgatatggacgccgggaaataa

SEQ ID NO: 180288 - DNA, 1899 bp, Klebsiella oxytoca
atgatgatgcataacgaagaggcgcagaaaaaaatcgccgcgccgggtcgttcgccggttattcctttttactggggctacaagccggtgacgtatgacgactgggttgcggaccagcagaattaccggaaagaagtggacgcccagaagctgggggacaaagcccatattccctatgatgcttatcaacaaaatgataaagagaaaatgaaggctgtcggcaacgatggcgataataaggtgaagtttcagaacgacaactggaacaatgcgctggatatgaattttgccaaaggtggcggaacctttgctaatgccaccaccagcatccccgatatgctggggccgggggcaggaggggcggctgttgccgccgcagggtttagcacactgtatctgaacggcggtgactatacgcacccgatttttcccaatccgcaccgtatttatcagttttttgccgcccagcggctggcggatttgattattcaaatccgggatgagcctgtcaccgagaacgacgtgattaacgtagtggcccacagccagggcaccatcatcaccatgctggcgaatatgctggtcaaacaggcgggatacagtccggccaattgtgtgattctgaacaactcgccgtattcgctggaaagccggctgatggaaaatgcccagtcgggccaccaccagaccagcgcggcgcggcagcagacgttcaaaaacttctgcgccgtgatggcggaacagtacaaaggcggcgaactctccggtgatgacattgaggcgctggaggggagttgcacgctgcgcaggccggaagagaatccactgcgtaaagacaataagtatcgccgtaacaacaacggcaaggtgtataactatttttgcccgaacgacggaacggtttcgctgaaaaatgttcagggttttggctggcggggtattcccggtgagctggccagtgctattcctaacctgcgtcagcgcgtattctgtcaacatgtctgggtggggaaggctccagatgaaaaaccatttgaaatgccaccatcatataagggcgactttaaatacagcgttgccacgaatgccagttataccgcgagtgatgtgattattaatggcgaggagctaccggaaaccttcatgttcagattgcaggggcaggacaatcacccggataacgacgagaaaacctgtgatgcaccgtataaggcgaatattgaccctgacagcccggatgcgtatatctcctactcggcgaaagcctatgccatcagccgcacggcaagtgccacatatccgctggacgattatcagcgccgttcatggtttccgggccatgtactgacggaaagtgaattgcagacagagagtaacaagcggaatgtaacagtgattcacggcatggtaagcgggtcaaaagatttcccggccctcacgctgacgtggctgaaatcccgtgatgaacttgaaaaggagtggcagaaatcagacccggtgagttacagccagcactcctctgtcgtgatgagtgagtttgcgccttctcatgcgatggcgtttgacctggcgatagggcagtgcaaggcgtttaattacaaagcgggagaattctgggaagccctgctgcaccgcgctgactggcgggatgtgcataatggaaatgttgatgcaaaagaatattaccggacagggagactaccgctggaaggaacaaaaaactatatgaacaagcccgatgaggttattccatcgttaaaagagtgtggtgtggtgaatcagtttatgaatgccacaaaggttattccgtcccgcgacctggcaaccggaaataaggaagtgccgaatacacaatgggacaggccagacacgctaaccgaccgccaaatgaaaggttaa

SEQ ID NO: 180289 - DNA, 216 bp, Klebsiella oxytoca
atgctcaacattattgtgtctgcagccttcaagaatgttcagataaccgatcaggttagcgtcagcataagcgaacgggttttccagggagtagcgaactcctgcctgcgcggcaagatgaatgacccgtgcaaatttttcttccgcaaaaagccgggcaatagcttccctgtctgccaaatctattttgtgaaaaatgaaattcggggcttctaa

SEQ ID NO: 180290 - DNA, 651 bp, Klebsiella oxytoca; identical to SEQ ID NO: 167745

SEQ ID NO: 180291 - DNA, 1245 bp, Klebsiella oxytoca
atggcagttgataacatcaatcagcataaaagctttgttcaaaaccggcgttcatctcttctcgccgccatttttctgatggcgacttccgccattggcccgggttttattactcaaaccgccaccttcaccgccaccctgggtgtcgcattcgcgttcggtattctggcttctatcctgattgactttgtcgtacagcaaaatatctggcgcgtggtaaccctgacacaaatgaatgcagcagaggtagcaaaccgggcaataccgggcagtggctacctgttggctgtgttggttatctttggcggactggtgttcaacattggcaacatcgcgggcgccggtttagggctgaatgccttgtttggcttgagccctaaactgggtgggcttatcagcgcagctattgcgatttatatttttgcttcacgccgtgctggtgtagcgcttgaccgcatgcttattgcgctgggggttgtcatgatagtgctgacactctacgtggcactggtttcacacccaccattgggcatggcactacgtgaaaccgtgttccccagcaatattaactttgcggcaatcaccactattgttggcggtactgtcgggggttacatcagttatgcgggtgctcaccgcctgctcgataagggcatcagcggcaaagaacacatcaaagaagtttcttcggcggccaaccgcgggattattgtggtcggcatcatgcgttatgtgctgtttctggctatttttggcgtggttgccagtggtgtcaccattgatctctccagccacaatgcaaacccggcttctcaggcattcctggccgcagccggtaatgtgggcctgcgtattttcggtattgtattgtgggccgcagcactttccagcgtggtaggcgccgcatggacatccgtttcttttatttccgttttccgcccggggattactgagcgccagcgcaatatcgccactctgatatttattgcattcactctggttgtgtatctgtgcctgggtacagcccccgcagctctgctggtgtttgctggcgggttcaatggcctggtgcttcccctggggttaactttattcctttgggttggctggcgccgggcagacctgatggacggttaccgttacccacgctggttgctctggctggggatgataacctgcatcatgacctggtatatggccatcatgtcggtttccactatttttaatttcctgaaaattgcataa

SEQ ID NO: 180292 - DNA, 774 bp, Klebsiella oxytoca
atgaacaccattgatattaacagcgatcttggcgaaagctttggtcagtggcatatgggtgatgacgcacgcatgctgactgtggtgagtagcgcaaacattgcctgtgggttccatgccggtgacccggccgggatgcgggccacactcaaagccgccgcagccaaccaggtgtgttgtggcgctcatgtgggttacccggatatacagggctttggccgccgggaaatgaatatggcagatgacgacctgactgctagcgtaatttaccaaattggcgcactggcgggcctcgcccgtgcggcgggcaccagagtgagttatgtcaaaccccatggagcgttatacaacacaattgcacacgacaggcgccagggcatggcagtcattaatgcgattaaagactataacgccagtttaccactagtggtgcttgccggttctcctcttgcacagcttgctcgcgagcaggggttgcaggttgtggctgaagcctttgccgaccgggcctaccatcaggacggtacgctagtttcacgccgggaagccggtgctgtgttgcacgatacacaggccattgccagccgtatggtgcaactggtgcgcgaaggcggtgtagtgtcagttgaaagtgtgttcacgcccatctctgcccaaagtatctgcgtgcatggtgattcccctggtgccgtcgagatggcaatcaaagtgcgggctgcactggagcaggaaggtatccaaattgcgcctttttgcccgggagaacagcaatga

SEQ ID NO: 180293 - DNA, 807 bp, Klebsiella oxytoca
atgaacattaattaccctgcaacaccacaagcactggaagaggcggcacaggctcgcctgcgtattcgtaagggttacgacaaacccaccgccgggatggcgccaggcatgacccaagtgaatatgatagccctgccacgcgactgggcatttgattttctgctctacgcgcagcgcaacccacaaagttgcccggtgcttgatgtcctcgaagccgggcaatgccacactatgctggcagctggaggccgtgtggatacggacataccgcgttaccgggtatggcgtgatggtgaactggctaaagaagtgaccgatgcccgggaaatctggcaaagccacccggacctggtcacttttttgattggctgcagcttcacattcgaaacaccactgatgcaggcaggcattgatgtccgccatatcagcgaagattgcaatgtgccgatgtaccgaaccaatcgcccctgccgtgaagctggcaggctgaaaggcgaactggtggtctccatgcggccggttccggctcatcaggttgctgatgccgtcactattactgcccgttacccggccgtccatggcgcaccggtacatattggtgaaccgcaggcgctgggtattcaggacatcaacaaaccagactttggcgacccggtgacactccgccctggagaaataccagtgttctgggcctgtggcgttaccccacaggcagcagtgatggcatcacgggtgccatttgctgtaagccatgcccctggccacatgtttatcaccgatattccgaacgccgcctggcaacaataa

SEQ ID NO: 180294 - DNA, 1584 bp, Klebsiella oxytoca
gtgcgatttttaccttgcagcctgtccagttttttagtggagctgggcactcttgatgacacgctggctttgttcgccgccttgcaggctgcgccattgtcaggagtggaagagatcattcctgcagcccgtaccctgcttatccattttgacccaactctcacccagtgccaccagttatctgctgccattcgccagctcgacggacagatgcaagctcagcgcacaggtaaagtagtcaccatccccgttcagtatactggtgatgatttggccgagatggcggaatacctcgggttgagtgttgaggcgctcattcagcgccacaccggctctttgtggcaggtggccttttgtggttttgcgccaggtttcgcttaccttgtttctcgtgaagccggtatccaggttccccgccgcgcaagcccccgcacccgtattccggcgggttctgttgggcttgccggagaattcagcggtatttacccccacgcaagtcccggtggctggcaaataattggccgcaccacagaaacactgtttgccctggacaggcagccgcccgcgttattgcaacccggcatgcaagtgcagtttgtcgatgtcacgcgcgccccggtctgtgtgccggtggtaaaaccacagcccctccaacaatcagcttccggtagcgcagtgatgtcagtgatatcaccaggtttacaaaccctgtttcaggatgccgggcgcgcagggcagtcaagcatggggatatccccttcgggtgcacttgaccaggccgcttggcggcgcgccaactggctggttggcaaccctggtcacctgcccgcactggaaattactgccggtgggttcagagcccgtatttgtgccccaatggtcgttgcgctaacaggcgcgccctgcccggtcatggtcacccgtgcagacggcgcacattttaccgccagcacagaagcgccactggcacttgaagcaggcgaccagttacgactgggagcgccagcacgcggcgtgcgcagttacctggcacgccgtggcggctgggccgttacaccacaactgggcagtgcctcacgcgacacgctggcacaagttggcccggaaccgttacaggctggggttaaattgtatgcaggcaccacgccgccatacagtgcggtacagcctgctgtcatcggcctgccttcattaccggcacccggcgagaccatcacgctggatatcatccctgggccacgctgcgactggttcaacgacgaagcgctggaccggctcaccagccagtgctggcaagtcacgccacaatctaaccgcattggcctgcggttacagggcgagttaccgcttacacgcagtgacaaccgcgaattacccagtgaaggaacttgcattggtgccatccaggttccggcgaacgggcaaccggttctgtttctggccgaccacccgttaaccggtggttacccggtgattggtgctgtcgcccactaccatcttgatattgcgggccaactcccgcccaactgccagattcgctttcgggccattcacccttttactgtttttgaggagtataaataa

SEQ ID NO: 180295 - DNA, 1746 bp, Klebsiella oxytoca
atgagcgctgttgctaccgttcccccacacaaagtgctcgtcgcgaaccggggcgaaattgcggttcgcattatccgggcctgccatgaatacggttttgccagtgtcgcggtctatgctgacccggacgtcgacagcctgcattgccgcctggctggtgaagcctgggcattacccgggtccagcccggcagagacttacctgaatatcgaacaactgatcgacgttgcccgccgcagtgaagccacaatggtgcacccaggttacggctttttgtctgagcgggctgaattcgcccgtgccgtggaagccgccgggcttatctggattggcccacgcccggaaaccatcgagcaattgggtgataaagtccaggcgcggaaaattgccatggcagttggtgcaccgctggttaaaggtacgccagacccggtttcttgcgcggaggacgttatccgctttgccgatgaacacggcctgcccgttgctatcaaggctgcctttggtggtggtgggcgcgggttgaaagtagcgtggtttcgggaggaaatcgccacactttaccagtcagccgtcagtgaagcgctgacagccttcgggcgcggggagtgttatgttgaacagtatctcgaccgcccgcgccatattgaagcgcaggttatcgccgacgagcagggccacgtagtcgtggtgggtacccgcgactgctctctgcaacgccgcaaccaaaaactggtagaagaagccccggcgccttttctcagtgctgaaatcgaagcacaaattgccagtgccgcgcagtccatttgccagcgtgccggttaccgcagcgcaggcacggtagagtttttgctgggtgccaatggtgtgttgtcgtttcttgaagtcaatacccgtttgcaggttgaacacccaataactgaagaaaccagcggtctggatctggtcaaagaacagctacgcgttgcccatgggttaccactgagtattaccacaccaccagtgccgcgtggccacgccattgaactgcggattaatgcagaagacccggcgaaaggttttctcccggtgccgggtacgattacacgctttgatctgccaggaggaccaggggtacgcgtggacagtggtgtcacccatggagacactatttctggcttctatgattcactgatggcgaaactggtcatttgggcaccagaccgcgaccaggcgctggcgcgtgcgcgccaggcagtcaaagcctttcgcatcgaaggagtggcatcagtgctgcctttccatgaagcggtactccattccccggattttactaaaagctttagtgttcatacgcgctggattgagactgatttttctgctgagcttgctgaacaggtacgccctttacccccaggtaactccccgctacaacgttgctggattgaaattgatgggcggcgccatcaactggctctcccggccagtttccaggctgcctccggtagtgctgttccggcaagtctggctgaaacaccccaggcattacaggttgccggtgcagtaactgcgcccatctccggcattgtgcagcgctggcttaaaacttccggcgaaaccgtcagtgaaggcgagactctagcagtaatggaagcaatgaagatggaagtaccggtacttgctgcccgcaacggagtgctgtcaatccagattgctgcaggagaaagctgccagcaggatggtgtgttgggtaaggttacgccctga

SEQ ID NO: 180296 - DNA, 1272 bp, Klebsiella oxytoca
atgttcgccctggccgacgtcaactccttctacgccagttgcgagaaggttttcaggccggatttgcgcggcaaacctgtcgtcgttctcagtaacaacgatggctgcgttattgcccggagtgctgaagccaaacggctgggtataaagatgggaaccccctggttccagctcaaagaggcgcagtttcctgaaaaactgtacgttttttccagcaactacgagctctacgcgagcctgagtaaccgtgtggtcgccctgctggaagagctgtcgccccgcgtcgaacaatactcaattgacgaatgtttcctggatgcccggggaattagccactgtatggatctggaggattttggcaggcagctgcgtgggcatgttctcagtggaaccggactgacgatcggtgtcggcttcggcgccacaaaaacactggccaaatcggcgcagtgggcgtcaaaggaatggccacaattcagtggggtgctggcgctgtcgcccgaaaatccacgcagaacggcaaaattactcagcctacagccggtggaagaaatctggggcgtggggaaccggatagcgaaaaagctgcacgttatggggatcaccaccgccctgcagctgtcgctgacgaaccctacatttatctggaaaaacttcaacgtagtgctggagcgcacggtacgtgagctgaacggcgagagttgcatttcgctggaggaagcgccgccgccgaaacagcagattgtctgcagtcgcagcttcgggcagcggatcaccacctacggagaaatgcgccaggccgtctgccagtatgccgagcgcgcggcggaaaagttgcgcggtgagcgacagtactgccggcatatcagcaccttcatcaagacatccccttttgcggttaatgagccgtattacggtaacgtggccacggaaaaactgaacacccctacccgtgacacccgggacattatcgcggcagcggtcaggtctctggacaggatctggctcgatggccaccgctacgcaaaagcggggataatgctcaatgatttcagtccgaacggcgtcgcgcagctgaatctgttcgatgacgtgcagccacggccgcacagcgatgcgctgatgaaggtactcgacggcattaatcattccggactcgggaaagtctggtttgccggacggggtattgcgccggactggcagatgaaacgggagatgctgtcaccggcatataccacacgctggaaggagctgccggttgcccgtttctga

SEQ ID NO: 180297 - DNA, 252 bp, Klebsiella oxytoca
atgacaaatatcattctgtgtgatgtgactgccagcgtcagcgaacttaaaaacgatccggtggccaccgccagtgcccgcggcggctacccggtcgagataattgaccgtaaccgccatgttttttattgtgtgcccgcggctttgtatgaacaaatgctcgatgagctggacgaaaaagacctggtgcaaacgataacagaacgtcaaaaccagccgctgcgtgaagtggatctcaatcagtatctgtga

SEQ ID NO: 180298 - DNA, 306 bp, Klebsiella oxytoca
atgggtagcaaaatcgcaggtgtggttttcttatacttcgctgtctggggaatggcttcagtgattgaattgcagtactggcgtaacgctgatacctatcctgtctggctgacaaaacatctccggatctctcctgaaaataacgacaagagcctgataaggatagaaatggaaacctttgacaaggtatgtggtgataaaaggggcctccttgccgtcacccaaaaacaaaacggtatgtttatgcgctgtgatgattcccccggttttttttcatggttcagcggcgtttacaaagtcaattaa

SEQ ID NO: 180299 - DNA, 816 bp, Klebsiella oxytoca; identical to SEQ ID NO: 167739

SEQ ID NO: 180300 - DNA, 1509 bp, Klebsiella oxytoca; identical to SEQ ID NO: 167740

SEQ ID NO: 180301 - DNA, 723 bp, Klebsiella oxytoca
atgaaaggatctgccggggaatcaggcgcattgttcattgaaattcctgaacatattgatttaaccgggctgcctgcatttgagcgtatatccatcctgctgcgtgaaaacatcatcagcggcaatctggtagctgggcaggcgctgggcgaaattgaactggcggcattatgcgatagctcgcgtaacaccctacgtgaggcattgcgttttctgcatggcgaaggactggtgaattatcaccagaatcgcggggtctttgttcgtcagcttgataagcgcgatatccgcgacatattcaaagctcgccgccatctggaagtactggcgttaacggtcaacacgcctatcagcgattttcatctggcgcggatggaaaagcatctggataacgctgcgcaatcagcggcggcgtcggaatggcgcagcgtcggtacgcacagcctgcgatttcatcagagcatcgtacagatgctgggatgcgagcgttttaatgattttttcagtgtgttactcgcgcagttgcgtctgttgttttgcagcggcgccggggagcgagatttccagttgccatggatcgcacgcgatcgccaaatcctggccttactgaaccagcaacaaagcgaggcagcctgccgtgcgctaatcgactatctcgattactcagaacgacagttaacgaccaactttagtcacccaattacctatggagaatcttactga

SEQ ID NO: 180302 - DNA, 837 bp, Klebsiella oxytoca; identical to SEQ ID NO: 167742

SEQ ID NO: 180303 - DNA, 1392 bp, Klebsiella oxytoca
gtgaaagcacgtcagctggcaaaacgtgtcggcacgccgttagtggcaggaactcaggatccggttaacagcgtagatgacgtcatgaaatttgccgagcaatatggcctgccgctggtgatcaaagccgcttatggtggtggcggacggggaatgaaagtggtatggcgaagagaggacattccagaactgtatgtctcagccgtgcgcgaagcggtgaccgcattcggccgtggcgaatgttttattgaacggtttttagacaggccgcgtcacattgaagcgcaggtgctggcagacaaatatggcaacgtacaggtgctaggcacgcgcgattgttcgttacagcgccgtaaccaaaagctgattgaagaagcgcccgcgccttttctcagtgatgaacaacgtcagcgtattcatgatgcagccagagagttgtgtcgcgaagcagcgtactgcggcgctggtaccgtcgagtttctgcttagcccggaaggggagttctccttccttgaggtcaatacccgcctgcaggttgaacacactgtgacggaagaaaccactggcattgaccttgtcatcgcccaactggagatcgcccggggcaaacggctggacaataccgaaactccgcctccgcacggccatgcttttgagtttcgtatcaatgccgaagatcctgcgcgtggatttcttcctgtttccggcacgatcagtgacttttcaccgccgtccggcattggtatccgtctggacagcggagtccggaccggttcgacagtgccgcccacttttgattctctgctggcaaaacttatcgtctgggcgccatcgcgcgaaatggcgcttgcgcgagctcgacgcgctcttgctgaattcaaaatagaagggctggcaagcgttcttcctttccaccgcgctgccctgcaggagccggatttcattaccgcgcctttttctgtgcatacacgctggattgaaactgattttgctgtcgatttgccgctggcagaccggacattgcctgcacgggaagaaagcctgacgtgtgtctggatagaactcgatggaaagcgtgttgccctggggctgccggattcgctgctgaatggcgttacacagccggatgcgcagcccgcacggcccttgcgggtgaacgcaggcgtggtagaagcccccatttcgggtgttttactgagctggcatgtcgaagaaagccagcaggttagcgaaggcgaccccatcgccatgatggaagcgatgaaaatggaaacgcagctctatgcgccctgcgctggtcgaattactcttcgggccgctgctggtgagatggtgacggcagggacaatgctggccgacatacacagagataccgatcccatggcgtcgtga

SEQ ID NO: 180304 - DNA, 903 bp, Klebsiella oxytoca
atggataatattcaatattcaccagaaattgaaattggtattaactctaagtatgtctttactaaagatgatgctgatgaaattaatggcatattagatcttgataaacgtcttgatgatactctagctaatgcagtgaatgaaagcagtcaatatactaatacaaagattgatgtacttcagaatcaaatcgataatgacattaacgcaaagattactgaaatgaatcaaactattgttgataataatacagcaactacacaacagattacacaattaaaatctgattttgatggtaatattgcaacagtgaatcaggaaatggcaacaaaagctagtattgacactattaattcatcatacacattatctgtaaaagctggcggtgaggttgcaggtttcaaattgcttgcaagtgatggtgcagagaaaacatcagccgtttattttgcagcaaataaattcattatatctggttcagatacagcaacggcaggtgatactccacccttcagtgttgttaatggtaaaacttatatcaaaactgcaatgattcagcaaggtagtttaggttctgtttacattgccgatggtgcaattacaaatgctaagattgctaatgcaagtataaatgatgctaagattgttgatggtactattacaaatgctaagattggtaactttatatcgtcaaataactatgactggaataccggtcaaactggttggcttattaataaggatggtaccggtatattcaataacgtaactgttagaggtaatataactgcaaataatggtaattttggattcaatggtacaggcaatgtagttacaattaataatgatggtgtaacagtaaatataccaggtggcggaatgattagattagggagatggtaa

SEQ ID NO: 180305 - DNA, 963 bp, Klebsiella oxytoca
atgccaaatggactttatataaatttaaatgatggtggtccagcaatggaaataacagcagggcttagatgccctgcctttgctaaccaactatcaactcaatgggacaataatcaatatacaattaataactatgtatctggtagtcaaatcgtagtatttccaaaagactgtgtttttagtacatatcgtggtacaaacgttgtaccaacaattggtatgttttcggggtactctcaaaatggttcacagataacaatgaatacttggtggtccgacaattggggaagggcaagaacttttgattctgcaatatggcagatttacccatcatcaatttctggtactcatggattatatattcaagattcttcaaattttctcgcaataacaaatacatcatccattggttactgtatatatcgtggtacaattaatgtaaatggttcatggactatgccaacttttgatggtattgatagaagtagatatatatgttttgcaagatggacggcagatggaattacagttgaatttgatggtaataatataactgcgtgtgtaaataaaaatggtgatgatgaaagtgcatccgtcactatgcagattgcagtgtttgcagcagcacaaccaacaccatcaactggtttgaatttcttcaatgcagcggggcaatgtacttttagtacttcaaaacgtccattcgtttacactggcttcaactatagcccatcatgggattataaggacattggaaaccgtttcgtaatgcttggtagatatggatatgatagtaccgtatcaggttctcaagactatctaaaatgggcaggtttgatgatgaatggtaatcaagttaaatgctcaaaaggtcgtaccaactctaaatggacttcaagatactctgtaacaggcaatagattaacatcacttaatattccatgtattgagaacatgtattaa

SEQ ID NO: 180306 - DNA, 240 bp, Klebsiella oxytoca
atggaatggattaccgttgtagttataccactagtggtatatctctttagaacgtggctcaatagtcgtaatcagatggtggaacgtattgaaaccctcgaatcgaaagtaagtaccgcagaaattatgatcagtgaactacgcgatgatgtagaagagatcaaagaaattcgcaatgtactaacagatgttaagctagatatcagagagattaaaacactattacataataagaaataa

SEQ ID NO: 180307 - DNA, 582 bp, Klebsiella oxytoca
atgataaagataaagagtagaataacaggtctaaagcagtcaaaagtgtatgttaataaagagggaagacgccttggtagtgaattccaaaacgaattaattacaaaggctcgtgaattagctgttaagatgcaaactgatttaaataaatctattgataaaggtgctgtcaatttcactagtaaagctctacgctcttggtttaaaaagagtaagactggtgttaagtgttatattggagtactagacaatcaaaataagtatctgtatgacgttattgtagaacctaaaagaattgaaaagtttgttaatacatcagcagcacgtttaactaaggaaggtaacatttctcagttacgaagtggtattaaaaatggaaagtacaaggtagttgtatcaggtggtaagaaacgtttgattgatactactaagaaagatacaaaaacaaaaacaaaacgtgttattggacttcatgagtccaagaaacgcaaaatagtttatgatttttattctgaggcagagaagggcattcgcttgatcatatcagatatcaaaggtcatttttcaataaagaggggataa

SEQ ID NO: 180308 - DNA, 324 bp, Klebsiella oxytoca
atgattatagaagaacaccattatggtgaaaatgtaagtaaaataaaacttgatggagttacgccttttgcaaactcatataattttgatgtaggtttatacttacaaaataaaaagctcaagaaagaactaaagaagattgatccaaatattaagcaatatatgaatatcgtttttcagtaccgtcaaggtgattggaacattggtgatattctaaagtgggaatatgaaggtcttgtatttgatgtagtactttttggttcacatatgattagtcagaaaggtaaacaattctatcagtactgtgtaggaataaaagaatga

SEQ ID NO: 180309 - DNA, 291 bp, Klebsiella oxytoca
atgattactgcaataatcgaacttatcaaatctggattttcttttttccagaaaaaacaagaaaaggaagttgatagtacaattgaaaaaaacaaagaaacgaatgagactaatagagaggaaatcaaaaaaggtttaacttggcgtaatgctttgggttttgcgattactcttatcattctctataattggataattgtaccagtacttgatctatttggcatagtagtaatacaggtgccacttggtcaattaatgcaagtactattgatcatggttggtggaaactaa

SEQ ID NO: 180310 - DNA, 711 bp, Klebsiella oxytoca
atgtctgaaggagtttctaaaaattccagatatgaaatcattgcaattctgagagatgaactcaggattcaatctaaattgtacttctattgtaatgatataaaacaccagtcaaccctaaaaaaaatagaaggaaattttttctatataaaaccatctacctctcatccaggccttcctaaagagagcattttttattttatcatccacagcccattaggaaaaatagaattcacaaccaacaatcgaatcactgacaaaagcaattcaaacaatcttctatgcttcattatccctgaatcattatcaatactacaacgaaggacatcaccaagaattaacgttaggtacgaaagccagttttattgctctggaagatacagaagtggcactatttataaatatcacttgaatgatatatctgaaggtggttgctcgtttatatccctggaacctttgcatagttttattagaaatggaaataaacttgaaaattcagtgttaaatcttggggagtacggacaaatccctgttaatttaaagataaaacatatatccgagggaaataatcgcaaacaatgtgatgcaacaagcttcagagtatcttgcatgttttattacgaaagtgaagaaaaaaaagagaagatagaaaaaataattgtcaaattgataattgatagaaaaacaataaacaggcgaagcctagtttaa

SEQ ID NO: 180311 - DNA, 585 bp, Klebsiella oxytoca
ttgaaaaacacattactttatactgacgacaatatcatcgggcactcaatccatgattatatgattgataacaaaaaaaacatcaccactcttaacttccaggatattgttaaggggaccagcgcgccatcaaccactaccattattgtcaacactatccataaggatatctctgcagccacaacggtcgcattgcttaataccctgcgcaagcgtcttacgcactgcgctttgctggttttaattgtaaaaagtgacctctccagactgttccgggagctgctttatattgataatatattgattttgaatgaaaaatcttctttatcagatttctcagccatcatcaacagacctttgaccgccgatggctgccagcggttatgtacccggcgtaagctaaccgctagggagcttcaggttctggagctaatcattgcctgtaacaacaataaaagaatcgcattactcctcgatattgatcaaaaaacggtacacagtcataaggtacatattatgaagaaactggggatgaataactcacggataatgaataaaaggatagtcaatatgtatcggtgctaa

SEQ ID NO: 180312 - DNA, 717 bp, Klebsiella oxytoca
atgaacgcgactctgttttccaatcataatttatcacgtagcgatatatccgttcgttatgtctttcaaaagatgttttccccaaaaggtacgctcgtcgccgtagagtgcctgagtcgtttcgatagcctgtctatctctccagaaaacttcttccgctatgccaatgcgggattgcgcgagagcatattcatggagcaactggcgcttattgaaaaacataaacagtggtttaataaaaacggcatctctgcaacaatcaatgttgatgaccatatactcaacatattgctaagaccagagattaaaaacctcgttggccacattggctgcgttcactttgaggtaacagaaaactcgaataaattattgaacaatgctcttgcaacctggagcgatccgcgaagtacgacgctctggctcgatgattttggctcaggcaatgcgggtattagcgcgattcgaggctaccattttgattatgtcaaaatcgataaagacttcttctggcatttaatgcaaaaagattctggccgaccattgatggatgcgctgatcacctttctttcccgtaaccaccataatgtgattattgaaggcgtagaaagcgaagcgcacaagaaatggttacagggcatggagtggtttgctattcagggacactactggaaggaagtcagtattgaacaactggtcaaagaagatatcaaggtttaa

SEQ ID NO: 180313 - DNA, 651 bp, Klebsiella oxytoca; identical to SEQ ID NO: 147080

SEQ ID NO: 180314 - DNA, 975 bp, Klebsiella oxytoca
atgtcgctaatgaaaaaactgacactttttattggcttaatggcgctggggacaacgtcagcatgggcatcatgttggcaatctaatagtgcctatgaaattaatatggctatggggcgcgtggttgttagcccggacttaccagtagggagtgtcattgcaactaaaacatggacaatgccggataataatacgatttatgttacatgtgatagaaatactactctgaaatcagatgcgaaagttgttgctgctggtttggttcagggggccaataaagtctattcaactgcaattcctggaattggtttacgtttctcacgtacaggggcgatcagtatgatctaccctgatagttataccacgacaggttcctcctttagactcgcaggttcaacattcacattagatataattaagaccagtaccacaacagggagtggaaccttagccagtgggccgtatacagagtacggaccaggatttacaatccttaaaaccagccttaatgctgatgccattacaattgttgcaccttcttgtaccattttaggtggcaaaaatatgaatgtcgatataggcacgattaaacgagctgatttaaaaggggtggggacctgggctggcggtacaccatttgatattaaactggagtgtagtgggggagtcagtgtcagtggttatgcaaatattaacacctcattttctggaacattagctacaaatacatcagcgaatcaaggtgttctactaaacgaaaagaccggaaattctgctgctaagggcgttggtgtgcaggttataaaggacaacactcctctggaattcaacaaaaaatataatattggtacattacaaagccaggaaactcgttatatcaccctgcctctccatgcgcgcttctatcaatatgcgccgactaccagtaccggtgaagtggagtcgcacttggtctttaacctgacgtacgattaa

SEQ ID NO: 180315 - DNA, 1188 bp, Klebsiella oxytoca
atgaagggtatgcagaagatcaaaaggggtaagagcttcgctggtgtcgttcaatatgcattgaaaccgagagcacatcataaaagtgatcccatcatcattggcgggaacatgttaggtgattcagcccttgaactgatcgctgaattcgatagcaccaagcatcttcgccaggatgtcgcaaaatcagtttggcacaactcgcttcgcttacccaacggtgaatcactaacgaatgaacagtggtctagtatcgcagatgactatatgaaacgaatgggattcagtgatacccatctccgttgctatgtcttacatgacgacgaaggccagcatatacacattatcgcaagtcgcatagatctcaatggtgggaagctctacttgggtaggaatgaaaatctcatcagcacacaaatcatcagtaaactcgaagtcgctcatggcctgacagtgaccaaaactgcatctcccccctcgcaagcacaaccgaagcggaagagagtgtcccgtaatgagaaaatgctatcggaacgaaccggggtgctttcaccaagagaagctctgcagcagatacttgataaaagtttatctgataagccggaccttttgactttcacaaaacgtctggaagaagctgaagtatcctggaaggccaatattgcctctaccggtaaaatgaacggcttctctttcgaatacacaggcatagctttcaaagcttcgcaattgggcaagagctactcctgggcaaatctcagtaatcggcttaactacaaccccgaccacttagaagctctgcgaagcgacatatcgataaaagaccaacctgttgctcctgttcctgttcctgttcctgttcctgttcctgttcctgttcctgttcctgttcctgtagaacagattgccagagcgactgtgcgaagcgagagcataggcgaaaaaattgctgaactagaaatgcgattcagagaaggaagacgaaacgaaatcacagagaagattcttcaaaagaatgcagcacaacagcaaaagcatctcaggctcatcggctggattccatttatcagaaggttcatagagcttctgcgaagctatgggaagtccattcttcacaaaacccacacacacttctcaaaaattcatgtaatccaacctttaaacaaggcgagaaaaattcgtttatag

SEQ ID NO: 180316 - DNA, 639 bp, Klebsiella oxytoca
atgctgccaggttccctggtagagtatcggtttattacgcagcgaactatcgtcgactttaccggcggagagcgcgtagcgggtcatccccggacgcagcagctgcgctaccgaggcgtaaggtacgctgaatacctcgaccgaaccatcgccctctttaaccgacacttcaaggtcgctaccgtagccggaaggatagacatcctgcagggtaaacggccccggcggcaccgtggtctgatagataatattgctgccctggcgcaccgtcaccagggcgttgctttgcgccacgccgcgaatttcaggggcgtaggagcgcatgccgtcgggaaacatattgtcatcggtcgccaggttaaccccgcgcaggccgatggtgtcaaagaactcgccgttggtaaaaatctgcccgccgctgactatcgagttaatctgcggaatcggccgctgcagataggtctggttgctgttccagtgcgctttcccctgctgctgctgccagttcaggttaccgatatgcttgagcagccagccgtcccacgacaggcccgcgttaacgccaagatacgcgctgctgttatcggaaccgttggccgaggagatatggctgttccaggcgttggccatccagcctaa

SEQ ID NO: 180317 - DNA, 192 bp, Klebsiella oxytoca
atgactaaacaacagaaaacagcgctgaacatggctaaattcatccagcatcagtctctgctcctgctggagaagcttaacgagcttgagcttgatgctgaggccggcctttgtgagaaactccacgatgatgcggagcatcttttccgtacactgtcctcgagactggatgcattacaggatggtaactga

SEQ ID NO: 180318 - DNA, 282 bp, Klebsiella oxytoca; identical to SEQ ID NO: 104041

SEQ ID NO: 180319 - DNA, 294 bp, Klebsiella oxytoca; identical to SEQ ID NO: 104040

SEQ ID NO: 180320 - DNA, 303 bp, Klebsiella oxytoca; identical to SEQ ID NO: 104039

SEQ ID NO: 180321 - DNA, 2943 bp, Klebsiella oxytoca
gtgctgatttacggcggcagcctgtcatcggcgccggacaccgggcgcctggccgccctgcgtaagctgcgccgcagccgtccgctggacggcatcgtgctggcgctggatgagagacagaccaccgccggtacgctggataaccatcttcgcaccctggagcaggtcggggaggcgctgcgctggcagccgccggtgtacctgtggcaggtgactgacagcgactggtcgcaggatgcgcgcgtcacccagacggtaggggcgcttttcccggcccgcgccacgccggcgggggtggagcgccagctccgcgctatcctgccatccctgcgcgaaaggggaatacagcagctgtgcgccgggccgtcgcacgatttcctgttacgtttcggccggcagctggagaaacagggaatagcccactggaaaacgctgctgacgccgtggctgacggagcacctgaagcgtgttccgctgcgcggcctgatgttcagcccgtcgctggcccctgaggataatgccgcgggccatgaacaccgctggtccgctccggcggtctggcagggcgtgacggcggactgcgttcaggcgcggggcgtgcgggcagggatgccgtggcagcgaacgccgggcgtcaccctgctgacgctgattgccctgtggggggcgggcagcgtggtctcctttgccgttaaccgccaccatatcgtcagcgcggcggcgcgggcgcagcagctggtgaatcatcccgcggttaacgacccgcagctgatggcgctgcaggctctgcgtaacgatatcgggcgcctgcagactcaacaggcgaatggcgctccctggtaccagcgcttcgggctggaccacaatgcgccgctttcagccgccctgatgccctggtacggccaggccagtaaccgtctgatacgcgatgcggccatgcaggcgctgacgcagaaactgaccgtcctggcgaacctgccgccgcgcagcccgcagcgcgccacgtcagctaaggcgggctacgaccagctgaaagcatacctgatgatggcgcgcccggacaaagccgacgctgccctgtacgcgcaggtgatgacaaccaccgcgccatcccggccgggactctccccggcgctgtggcagagtatcgccccggaccttcacgccttttacatgcagagcctgccgtcgcagcctgcctggaaaatcacgccggacaggcagctggtcacccgggtacgtcaggtgctgctggagcagattggccggcgcaacgcggaaagtacgctgtatgagaacatgctcacccgggtgcgccgcagctacgcggacatgacgctggaggacatgacgccgcagaccgacgccggtcgcctgttcagcacgccggagtcggtgccggggatgttcacccgccaggcgtgggagggcggggttcaggaagccattgataacgccgtggcgtcccggcgcgatgaaatcgactgggtgctgagcgatagccgtaaaacgctgtccggcgacgtctccccggaggcgctgaagcagcgcctgacggcgcgctacttcaccgattttgccggtgcctggctgaacttcctcaacagtatccggctgaacccggcgcacaatattgccgacgtcaccgaccagttaacgctggccggggacgtgcgccagtcgccgctgattgccctgatgaacaccctggcttaccaggggcagaccgggcagcagaaagaggccatttccgcatcgctggtgaaatcggcgaaaaacctgctgggcggtgatgaccggccggtgattgaccagcaggccgccggaccggcgggaccgctggacagcaccttcgggccgttgctgcagcttatgggtaaaaacagcgcgcagagcgtgatggcggcggacagttcgctcagtttacagacttacctgacgcgcctgacccgcgtgcgcctcaggctccagcaggtggcaaacgccgccgacccgcaggcgatgatgcagcagctggcgcagacggttttccagggcaagagcgttgacctgaccgacacgcaggagtacggcagtctggtggcggcaagcctcggtgaagagtggagcggtttcgggcagacgatgtttgttcagccgctgacccaggcctgggagacggtgcttcagccatcggcggccagcctgaacgaagcgtggcagcgctcagttgtcgcgaactggaattcagcgtttaaagggcgttatccctttgctgccgcgaagagcgacgcctcgctgccgatgctggcggcgttcatccgccgcgataccggacgtattgaccgtttcctcagcacgcagctgggcggcgttctgcaccgggagggcagcacctgggtggcggacagaacccgcagccaggggctgacgttcagcccggccttcctgaacgcggtgaaccagctcagccagctgtccgacatcctgtttaccgacggcagccagggtatcagctttgaactgcagggggtggcaatgccggaagtggtggaaacacagctgacgcttgacgggcagaaactccactattttaaccaggttgccgactggcagagcttccgctggccgggggtaatcaataaaccgggggcgatgctgacctggacgtcgacggcggcgggaacccgtctgtatacaaaccacagtggtccgtggggcgttatccggatgctggaacagatgcagcggcagaaagcgggggacgggctgtaccggctgagcgtcaccgcgccggacaggcgacagcttcagtggctgctgcgtacggaactgggcgacggaccgctggcgctgctgaagctgcgaaacttcagtctgccgtcgcagatattcagcgtcggtgtcccggcgccaggccgcacggatgaatatgaatctgacgttgtggaagggagtgaataa

SEQ ID NO: 180322 - DNA, 1461 bp, Klebsiella oxytoca
ttgaatttagactcatccaatgcacttcagaaaactataaatgaagcagaaagattagtcaaaaataagaaagctaaacgagtttctataaaactccctgctaaaataaatacggcaagtcccatatacctaaatccttcttatgcctttctggaaccaagtgcgggaataacagaatggcaaatagatagctcatctgaattattcgataacaaatacgccatatacatatccggaaacgtcaacaatagaggtagcgagggagatatcccttatgttaacaccacagtttacatattatcacacatatatatacatgaaaaaaataattctaataatataaattgtatcaagcattatgcaacactaaaccatgataaaggagtctcagaaacagtttctcagctaggtatactaaaatgtcgctttacaggttttaatgatatttacagtaatggtgataatggttggggcatttgtttttgggaatgcggtttcgacagttacaaacgtgccgttgtattatattcaggaattaataattcagagcgaattagttttcgagaatgtgtattccaaaatggcaaattagcattcgacattgatggatggacaggcggtttgctgatagataattgctcattgaattataactctagcggtgaaataagaaataaaggtggccatattatcgttagaggtggacacatagaaaacaaaaaaagaacaagacctgtttgcataaatagtgacactccaaactcaattggaaaggcaaaattccaagacgttacctttgttaattttggaatagatggcaatgaaatatatttatttacatctactcgaaaacataacttaatacttgaagacaatagatttagctgggctgaaaatgaagttaaaggcctggttgcgactagaaacgctaaaataacgaactctaccggttgcatattcgtaaggaattggcatatgagcggaattgaaggaagagcaccttttgtatccgagggtttaatacaaacacctttaccaaaatttctaacaacaaagaccacaggaaaaataaaaatagaaaaaaacattcaaagtgacgatttaaccattaaacttttagcacaaaataaaaaagcaaaacaatgtaaaatccatacttactgcccaatcacaaactcatttcaacatagatttttaacatggatgattatatttgaaaaaataaagataaagaaccccatccttatctctgtttatggtttatatgaaaatggtgaaatatcgaacagacttggtgaaaccattgcattcgccggcgacactaatcaattaagccctatgaactatgaaaattatatcaacgaaaatttccaaagcattatgtttgaatttgatatgtcaaatgcaatggaaggagatctgctatctatatctaatctaggtgcaatcctgtacaattaa

SEQ ID NO: 180323 - DNA, 555 bp, Klebsiella oxytoca
atgtcaccaaggccgatatttgaagacagccgttttggttttatgtatccgcaaattaaattaaataaatttggggttcgtgaaagaataacacctaaatacggttcaggcccattattattatcctttataatatcatcaggcatgttcacatcagtatcagtattagatgatattggtacaatgaatgaagatttttttatagattatgtagatacggaatggtgcttaagagcattagggcatggttatgaaatttatgctgatactaatgtatgtatgaaacatacaattggtgataataatataaaatttctagtgtggaaattacctgttcactctgcactacgccgttattataggatgagaaatatgtattatctttttggtatgaagcacgtcccatttttgatgaaatgtcgagagtttattacaaataatattcaccaacttttaattactctggcttcaaaacaaaaaaatcattatataaagtactgggtcaaaagtcagtgtgatggcgttaaatattttcttacaaaaagatttaagtaa

SEQ ID NO: 180324 - DNA, 378 bp, Klebsiella oxytoca
atgaaaaaactgtttatcgctgcgttggtgatcctgcctcttaccgcttgcaccacctatggcaacaaatcccttaaagacgaatcccaacaaagcgtaaaagccaaaatcgttaaagggaaaactacccagcaggatgttattaacgcattcggggaaccgcagacacgagctactaatgatggtcaggaaatgtggtcctactccagcatgtcaggcgaaagccagatctcgaactacatccccggtctggccctgctgaaaaacagcaacacagcccatatgaattctcttgagatctggttcaaggggaatgttgttgagcgatataatttcagccagacagcgagtaaagtttcgcgtgggttgttggattag

SEQ ID NO: 180325 - DNA, 552 bp, Klebsiella oxytoca
atgaagaagattttactcgctgcctctgcagctcttgttctggcgggatgcggtgaaaaaggcgattttgagaaagcgatcaacgtgaaaatatcacaatcaaagctgtgctactccctgcaggacaacgacattgtattcaacaaaggttttccaattaaggttaaccgtggctaccgttctgccggatacagtgccagtgatgaaatccttaaaggacttgctgaacaagggctgctcactgtttcacaacaggtaaatggctttagtagtgttgatgttctggaagtaacagataaaggccaagacgttgagttttgggaccgtgagaaaggtgcctgtgttggtcatcgtgctgttgctgagataaaggaatggaccgaaccgggaaacggtaatcagaaagttgttcgcgtgtcttatacatggaaattggcggatgttccttcatgggcggacaaaaaagcgttctccagcgtcaagggtatgaatgaacctgaagaaggcatgattaatcttgttaaaaccagcaatggctggaaagcgatttaa

SEQ ID NO: 180326 - DNA, 861 bp, Klebsiella oxytoca
atgaatgacaatgaagttaaatatgggaaatgtgctctctgtgataccgaaaacactatattgataaaatcgcacagcatacccaaattcgcatatgactggataaagaacacatcaaaaactccatacctcagagatattaacgatgtaaacaaaaggcatcaggatgggcctaaagaatatctgttgtgcacagattgtgagataaatttatctgtccttgaaaaaaaattatcaaatgaggtttttaagaaaattgccaattatagagagcaaaagaaagatatagtggttagtgaagaaataagactggctatactctcagttttttggcgagcgctattaactactcaaaaaaaccccaacgatagaacacctgaggactcttcattattagatgactttttacactcagctaaaacacaaatactttctggtgaatgcaaaacaaaaatttttattacaccattttatggtgatccgccttattataatttaccgtcctatttaacttatggccttgagcgttctatcggttcacaggatgtaagattctatgataacccccataggtttttcgccgtattcaacctcccattcatatactttcatattttctcggacaactggaatgttgatgagataaataaatcagcagagctaaaaaaagggacaatagatctatcttcaatcaaacaaatccccaacacactccggtcatatatacttcatatgcataaacaatttgaaaaatcagccactaacatggatcaagagaatatcatgaaaataatgaatgacactgcaaaaaatacaaaattaactggttcagataagtcaataaaacgcgcaaagaaataa

SEQ ID NO: 180327 - DNA, 972 bp, Klebsiella oxytoca
atgcgtcttggtgtttataacaatcagtactttgataatggtaattttatctcaaatggaattgaatatgatggtagtacttataaacctattgcatattggattactcgttataacccaattacctatacttatgatttaggtaatcgtgagcgagtaccagcagaacaaattttccacttgtatcagctagattatccaacacagcaacgtggtataccagatgtacacgcaggtacagaagaactaaaagaacttgaagagtttatgactgctgcaatcacatgtcgtaaagtagcagcctctgcaatggcatttattacaaaccctgatagtgatgacgtagatttaattacagaagatcaaggtgcatcgtattatgaccaagactatctaaacccagcagcaattgtagaactacaagctggacaagatattaaaactgtaaatcctaatcagtcaacagatggtattagtgaatttgtcgataatcaattaatgatgattgcaatgggattagacattaccaaacaagctctaacctctgatacaagtaatgcatcatttagtgcagcaaaactaacagataaactacagcaaagtacttttaaaactcgtactaatgctctaatcgtttctgtactaaaaccattatatattgaatggctaaaagctgcaatgataaataatcctgagctaagtaatttaagctttagcgattttgataaattgactcatgcacaatatgtacaaacaaaagctatttctcttgacccatataaagatctacaaacagaagtactagcaatagattctggacttaaatctcggcaaatggtgattagtgaaatgggttatgaccctgcaattgtaatggaggaaatagaaaaagaaaaaaatatggataaggaacaaaatttagatggaactaaacccgaatcagaagagggcgatcaacctagtacagattga

SEQ ID NO: 180328 - DNA, 1824 bp, Klebsiella oxytoca
atggaactaaacccgaatcagaagagggcgatcaacctagtacagattgagaaatcaattaacgaagtagaccgcactgtagaactttcctttgcatccgaagaacctgtaatcagaaaaatagaaggtcaattttataatgagattcttctatgctctcccgacaatgtagacctaaatagattaaatgatggtgcaccagtactagtagaacatgatgcaatgcgtcaggttggtattgtagagaatgcacgtgtagacatggataaagtttgccgtgcaaccgttcgttttagtgcattaggttctgcacaaactattttcggaatgattcaagaaggtattaggccgaaagtatcagtgggctataacattcgcgattattacttggatggaaataatttaattattactaaatgggaaccatacgaaataagcagtgttagtactccagcagataattctgtaggtgttggtcgctcactaaatagtaatagtgaattaaccctagaggaaacaaatcaaatggaagaacaaaacatggaagttaaagaagaactacaagaagaaattattgaatctactgacgaacaagtagaagaagtagttgaagttgtagaagaggaagtaacagaagaagtacaggaaactgtatcagtagaagaagttttagaacgtgctatggagcaacatacagcttctatcgtaactgctgttaaagaatcactaaataaagaagtagaagagaagcgtgttcgcgaacttcaatcaatcgctttagtactagatgtaaatgtagacgaagcaatcaatagtggaattagcgtagaggaattcaaacgctcactaaataaagataataaacctatcgataaggaaatcgaaacaatgaaaaaaactctaatccaatctgcaatggaagatgcatctaaactagaaggttttgaacgtggtctaaatggttataccatcgatctaaatcaaatggttcgcggtacttctgatactaccagtactgttactgctgctggtgcagttaaaactgagactactgatgattatatccgtactctacttgctcaatctgtactaggtactctacctgttactgtatatggtggcctagcaggtcgcggtaatcttgcagtaccaaaatctactggtgttgctcctgctgctaaattctacggcgaagacgaagcagttgaactatctgttgctggctttgaaaaagtaactctaaaaccacgccattttgctgctggtattccagttactaaggcaatgcgtctatctaactctaacattgatcgttatgttactgatgagattctacgttactgctctaacggtctagaacaagctgtattcgcacagattcaagctactgtaccagtaatcgaaactgctgaatctggcacactaaccgaagcagatgtacaaggtgcaattgctgcactaggtactgctaatgtgaacgtaaatgattgtgttgcaatcgtacacccaaaaactctagctaaactacgtcaaactccagtgctaaacaacgtcgcagcagtagcaatggtagctggtcatcgttatgacatgtggctaaatgacgaagtacgcgtaattgaaagtgctctagttgtagaaaattctgtactaatcggtgatttccgttctgttattttcgctaactgggtagaaggtcaagaactagacttcgacgaaaccacaaaacgttctgagcaaaccatgatcgtttggtctcaccaatggctagatgttgcaatcgctcgcgaagaagactttgtacaaattaaaatcaaagcataa

SEQ ID NO: 180329 - DNA, 1680 bp, Klebsiella oxytoca
atgcacgaagattatatcaattttgtgaaagcatatatcagatatcaacactcattgaaaccattgaaaaattatggggttattatgatggccttgcgatgtctcgaacaggcccttttgcaggttcagaacactggtctcatttataatgttacagccgttgttttcgatgaggcaatgcagatcgggagtaaatattttgaaggtaacgttttagctaaatgtggaatacagcttgaaaaaatatcaaagtttctatgtgaacataatcttgtgaagtcaggatatatctcatggaaaaatcatgtaaaacagaaagtcaaaaacaattatcttcctgagattgaggattatcaccgaagcgataagttaccagatgaagaggcattactcgctattgctgatattttttcacaaaatgatgagttactgagtccaagggataagttcaccagttcagtatttgcacttctactttgttgtccgagcagaatctctgaaattttagccttacctgctgattgtgagattacacaaatagatggcaagggtatcgaaagatatgggttgagattttattcggtaaaagggtatggtcctaatatcaaatggattccacgggttatgataccagttgcaaagaaagcgattagaagattactttccttatcacaacatgcaagagcacttgctcactggtgcgaaaagtacccggataaattttaccggcatgagctttgcccaacagttgatgaaaaagctaaattgaccgttgtacaagtttgccatgcactgggatatcatttatttgatcataaatcatgtgttttaaaaattaaaagaacgagtttggatggtgggaaaagcttcttaaaccacaatgattacaactattcattgagtgatttgtgggaaattattagttctaattttagcagagactttccatggtatgataaagaaaaatccataaaatttagtaatgctttatgcttgctcaatactgatcaattttctttatcaagaatgacttcaatgttcacattttataagcctactaaaagtttctttttcagtgatatacaaagtaaaaaaagctatgagatgaattataaaaatatattttcccgatatgggtattatgatgatgaaggtaaaccactacttattcgctcacaccagccacggcaccttttaaacacaatagcccattatggtgaaatgtctgaactagatatagctaaatggtctggtcgtatcaatgcgaatcagaacagagtttataaccatgtgtcagaagaagatatgttagataaaatcaaagctactaaattgaataggagtaattactgtcaaagggagtcaatacccacaaatgaattgacaattgattttgataaccttaatcaaggtgcaatacacttaactgaatttggttactgtgtacataactatttaatcaagccttgtgcaaaaattaatcaggttattgagtgtgataatgaaacactgggcattaattcagtagatagaattagactgcaatctgtccgagagaaagtaatgcaattaaagagaataactcagatcgcttatgaaaatggtgattatggtgcagacaaatggttgcaacaccatgaaaaaaatttggaaagaattaataagcttttgaataattaa

SEQ ID NO: 180330 - DNA, 1506 bp, Klebsiella oxytoca
atggctatttttcatcttgattttaaaattgtgaaacgaagtgagggcaaatcttccgttgcgaaagctgcctatcatgctcgtacacgtataacagatgaaagaacaggtgatacgtatgattatagccgccgtactgatttatatgggcatttcatcttagctcctgctaatgctccagaatatatcgtaaaagactctacagccttatggaatgaagttgaaagagtcgagcgtcaacaaaatggtcaaacagcccgttattttgacgttgccattcctgccgagttaaacaatgacgacaagaaaaaacttgtccttgagtattgccagaaaaatttcgttgataaaggcatgattgccgacatcgcttttcatgatcttgatagcgacaacccacatgctcacgttatgttgacattaaaaactataagcccggatggttttggtaaaaaagaaagaagctggaacgacagaaaaatgtctgtgttgtggcgtgagtcatgggcatctatggctaacagctatcttgctgctgttggttcaccagaacgtatcgatcatcgttcccttcaggcccagcatgaggaagcgttagaaaaagcagcagtagctttagataatgaagaaaaagctctatggcttgctaaggccgctgaaacgaaccgccctgccatgaagcgtattcacagtgccaaatggcgtagtaaagcagctcaacaacagcgtgctgctgaacaggctgttcgtgatgctgccaagcaagaagccgttgaagtctacaaaacattcagcgaacttgatcttgaaattgtcgttgatgtcagaagcttcaccgtggctgttcttgctgaaccagaagagattgtattaccagaaacgcgttctggttcttctaccagtgaaacgcaaagacctgtactggtagccccggcacctcatactcgtattcgtggcgttaaatcctatcgtgataaaacaaaaatcagtaaggtcgttgctgcgaagaatccatctgtcagtatttttgactctggaaaaaataccattctgaaaacatcctcctctcaaaaccaaaacagggcatccagaagcgcccctgaatgtgttaagaggaaacagactactccacgtcaggataatatatttaaacgctttacagctcttttagttgattttatcagggataaattcatatgggctaaaacggaaaaaactaaagttgatattattagtgaagaacatgataagcgtattgcccaaaactacgtctatgatgaagtattaggctatcctgttctacgcactgaatatgagaaacaatctaagtttaatcaagatgactacaagccaataccggatgagatcagccgtttcccaaaccgtccaaagaatgaacagccgcaaaacggtcacggtatagatctcaccttatccattccaccagagcattcaagaaacagccccttaaaattgaaaccggcgagaggtcgtggcaagctataa

SEQ ID NO: 180331 - DNA, 753 bp, Klebsiella oxytoca
atgggtattgaaaattcaaatcaggggccaggatggcatgatcatgatactccttatggcactattcacagctatgatggtgatactggtacgtatggaggtggtggaactggagggaatgctggtggtgggcataccggtcttactgcaaatacatgggtagatatcgcgacaacaaaagattataacggtagatatatgtctatgtgtttaaataatcttaaagaccatgaaggttcaattaatacaatgtatagagactctaaaggtaatattaccgttggtattggtcattaccttggttctgctgagatggctcaggcattaccttttaatcgaacaaaagttatgcatgtgcatggtgatgatcttgaaagtgaggtcgccgtatctaagtctgatatagcttcagcatttaatgcatacaaatcaaacccaagagatgttcctagtatgcatctttcaaatgctgatgtaataggtcagtgtattaaggatgttcaaactactgaaaatggtttgcgtggactttacccaggttatgatcgtttttcagatccacgaaaaacagcattggtagatatgggttttaatcttggtattcctacgcttaagtctaaatttccgaagtttaacgatgcagttaatcgtggtgattggaatgttgctgcagatgaaagtcatcgagatcttaatcaaagaggtgataagcgtaataaagatacggcagatcaattgcgttataatcggtaa

SEQ ID NO: 180332 - DNA, 501 bp, Klebsiella oxytoca
atgattcgttttgtgattgctgcttttatttcaatcttgacaattaaaggagcttttgctgatatcaatgtttttatagcgcctaacgatctaaattatgaaacaaattctactagtgaaattaatcattatttagatgagctgaaaaaaaataatactaaagttgatgttgataaagacccaaaaattagcaatgagttaaaaaaatatattggtattgttaacgatagagtgtctgatgttttcagtgaaagtgaatttaagaagtatcgtggcgatgtctgtaaaatatcaataacaactgggaatacggctccatctgatcctgttttgactcaagtgtttacttatgatgaactagctgataataaaaaacaatcatgtcaaaaattaaataatgagctaataaaaaaagttgctaaagataagggtttatcatatccgaaagttgttaaagattatggatctttatcaattgatatgatctttttatttaaataa

SEQ ID NO: 180333 - DNA, 987 bp, Klebsiella oxytoca
atgacagcagtttatgttttagatgcgggacatggtgattgcatacttttggattttgaacatacgttaatactaatcgattctgggcctaaaacgtttttgataagaaggaatgttatagagaagcttaaagatttattgaatgatagaacaattgatattgcaattgttacacataatgatgatgaccatattggcggttatgagtatgtattatcttcagggattaaaattgaaaagttcatttttaatagcctcagtatttgtggtgaactttttaatgatcatgaacaacagatttcctataatcaagatatcagtttggatacccttataaaggataaaacagtttccttggaggcattagtatttggtaatgaaccagtcattattaatgatataaagcttattcctttaacaccgactattgatgcacttcatcatatgcatgatgattatatcaaaaagaatcaaccccaaatatcatctgatgaaaaggtggaacctaccttattagagtgtattgaagaagtcgctaatggaaccgataaattcctgcctgatagatctattactaacagaaccagcttatctttaatcatagagtataatggttttaggggattgtttttaggtgatgcatgggctactgatgtcattgaatccttcaggttaaacaaaattgaaccaggtttttgtgtcacaaaattgtcacatcatgggagtgaaaaaaacacaaatagcgaattaataaatataataggtaaaacagaatatatattttgtgctgataaaagcaagcataatcacccgaacaataaaactatcgctcggatattatccctgtttcaacaagcaacatttcattttagtagtgataatgacaaagtcagaagtattttcagtgagaacaatgtgttaggatgtcaagtgttatgcacttattcttctaatggagttaatgtacgatactatgagtgtagctaa

SEQ ID NO: 180334 - DNA, 558 bp, Klebsiella oxytoca
atggcacgacacaataaagacgacggtactcgttatacgtggcaagaaattgcagatagatttggcgtagagaacagtacagtaagccgtatttggtctggtaaaggtcttgatatcacttggcctaaaaagcttgtagacgactggctacttgcaaacatcattgaaccacttcgaagtggcgatactaaagtccaaatacaaaaagcaactctacgcaagcttgaagcagaagcagatatgaaagaactggaactacgtgaattaagtggtgagttaattaatgtggctgagattgaaaaattactatcgcagtattttcattctattcggcaagtactacgcagtattcctgctagttcttacgtagaactatttgaatcaatagatgcaatagaattaaaaacacgtctacaggaaaagatagacgaatcattagaaggaatagggatgtttaaatatgagtacgaaaatgaaattaatgaagctgttgaagaagacagtgaagataatattaccaccaaagaaacagaatccggcagagtgggtagagaataa

SEQ ID NO: 180335 - DNA, 408 bp, Klebsiella oxytoca
atgaaagcagagtttcagaataatcgtttattcctgatggttgtgatggggggaaaaacatttgtggatgtccttactgtcacaaaatcagttggccttctgctggaagccataggtactattttagaagttaaaggtaaagaggaagcatcgaaaataatcgacttaggtggtaaatatatagccaaaaagctggtagacagatattttggagtcagaattctggcgattttaataacctgggaggccatgttagcgataactttgttacaggtggttgtgacctggatatcggacgacgagcttcagatatggtgtaagaaatgcgtatttggcacagcaccattcaaccgcagcgtggcagaccagaataaagccctggaagcagcgataaaggatatatcatga

SEQ ID NO: 180336 - DNA, 963 bp, Klebsiella oxytoca
atgaattcagaagagcagaagcaaatatgttcccggtttatcaaaccagaaaaattagccgatttacggacaaaacaggaaattgaggtgatgaacggcaggccgtggacgcgtgagcttcctcctccgccggtattgccgccttatggccctctggaaaaaatcagcgggcggctgcagtctttccgtagcgaatattttcgggaatattttgatgcagatgcctaccggaccagcacgttgccggagatatcagatggccagcgcggagctgccgccgctgtagcgatagtggcagggagtccaggcgtcggggctgtaattatggctgagagcgaatcatcgaatgattcggcggaatatgtgcagggagagattaatggtcagccattccgcggctgggtgggtgtcacccggcttcaggctggcgataaggtggacatgattgttgagtggcagcatgaccattatgaggtctatgccattgcgctaccggaagagcggatagtgtctgtatgtccgaaatgtgatatggggcatatcgcgcatatgctgtggcggattaaaaatatggttattctcacggggatttttttcttctcggtgctttttgcgggagttctgagtgaagtgattgaagacacctggaagagccttgagtcatttatcaccacatacttttggttgtatgttatagcattgttggggggaggagggctttcaggattaattgcattctttgcttataaagcctgtgctcccacatattgtaaattggctgaagagatatttcatttgctgggtgtgaaaaatattccaacagtaaatctcagtaagctgacaaaagaacgtgagcaacaactaaaagataatgggaagtggcatgacccgggggatcaaagcaaaccagcctgtcccagcgggaaattcatttattcagatgaaagctggttttactactag

SEQ ID NO: 180337 - DNA, 693 bp, Klebsiella oxytoca
atgaagttagaaaatattaaagcctccaacgcaggagtcgttaaaatttttgatttcggcatatcagcaataacagatgactatatcactaaaaacaatcgtggaacattgatttatgcggccccagaattatattttgaaaatgcaaggattagtagggaaatggatatctatgcatttgggataattgcctggaatcttgtcaccacccaaaataattttgacagagcattgttagatactcctccacattctaaacataaatatcaatccatagctcatgtttgtaaaaacaaattaccagaagaaataataaatttaattgatgcaacattatgtccaaatccagctaatcgccctacaatagaggaaatagtacctttattggcaaaatacttagtaatacacaagcataaagggattttcaccgaaaacgcaagaaatgtatatgaattatcatctgtccaaaaaggtgttaaattaaaaatagctccgctgggagagatagatatatattatgacggcctcgaatttaaaataacctacgttgatggtgatgttttcatcaataatatgagaccaaatgtaaacaccgtgttacctaattcttgtctattgacatttggtgccccccatttacgcaatagacggtttatgactttttcatcttcacatccagaggtggtattatga

SEQ ID NO: 180338 - DNA, 765 bp, Klebsiella oxytoca
atgaatgaaatagaagttgatttagatttaggcttgaatcctttttgctttgagacagagataaagattgaaacaaggaaaagaaatctgactgtttctagaggaacagaactgattgaaaggaaagataccagtaaaacttattttgccaatatcgtacatacacaagaggtcgataaagaagagttcattaagctctacacctcccagataaaagcgtattttgatttaacgaaaacagcgtacaaagtctttttcatatttctccgtatctatcaggatgcgataggaaaagatcacttctacctgagttgtaaaaaagcgatgtcgcttgcagaaaagatagatcacttcatcctgtctgaatctattttttacagaggcataaaagaactcattgaaaaacgtattattgctaaaaccaatgaaaaaaactggtattttataaaccctgctattgtgtttaatggggatcgtgctcgctttgtttcagagattataaaaaagaaagaagtaatggaagaacaacccgaaagcgttgccagtactgaacgaagaaataaaaatattaaagaagaaggtataactattgaggcagtcatagaagacgtaaatagccaagaagatatagatttgttaatcgcaagattacaggctaaaaagcaccaaggagcgatgatgagtaaaagcatgggaagatgtagcactgttgaggcagcaactcttttaccaccagaagaaccattagattgggataatatttaa

SEQ ID NO: 180339 - DNA, 651 bp, Klebsiella oxytoca
atggagccgttctatttcgaaggcatcaacgtcgacccggcggatgaaccggctgaaccggaggaagaggaggaggataccgtccagcctgaaccgtcggtaaaccatgcgccgaaagccgctatcgaactgatggtggtaggcggctcccgcgtgcgcctttccggcgaaaaatcttctgatgaagataacgacgagttgacctttagctggggcgtgcccgcggcgatcaacgtcgccgataaaaccgcggcggtcattgagttcgatgtgccgaaagtggctgcggataccgagtataccttcaccctgttcgtgcgcgatacctggggtgaaccgtcaacgcagcagcgctttgtgctctccgtcgtcgccgcgactcagaccgatgataccgaggacgagccggcagacgaccaggatcgcaccgatgatacgcctcaaccggcagatgatgatgctgttccttctgacgaaaccacgccttacccgctgtggaatgccagcaccgtctatggcagcaactggggcagctttgaaatcgtgagctggaaaggccataactaccaggtgaaatggtggtctcagggcaaccagccggatctgaactgcggtcagttccaggtctggagcgatctcggcgcgtactaa

SEQ ID NO: 180340 - DNA, 924 bp, Klebsiella oxytoca
gtggcaaagcaaaagttcaaaatcaccaactggcccacctacaataaagccctcatcaaccgtggctccataactttctggctggatgatgaagctattcaggcctggtatgagtcagcaacaccttcttcacgaggcagacctcagcgctattctgaccttgccatcactactgtgctggtcattaaacgcgtattcaggctgaccctgcgggctgcgcagggctttattgattccattttttctctgatgaacgttccgctacgctgcccggattacagctgtgtcagcaggcgggcaaagtcggttaatgtcagtttcaaaacgcccacccggggtgaaatcgcacacctggtaattgattccaccgggctgaaggtcttcggtgaaggcgagtggaaagtcaaaaagcatggccaggaacgccgccgtatctggcgtaagctgcatctcgccgttgacagtaaaacacatgaaatcatctgcgctgacctgtcgctgaacaacgttacggactcagaggccttccccgggttaatccggcaaacccaccggaaaatcaggtcagccgccgccgatggcgcttacgatacccggctatgtcacgatgaactgcggcgtaagaaaatcagcgcgcttatccctccccgaaaaggtgcgggttactggcccggtgaatatgcagaccgtaaccgtgcagtggctaatcagcgaatgaccgggagtaatgcgcggtggaaatggacaacagattacaaccgtcgctcgatagcggaaacggcgatgtaccgggtaaaacagctgttcgggggttcactgacgctgcgtgactacgatggtcaggttgcggaggctatggccctggtacgagcgctgaacaaaatgacgaaagcaggtatgcctgaaagcgtgcgtattgcctga

SEQ ID NO: 180341 - DNA, 495 bp, Klebsiella oxytoca
atggcagttgtaagaaaagtaaaacttactagcgatattattaaaggtgaatctattatttacgattacccagcaggcactaatattgatttgattgatcctgctggtgttaaaacatcatactcctatccttttcaggctattgatactaatgcttgggaagttggagtatggactgcaattattgctagtccaaaagcatatggtgttaatcaattcgaattaatcgatccaactagtaaagcgtcagcatataacaatctcaaaaagattattgaagagattgatacaattattatacagagagcaactaatggtggtgtaatttctcagtctatacaaaacaaatctcttacttatgaaagtagtgaagcactgatgaaactacgtcgaatgtatgtagaacgtgcaaacgatttgttgtcatcaatgaaaggttatggatctgctggctcaccaatcaaatcaataaccaactttagaggtaagagataa

SEQ ID NO: 180342 - DNA, 192 bp, Klebsiella oxytoca
atgacgaaacaacagaaaacagcgctgaacatggctaaattcatccagaatcagtctctgctcttgctggagaagcttaacgagcttgatctcgatgttgaggccgacctttgtgagaaactccacgatgatgcggagcatcttttccgtacactgtcctcgagactggatgcattacaggatggtaactga

SEQ ID NO: 180343 - DNA, 312 bp, Klebsiella oxytoca
atgagtgcgcttagtctgcaggaactgcatgaggccaaagccgaagatatcttcttatctgaactggaaacatctggcggtatcgtgcttcacactgatatgggatatccagtagctgaatatttacattctgatatcagaataggtattgagccgataaactttgcctctatgcgagatctgaccaatggctatgtggtaatgttcaggaacggtgagttcggtcatgagatggagggcgatctctatgaaacgttctctcaggctgttgataggcttaagatcgctgttgtgttgtgtgaaactctataa

SEQ ID NO: 180344 - DNA, 276 bp, Klebsiella oxytoca
gtggcttctgtttctatcagctgtccctcctgttcagctactgaaggcgtggtgcgtaacggtaaaagtactgccggacatcagcgttatctctgctctcactgccgtaaaacatggcagctacagttcacttacaccgcctctcagcccggtacacaccagaaaattattgatatggccatgaatggcgtcggatgtcgtgccagtgcacgcattatgggcgttggcctcaacacggttttacgtcacttaaaaaactcaggccgcagtcggtaa

SEQ ID NO: 180345 - DNA, 453 bp, Klebsiella oxytoca
atggcgctgatcgaagcgaaagacgccgcgggggcgatgttgcccggctcgccgggtacccgcatcgacagcaacggctacgccattctgccgtatctgcggccttaccggataaattccgttgaaattgacccgaaaggcagcaacgacgatgtcgccttcggcagtaccgtggcgcaggtggtgccgtgggaagggagcgtggtcaaggtctccttcgataccacgctgcagaacaacatcactctgcaggcgcgtcaggcaaacggtctgccgctaccgttcgccgccacgatttacaacccctccgggaaagagatcggcgtggtgggccagggcagcatgatgtttatcagcgacgccagcgcgccgaaggccacggttaagtggagcggcggacagtgctcggtggaattaagtcaggaaaaaacaaaggaaacgctatgtcgctaa

SEQ ID NO: 180346 - DNA, 324 bp, Klebsiella oxytoca
atgagtgatatttcagataaagagcaaaccagaaagaaaccacgaataaaaaagacactggagcagcaattagcatctgctcagatgcgtttaaatcgtttgcaatataagtctaagaaagaagctaaacagatagagacacgtcagaaaataattttaggggctgaagttgccaaggctcttgattgtgatgtttttacggtggataaggatcttgttttaggtatgctactagagataccccacctacatccagatgataaagaaagatttaaaagaagcggaatgttatttctggcgagcatgaaaggaaggaaaacttga

SEQ ID NO: 180347 - DNA, 159 bp, Klebsiella oxytoca
atgaatcagttatgtttggtgtttgttatatgtggttttaatttacttgggtattttttcgaaagtataatgccattaataatgatgtttaactttttaggagttgttttgtgtgcaataagttttttattttataaaaaagaaattaagagtctttag

SEQ ID NO: 180348 - DNA, 870 bp, Klebsiella oxytoca
atgaaagactgggccgaaattaccaaaacgcgccgactggatatgcttgaacgtgtggttttccccgcaataggtaagctcccaatcagagaggtcactccacaccacatccttagaattcttcaagaaactgctaaacgaggagcaccgacagttgccgctgaagctcgccgcaccgtttcatcagtttttgagttagcagttgcaacgcttagagctgatagcgatcctgtacggcctgtgcgcaaggcccttccggccaataagacacagcacaaacaagcactgaatcctcagcaaatcggaaagttattaaactgttttgataatagtcgtggctcgtaccaggttaactattgtatgtggcttatgtggtggacattgacgcgtcctgcagaagccaccgaagcagaatggacagaattcgatcttgataacgccctgtggacaattccggcagcgcgaatgaaagcccgcagagaacacgttattcccctaccctcccaagctatcaaaatgctcagaacactacagggattaaccgggcatcggcagcaccttttcccgggcagggataatccgttaggtccaatgacatcgcactcgctgcgccagctacgtaaaagcctcggctggagtggtacatatagcccacatgcaacccgaaccacaggaaatacccgtttaaacgagatgggctatcgacctgatgctattgaggcccaacttgcgcacgctgataccaacaatgttcgtcgcacatacaaccatgcaacttatcttgatgagcgaaaggttatgatgcaggactgggcaaataaacctgaagaatgggtaggaagcgcgcgcagcactattgatgtttcgtaa

SEQ ID NO: 180349 - DNA, 1941 bp, Klebsiella oxytoca
atgaataaatttattgttgccgattctgcaaactgtattggctgccacgcctgtgaagtggcctgcgtcacctctcatcgccaggacagctggccccggcagcgcagcgactttctgccgcgcattcgggtgttcttccaccgccacgccagcagcgcgacgacctgccgccactgcaacgacgccccctgcgtcggctcctgtccgacccaggcgctgcgcgtggcgaacgacagcgttcagtttacagaggcgctgtgcatcggctgtaaaaactgcgtcatcgcctgtccctttggggccattgagatggtggccaacgatgacgacgcgccgcagctggcgcagaaatgcgatctttgcagccagtatccttccggtcagcaggcgtgcgtggccagctgtccaacccaggcgctgcaactgatggatgaggccgccgttaaccggctgcgtagcgcgcggcagattcgctccgcgctggaaaccccgctgggcgccgttcgcggcgccagacgcagcgcgatactcaataaacctccgcgggtgggcgcgaaaaaagtgcccgccgatgaccgcatgcagcacttcggcgaaatctatcagccgctgagcgagtgcgatgcggagtatgagagcgaacgctgcctctactgcgcgcagaaagcgtggtgcaactggacctgtcctttacataatcatattcccgatttcatccgcctggtgagcgagggcaagattatcgaggcggcggagctgtgccatcagagcagctccctgccggagatttgcggccgcgtctgtccgcaggacaggctgtgcgaaggggcctgcaccttaaagaacgaaggcggctcggtcgccattggcaaccttgagcgctatatcaccgataccgcgctggcgatgggctggcgaccgacaatcggcaaagtagccccgcgcccggagcgggtggcggtgattggcgctgggcccgccggactgggctgcgccgatattctcgtgcgcgcgggcgtgcacgttgacgtgttcgatcgccatccggaaatcggcggcctgctgaccttcggtattccgccgttcaagctggataaaaacgtgcttgagaagcgacgcgacgtttttagcgccatgggcgtcaattttcatctcaaccaggaggtggggcgcgacgtggcttttgccgatctggtgaaagactatgacgccgtcttcctcggcgtgggcacctacggtctgatggccgccggcctggagggagagaacgcccccggcgtgattcaggccctgccgttcctgattgccagcacccgcgaggtgatggggctcgaagagagccccgagtatcccctgaccgacattaaggggaaacgggtggtggtgcttggcgggggagatacggcgatggactgcctgcgcaccgccgttcgccgcggcgcagcgagcgtgacctgcgcctaccgtcgcgatgagctgagcatgcccgggtcgaaaaaagaggtggtgaacgcgcgggaggagggggtgaaatttgagtttaacgtgcagccgcagcgcattcagctcaaccgcaaggggcaggtctgcgcggtggagatgatccgcacgaagatgggcgagccgggcccggacggccgccgccggccgcagccgatcccggattccgggtttgaacttaaagccgatgtgctcattatggcgtttggctttcaggctcacgagatgccgtggctgcgcggccacgggataaagctggaccgctgggggcagatagtgaccggcggcaaagggcgcggaacgacacaaaccagccatgacaaaatctttgccggcggcgacgccgtgaccggcgcggacctggtggttaccgccatggtcgccgggcggcaggcggccagcgagatgttgatgcaattcacggcccgggaggagatatga

SEQ ID NO: 180350 - DNA, 138 bp, Klebsiella oxytoca
atgttgataattaaacgtatcgcgcgtgataccaaaatgagacgctccctgtctcaatgtgatagcgcgcgtttattcaccacgagatttatttgtgaagattcgcagcgcgtcgatattcccgcctttttctcgtga

SEQ ID NO: 180351 - DNA, 894 bp, Klebsiella oxytoca
gtgctggcgaatcttgaagtaaaatggctttacgatgtgattgcccttgaggaatccagaagctttaccctggcggcaaaaagccgcaatatttcccagtcctccttcagccgccgcatccaggcgctcgaggcgtcgctgggcttcagcatcttcgaccgttcggcaaacccgctgcagctgaccaaccgcgggaagatttttgtcggctatgcgcgaaatatgctcgacgacatggacttccagattagccgaattaaagggctgaacaacaccacccagaaaataagaatcgacgcggcgccgtcgctttcagttttattacttccggaaatcatcgccggttataccgaccgaaagaataaaacttttcatgttgaatcgattaacgtcaacgatgcggtgttcaacctgaaagaaggcaaaagtgattttatcctgtcgttttataatgaagagctgatgaactatccgtttatcaatcacaaaatttttgactcggcgctgcacctcgtttctccctgcgataaacacggcaggccgctttttcatttacaccgcggggtgctgccgctgatgaaatacgccaacgacagctatatggggcgccaggtgaatcaggtgatcgaccgcaagccggagatcaccttctcgctgacctttgtctcctcgatgagcgagctattaaaacgcatgatcctcaacggcgacggcgtgggctggctgccgcagtactctatcaagcgcgagcttgaggagggtcgcctgacgattatggatgagagcctgtcgctgccgatcggcgcctatatttaccgctccggcgcgcggctcaaccagtcagccgagcgcttctggcagcatattaagtctatgaataccgtgaccgcataa

SEQ ID NO: 180352 - DNA, 1128 bp, Klebsiella oxytoca
atgcttttcatgaaagaacattcagggcgcaacggctttatgattaaactcgataatattcgcaagacctaccccggcagcgcgcatgcggctattcgcggccttaatctggtgattaatagcggcgagctgtgcactttcgttggccctagcgggtgcggaaaaacaaccattctgcggatgattaatcagctggatattcctgacgccggtgacgtatacgttcagggcgttaagcttgccgctgccgatattattcaggtgcgccgccaaattggctttgtcatgcaaagcgccgccctctttccgcatcgtacggtcgcgcaaaatatagccacggttccgcgccttctcggctggagcaaaaagcatatccaggcgcgcatcgacgaattagtggatttgatgtctctcgaccgcaacgtcctgccccgctatccgcaccagctttccggtggccagcagggacgcgtagcgatcgccagagcgctggccgccgatccgcctattctcctgatggacgaacctttcgccgccatcgacccggtggttcgcgagcgcctgcaggacgagctgctgttgctgcaacagcgcctgcgcaaaacgatcgtcctggtgacccatgatatcaatgaagctattcgccttggcgatagaatcgctatcttccaggagggcggcgagctggcgcagttcgccacgcctgaccatattttgtcgcatccggccagcgactttgtgcgccgttttatcggccccgaaccgaatctgcagcggctggggagaattcaggtcggacagctcccgcgtcatgacgtgccgcttattgatgagagcctctcccccatcgccagcccgcatccgccggtcgccagtccgctgcgcctggtgctggacaaaaaacggcgtccgctgaactggttcgatccggttaagcgccggacgctgccggtcgacgcgccgctggcggccatcaacacgctgcgctttgcctacagcgcgctgctggatgcgcccggcggcgtagtggttcatgtcgataccgacggtgaatatcagggcagcatctcccacgctctgctgcagaacgtgctggaaggccacgtggatcttcgccgctatgattga

SEQ ID NO: 180353 - DNA, 630 bp, Klebsiella oxytoca
atgattgactggccgtggatcctcgacaacaaaatcatgatcggtgaactgctctggcagcatgtacagctggtgatcgttacgctgtttttcggcacccttttcaccggcgtattgattagcctgacgctgcgctggcccgcggccgcccagccgctgatctacctgtgcgggatactgttcaccatcccgtctctggcgctgtttattctattactgccgtttaccggactgtcgctgatgacctcaatcatcggcctgacgctctactcgctgctgatcctgctgcgcaacgttatcgccggaatagagaaactcccggcgacggtgctggagtctgcgcgcgcgctgggctatacccgctggtttcgttttgtcgatatagagctgcatctgctgctgccctcgctgttcgccgggttacgcatcgcttcggtgacgctggtcgggctggtgacggtcaccgccttaattggccagggcggtctcgggcagcttctgttagccgggtttaaccagaactttgtcacgcctatcgcggtcagcctggtgctcagcgttgtgctatctctgctgttggattcgctgattgcccgcgtcggctattggctaacgccgtgggcccgctaa

SEQ ID NO: 180354 - DNA, 1392 bp, Klebsiella oxytoca
atgaaagtaaagtatatagctctggttattagtggcctgttctcctctggcctttgggcagcgacaaataatgctcctgcggatattgaaaagcgtttagcgcagctggaacagcgcttaataaatgctgagcaacgggcggccgatgcggaagcgaaaattcagaccttaacccggcagcaggccgctgtggcgaaaagtacgccaaccgtaaaagtggaatccgccgagcccgtcgcaccgggcgcggagccgacgaaactgacgctgtccggctacggggatatcaaattttatggcgatgtggaattcaatatggatggcgccagcagcagcggtagcctgacttcggtaaaaaccacggcgaataaagattgggcgccgggcaataacgaacgctgggatattaatggccgcctgctgctaggttttgacggtatgcgcaaaatggataaccgcagctttgccggtttttccgtccagccgctggctgacctgaacggcaaaatgaatcttgatgatgcggtattcttttttggccaggagaacgactggaaggtgaaggtcggccgtttcgaagcctacgatatgttcccgctgaatcaggatacgttcgtggaatactccgggaacaccgccaacgatctctacagcgacggctacggctatatctacatgatgaaggaagggcgcggccgcagcagcagcggcggcaacttcctgatgagcaaaacccttgataactggtatttcgaactcaataccctgctggaaaacggcagcacgctgttccaggaccagcagtatcacggtactgaactggaaaatgagaaaaatgtcgcctatttacgcccggttattgcgtggaacagcggacgcttctccaccgccatcgccatggagagcaacgtggtgaataacgcctatggctatcacgatgcgaaagggcgctgggtcgaccagtccagccgcaccggctatggctatacgatgacgtggaacgggcaaaaaaccgatccgctggatggcgtggtgaccaaccttaacgtcgcttatatggatgccgaagatgaaaccgactttaccgccggggtgaactccctgtggcacggtgttgagctgggctacatttacgcgcataacaagattgaaagctttaataccgctaactttatcgctaactacgacgataactgctggatcgccgatccgggaaaatatgatatccacaccattcatgcgtcgtatctgtttccgaacgtgatgaatatgaagaacttcaacatctatctgggcgcctacgcatcctggattgaatcccacccgaacaacggcgacggccaggaagactcccgctacggcggccggctgcgcttcaagtatttcttctga

SEQ ID NO: 180355 - DNA, 354 bp, Klebsiella oxytoca
atgtctgcctgtaaattacgttcactgttacttctcaccgcactcgggctcggcgttagtcaaagttacgccaccaccactctcaacgtctggatccgcgccagcaatgactcgaagaatatctacaaacaggaggcggaaaaatttgaagaaaaaaccggtatcaaaatcgcgtatttcaacgccaccaccgactttgaacagcggctggcgcgcgccacggctggcaacgccttacccgatttgatttttaacgatgcggcgtcgctggggcagttcatccagctgggtattgccgaagaaattgacccgcagacgatcgcgggcggcgaccagctattccagacggcatag

SEQ ID NO: 180356 - DNA, 993 bp, Klebsiella oxytoca
atgaaagaaattaatataaaccacacgaggagcaaaataccttcgttagcaatcgttgttccttgttataatgaaaaagaggcctttccatactgcctggaggggcttaccacggtattacaaaacctccttgcaaaagaaaaaatcgctcgaaatagttatatcctctttgtcgatgatggcagtaaagacaacacctgggaacaaattaaatccacatcacaggaaaagtcattcgtccgcggtctgaaattatcaaggaaccggggccatcagatcgccctgctggcggggttggcaaacgcggatacggacgttaccgtaagtattgatgcagacttacaggatgatataggttgcattgagaaaatgatcgacaaatatcatgaagggtttgagattgtttatggcgtacgcgacaacaggagtagtgactcagtattcaaaagggcaacagccaataaattttattctctgatgtcagggctgggtgtcaatcaggttcctaaccatgcggacttccggcttcttagccgtacagcgttgacagcattaaaagattttaaagaacaaaatttatatttaagggggctaattccgctgttgggttataagtccagcagcgtttattatagcagagatgaaagggttgcaggcgaatcaaaataccccttaaaaaagatggtagcactggcgttagaaggaataacgtctctgacaattaccccattacgtatgatcgccgccgctggggttgccacatgccttctatcttcactagctgcaatctatgccttcattgagaagctcctgggaaataccgttgcgggttggacatctgtaatgattgcgattttcttccttggcggtgtccagatgctttctttggggataattggcgaatacgttgggaaaatatatatggaatccaaaaaccggcccaaatattttatcgaagaggtagcaaaacacgaaatgagaggcgagcaatga

SEQ ID NO: 180357 - DNA, 972 bp, Klebsiella oxytoca
atgagtgattgctatggtgagttatatgacttgactattttttctgtatctggagaaggagatagtttttatccatataggaaagtaaaaaagataattaattacaaggaatataaaaatccaattaaaaagattgttgatgatgtaaacaaaaacaatttcgattatgtctttgttataagtatgggtaaactgagtgtaatgtactcattttggaatattttttcacgttttaaaaacaatgattgtaagctttttgcttgcgagcatgtcgcaatccattcatttaatagcattgtccgttttctaaagttcatctttttaagattttatgacaaagttatagttttaacagataaagacaaaactattcttcaaaaatggggggttaactctttaaagatagccaatccaatttcttttaaaaactttgataggcacaacagaacttatcatgctttggctgttgggcgacttgagcaccaaaaaggatttgatttattgcttgatatctggcgatctttttctataaataataaaaactggaaattatttatagcgggtgatggtttacttcaccagcaattaagcgaacttatcaaaaattataatattgaagatactgtcacattattgggtaaagttaaagatattgataaattttatgcacagagtgatatgttacttatgacatcacgttatgaaggtttaccgttagtattgctagaggcaaaatcttggtcattaccggttatagcgtatgattgtccgacaggaccgcgtgagatcattgagaatgatattgatggtttcttaattccaattaataacaaagaattgtttgttgagaaaatgaatcttttatcaactgatgatgaatgttactttaaattaagcaaaaacaccaaaaagacctctttaaaattcgatagtcaagaaataaaaaacaaatggatatcgttagtgtcataa

SEQ ID NO: 180358 - DNA, 1113 bp, Klebsiella oxytoca
atgaaacgcgcatataaatttcgattctatccaacgcccgagcaggctgagcttctggcccggacgttcggctgtgtgcgtttcgtctacaattcaatccttcgctggcgcattgatgcctacaacgaacggaaggagaaaatgggctacgtccaggccagcgcccgactaacagcactgaaaaaagagcctgaatttgcctggatcaatgacgtttcctgcgtgccgctacagcagtcgctgcgccaccaacagaccgactttactaactttttcgccgagcgtgccgcatacccggcattcaaaagtaagcgccataaacaagccgctgaattgaccgccagcgcattcaaatatcgcaatggcaagctgtatatggcaaagagtaaagcgcctttagacgtgcgctggagccgtgaattgccgtctactccatctaccgtcaccctttccagagacgtcgccgggcgatatttcgtctcctgtctctgcgagtttgagcccgtatcactgccgatcaccgctaaaacggtcggaattgatgtgggtttaaaagatttgttcgtcactgataccggatttaaatccggcaatccccgccatactgctaaatacgcggcccgcctggcgcagctccagcgccgtttaagcaaaaaagccagaggctcaaagaaccgtgccaaagcccgcttaaaggtggcccgactccacgcgaaaatagccgatcgccgtctggatgccctgcacaaagcatcccgcaaaccgataaacgagaaccaagttgtttgcgtcgaatctctgaaggtgaagaacatgctccgcaacccgtcgttgtccaaagcgatagcagacgcaggctggggtgaattcacgcgccagctccggtacaaaggcgaatgggtcgggcgttcagtggtcgcaatcgaccggtttttcccgtcttcaaaacgctgtagctgttgcggtttcaccatgaaaaagatgcctctggatgttcgtaaatggtcctgcccggaatgcggggcagaccatgatcgcgacattaacgcggcccgtaatatcaaagcggcagggcttgccgtgttagcttgtggagtggctgtaaatccttaa

SEQ ID NO: 180359 - DNA, 1707 bp, Klebsiella oxytoca
atgaacataaaaacagaagatattcaggattgtatacggaaactatcaaataatatccgagctgagaaaatagattataacagctacctcgcattatactctggtgaggataacataagaaatattaataataaaaacaataacgttatttatggacgcagaggttcaggtaaaacccatttacttaaagctctcgctgaaatagttgtaaacaacttcaatgaagaaaaaatattcccaatttatattgatttacgtcggatcattcctttaatttcatcaaccacaaccaatgctgaaattgatgccattttaatattcaaatatattatacaagaggtagcctattctatttatgaaaacatttcttttattaaaggatataatgaattcgatgaaaagaacaatcttttacaaagcactttagagactgaactcaaagatatttttgaacttatttatctcgaatttgatgggagaacattaaggaaatcaaacgacctgagagtttcagaagaagagattaaaagcttaaatggagaagtttctatctctaaggatatgcgcattcaagcatctaaggggacatctttaaaacataactcagatcaggaatatagaggtcacatttctatattacatattacaaattgcatcgaaaacctgataaaattatttgaattaaaaggaataatgcttttactggatgagtggtcagagataaacattggcatacaacctttacttgccgaaataataaaaaaaacattctcagcgataaatgtattcactaaagttgcggcaataccaaacagaacgaatttagggtataagactgagcagaagttttttggtcttgaagacggaggggatatatttagttatcctcttgatatgagatatgtttttgaagtaaataaagctcagacacgcgacttctttaatgatcttttgtataaacatcttacatcaattaatgaaactctcataacacaattactacgcaaaaataaaacttccaaagataaactaataaacttattatttgccaatgttgcactcaatgaaattttagttgcttgcgcaggaattcctagagatttcatgaatctatttcttaatagttatgataaatttatattatcttcaagttcaaccgctcaaagaatcagtgtaaaaaacattcgctctgctaatgctgagtggtatgaaaaggacaaaaaagagcaggttgacaaacataatattgagcgtcaactattaactgaaattgtccaagaagtaatagaaaagaaaaaatcaatgcatttcctgatccctgagaaacactctaataataaacatatacaaaacctcatagatttcagagtgatacatttacgtaagagtggatattctcatcaggatcattcaggagttgtttataatgtttactctgtcgattatggttgttataactcattaaacattactaaaagtaaacttgactcaacagtactgaatgatcttaacttacgtgaactacgtgaaatcagaagaatttcattagaagagacttttttccagcgtttcttaatggatataggtgaagcttttaactgtccccactgtaaaaaaccagttgatactaatcatctcgcttacatgaagcaaagtctttgcaataactgttttgaatatgttgaaaaacaaaatataaaaaactaa

SEQ ID NO: 180360 - DNA, 966 bp, Klebsiella oxytoca
atgacgcaaaaaggaaccccctcgacgccgcacgatgcggtatttaaacagtttttatcgcatcccgagtgcgccagggattttatcgagattcatctgcccgcttcgctacgccagctgtgtaatctgcaaacgctcaggctggagtccggcagctttattgaggcagatttgcgtgccagctactccgacgtgctgtggtcactgaaaacccgcgacggcgacggctatatttacgtggtgattgaacaccagagcacgccggatgcgcatatggccttcaggctgatgcgctacgcgctggcggcgatgcagcgtcacctggatgccgggcataaaacgctgccgctggtggtgccgatgctgttctatcacggcgcgaaaagtccctatcccttctcgctttgctggctggatgagtttactgatacgcagacggcgcgaagactttatgccgccgctttcccgctggtggatattacggtggtgccggatgacgacattatgcagcaccggcgcgtggcgctgctggagctgattcaaaagcatattcgccagcgcgatttacttggcctggtggagcgattagccgagctgttggttaaaggttgcgctaatgacagccagctgaaagcgctgtttaattacatgctgcagtgcggcgatgcgcctcattttggtgaatttcttcacgaggtcgagcggcgcgttcctcaacataaggaggtactcatgacgattgcggaaaggctacggcaggaagggagacaagaaggcaagttggagggcaagttagagggcaagttagaaggtaaacaagagggtagacaagaagaagcgttgcgtattgcccgttcacttctggagcaggggtttgagcgcgagctggtacggatgactattgggctctctgatgacgatctgaatgcattccaggatgcatccctcaagatgggggaaaattaa

SEQ ID NO: 180361 - DNA, 300 bp, Klebsiella oxytoca
atgaaagaattaactattggcgaaatggaatctatttctggtggttttaatctgctcggttttgctaacagcattaccagctttattgttgataatggaaactatctgagcgattttattacctcagcaggtgccactatcgccaatgccatcgttaacgataccgttgagttcgctaaattccttaccggcgcatctgactgggagaactacgttgccgcaagcaatgagaactggagcaatgctgtgcacaacctgtcgggcgagtggaacactttcactaacagcatcaccgcctaa

SEQ ID NO: 180362 - DNA, 717 bp, Klebsiella oxytoca
gtgggcgcaaaaactcaaatattactggtaatcgcgctgctgtccgggtcagcgcaggcggcggagcgcgtggatgcgcgccagcattccgccttctggctgtggtccggggtgaaagccagcaacgatctgcagaacgcgcagacggtgtatctgcatcagggcgaggtgctgacgcgcgcgggcgaggtcatattccagcgcctcggcctgccggtcagccgcctgacgtttcccgcaatctggcttaccgtccggtttaccacacttgatgtaccgcagacgattgtgccgcggatcgtacgcctgatgcagcgctggcgggcggctggcaatcaggtggttggtctgcaggttgattttgacgcagccacatatcagctcgccgactacgcccagtttttgcaacagctacgccagcagctgccgccagagttcgcgctgggggtaacgggcctgctggactgggctaaaaccggcgatattgccacactgaacgcgcttgcggttgatgaactggtggtacaaagctatcaaggacgccgcacggtggcgaattatcaggactatctccccgcgctcagccggctgcgtatcccgttcaaactcgggctggtgcaaaacggcaaacgcgatcggcaggcggaaatgcagctgaatgactccccctactaccgcggcacggtggtctttatgctcaacccggcgcggcgttaa

SEQ ID NO: 180363 - DNA, 1443 bp, Klebsiella oxytoca
atgctgatgcgcacggcgctcaacaaaagtagccagaacagcgtcgggcagtacggtgattttgatattgcgcggatcaatcgtgatgatgccgcacaggcgcaaaaagaagctcaagcctatttgcaacgctggcccgcagggctttatgccgactccgcgcgcaatatgctgcgccgcattaactggtatctgcaggcgtggccgcagctggccggactctatgagcaggccttccggcaggctgccgacgccggggaactgcgtagactggtgagtgaatatgataatgtcttcggcatgccgttctacgcgcagcccgttctggcagcattcccggacgcgccgcaggtcagctatgtcgaacttctccgcgccctgcgcctgaatgctgacaataagccaaccttaacccaggcacagcttgacgccagcaaagcggcgtttgagaagagcggaaatctgccgctgtggcgcgacctgcagctgcagctgtggagcgcgacgggcaacgatgccgccatcctgcaggctgtcacgccggcgaaaacgctgccggcgaatgatattctcgccttcagcgaacaggtcctctacggcgaagcgctaatgggacaaacacagtggcccgcggcgcgctctttttggcagcagctgctacaacttagccaaaatcccgagcaacagcagtatatccaggcaaaactggcggcaacgctggtctacagcggtaacgcggcggctatctttgccgccgatagcccagtgaccaatctacgctttcgctcccgagtgctgaaaacccaggcctcgcctgaactgctacgccaacaggcggccaacggtcccaataatgaagaacgtactatcgctctgcatacgctgctggtgcgggatctcacggaaaatcgtttcggcgactggctgaaagacaaaaagctcgccaccgccattacccagccggtaatcagcgaggcctttaacgacgtcaaccttagcagcttcgactgggatggcgaggcgaccgaagccggttatgcctgccgcagcctggatgacaccgtcaccgtgctcagtaaaaacgccgacgatgcccatgggcttaactgcctgggcgagttcttccgcaccacgcagacgcatgttgatctgtggaaagaccacgccggcaacgatatgctcgaggccgccatcaaccgccagcagcctctgggacagtacgatcgccaacgctattaccagcagattatcacctcgccgaaagcggagccggaagataaaagctatgcgctctatcgggcgattctctgttacgccccctccggtagcaacgaatgcggcggcgaagatgtcgaaaaactgcagcgtaagggctggttcacgcagttgaaaacgcagtatccgggaagcccgtgggcgcaaaaactcaaatattactggtaa

SEQ ID NO: 180364 - DNA, 696 bp, Klebsiella oxytoca
atggtcaggaagacaacgtttaccctttcgctctgcgccctgctcgcggcagccgctcaggcatatgcttctgctgatatcgaagattgctcgtggagcgacccgctatgcctgctaaaaggcgaacctgtactgacaccgggaaatgactcgcgggacaacttgctgcgcctgctgagcgaagcgaaatctttcgccctgcccgttcaggccattcccgctgatgtcagccgtacccgcgatgtttacttcgcctggcatcctgagtgggatagcgcgccgccgcctcccgcgccgccggcgcaacgcgaagatgaaaccttcatccaacaaatggcggcgctgaatatcgatccggcgcagatcatgccggccaattcggctgaacggctgggaacatccgactatgaactggaaaaccgctttgtcagcaacacccttgccgccgtcagccagttcaacgccgccctgctcgccgcgccctctgtgaccccgcagcagcgtcatgacctggcgctggcgcggctgaaactgttttatggcgccaatatcaccgcagtcgctgatatcctcaatagcttcccggcagatgcggacgccgacttattcgcttattacctttccggcatcgcccacttctatggcggcaattacaccgccgcgacccacgatttcactctgttgcgggagagttag

SEQ ID NO: 180365 - DNA, 714 bp, Klebsiella oxytoca
atgtccgagccaggggcgagaacaaatgcgctaattaaattcggtactgtaccaggcacgccggttggtgaagccgttcgaatgatgatgcagttcaaatctttcacagcgtcatttatgcagaataccctgggaagggagttgtacggccgtggttacacgccggcggcccttgggcagagtaagctaccggcgctggccaaagcgatgtttgcaggtaacggagaatggcagggatttgctcagttgttcgtatggatgactgcctttggatatctgtccatgcaggcaaaactcatggcaaaagggcaaacaccgcgaccactggatcataaatcagtcatggcagcgatggcacaaggtggtggtgccggcttgatgggggatttccttttcggcgaatataaccgtttcggtgggggcatggcatccagcctggccgggccatttgtaggatatgtggatcagctacggaacctgtacctgcaggcccgagatggcgatgcaaaggccggagattttctccgtttcggtatcaaccatacaccgttcctcaatctgcttggtgtgcgtcagggaatggactatcttattctgaaccgcatgcaggaatggttatcacctggttctcttgagcgctatgagcagcgcgtacagaaagatcagggtaatacctttatgttaccgccgtcgcaattcatgttagggaaataa

SEQ ID NO: 180366 - DNA, 312 bp, Klebsiella oxytoca
atgcgcaatttcattattttgttttgcttggccttacctttttcagcatcggcgatcgtcatggggggcagcaatctcgggtttggtgggtatcctgccttctctgagatggagccatccccgccatacactgacgatcagtatgcttgggaaaactatcgccgccaggttgccgattatactgagaaggcaaagcagtatctcgaagactccaactctgatatgaaaaggattcaagagtcacagcaggaagcgatagacaaggcaaacagagttgtcgaagaatataaccgcaaggctaaagattactaa

SEQ ID NO: 180367 - DNA, 837 bp, Klebsiella oxytoca
atggaaacggcaggtgatttcagtgatgttactgaacttcaaaagtatatgaacttttcaaagttcatggacctgattgaaacaaataaaatatttctttcaaaagcatctggttttgaagataagaatgaaggtggtttaagtttagaattcaggtttttgaatgatggtagtgcaatgatgttagatgttgcaatgaatcatatatttccgagtgttagggaattatctccagaagaaagggttgaacataacaagaaaacagagcaattatttgaaataatagaaaaaagaattaatagtactgtctttggcgactttccgaataacgaatttagctatgatgatattaacaaacaatataaagaatggattgatgtgagctgctggcatgcaaacatgcatgagagcatggcgatgtggaaaatttatggtgaatctgaaagttcggtatgcatagttaccagtcttgaaaaaataaaatcaagttttacccctcccaacggctataagatgatcatcgctaaagtcgaatacatatctcacgatactgagtcgtttaaaattgaacacgttctagcccctttcatgcacaaatgtaacttttatacatacgaacaagaagtcagacttattggttataaccctctctgtaagtttaaagaacagagacatgattttggtacaaaggtaaatctggatatcacaaacttaatacaggagataagagtgtcaccttatgcacctaactggttttttgagttagtgaaattagtatgtaaaaaatatgacttagatataccagttaaccgttccaaaatatatgggggtttataa

SEQ ID NO: 180368 - DNA, 1446 bp, Klebsiella oxytoca
atgaatgaggctatacgcagtacgacgctggtgattcgcgatgtgttgctgtttgatggcggcggcgagccgccggtcccctcggatgtggcgattgctggcgaatatattacggccatcggagctccgggttcactggtcggggagcatatcgttgaggcaaacggtctggcgctggcgccggggtttattgatgttcatacccatgacgaccgggcgttgttaatcccgggaatgatggccgcgaaactttcccagggcgtgacgacggtgattaccggcaactgcggcctgagcctggccccggcgcagatgacgaacgttcccgcaccgctggatctgatagcgacgccagagtggctacgcttcccccattttgccgactatctggcggagctggccagtagcggtattgccgtcaacgccgcctgcatggtgggacataccacgctacgcgccagcgtgatgggcgattcgctggatcgtagcgccagtgaagatgagtgttaccgaatgcgggaactgcttgaagagtctcttgccgccggtgcgtttggcttctcgaccggcaccttctatccaccggcccgggcagccactctcgatgagattgtcactgtggctgaaccgctggcgcgctacggggcgttctacgcgacccatatgcgtaacgaagctgaagcggtactggactcgcttgaggaaacctatgagattggccgtcggttgagagtgagggtgttgatttctcaccataaattagccggagtgaaaaaccacggtcgctcgcgggaaacgctggccagtattcaggccgcccgcgatcgccaaccggtatcgctggattgttacccctataacgcctcatccacgaccttaaatccggcctttatcgccagagcggccagggtgctggtgagctggtctgctccgtatccgcagcatgccggaaggctgctggctgagattgcggctgaatggggtattagcgatgaagctgcagcgcagcggctgatgcctgccggggctatctatttcatgatggatgaggacgatgtccagcgtattctggctttcccgacaacgatgatcggctctgacggcatgccacacgatgagcatccgcacccgcgtttatggagtaccttcccccgcgtgctgggtcattacagccgcgaactggggctgttcccgctgcacacggcggtcaataaaatgagtggccttcccgctgctgagctgggtattgaccggcgcgggcggattgccgctggatattatgccgatctggtgctgtttaacccgcagacggtaaaggacagcgccacttttgcgcagccgcgaacccgggctgaagggattgagaaggtgtgggtcaatggccacctggcctgggatgatggtgaaattcgtcatcagacggcggggcaggtcattcaccggtga

SEQ ID NO: 180369 - DNA, 786 bp, Klebsiella oxytoca
atggactttatgattagcggaaaaacggcgctggtttgcggcgcgggcagcggtttagggcgcgctatggctcaggcgctggctgctgaaggggtcaaggtagcagttaccgggcgcaatgaagaaaaactcgctgagacggtggcgctgattactcgggccggcggggaagcacgggcctggcaactggatctgacggttccgcagacctttgacaaggtccttggcgagatacgccagcgcttcggcgctatcaccattctgataaataattcgggtggtccctccccttccactgcttctggcgttgacgcggcggtctggcaacagcagttcagtgcgatggtcagttcgctcattcagttaaccgataaggtgcttccagatatgtacgcggagggctggggacgcattattaccagcacctcttccggcgtggtcgcgccgattgcccggctgggagtatctaataccctgcgtatggcgctggtaggctggtcgaaaacgctggccgcggaagttgccgccagcggaattacggcgaacgtgctggtaccggggcgcattgccaccgagcgcgttggtcagcttgacgctgcgcgcgccgggcgtgaaggcgtgaacgtcgagacggtacgcagcaacagccagcgaacgattccggtcggacgctacggtcgtccggatgagtatggcgcggcggcggcgttcctggccagccagcaggcgtcgttcatcaccggcagcgtattgcgggttgatggcggcatgatcccctctctttaa

SEQ ID NO: 180370 - DNA, 939 bp, Klebsiella oxytoca
atgaataaactgagcgaacaagcaaacggggtttacattatttccgcgacgccgtttaccgaaagcggcgagctggatttagccagcgctgacagcctgaccgacttctatctcgaaaaaggcgtcagtgggatcaccatccttggcatgatgggcgaggcgcataagcttactgaagaggaagcgctgagctttatgcagcgggtgctggcgcgggtgcacgggaaagtgcctgtggtggttggtgtcagccatgcttcccaccgccacgtggagcgtctggcgaaaacggccatggataaaggtgctgccggggtcatgctggcgccgggcccaaatctggcaaccgatccgcaggtggaaaactattttcttagcgtcgcgcagctgctgggcaacgaggtgcccatttgcctgcaggacttcccgcaatcgaccaaagttcacacctccgttcctgtgatgttgcggctgatcgaggcgctgccgcaaatcgtgatgcttaagcacgaggatctgcctggaatgcgcaaacttagtcagcttcgcagtcagagtgaggtgcttgggctgcgccgtatcagtgtgctggtgggtaacggcgggctctttttgccgcaggaactggcgcgcggagccgacggggcgatgaccggctttgcctggccggaaatgttagtgcaggtgtgccaggcctatgccgagggtaatccggggcgcggcgaggatattttcgattgctatctgccgctgctgcgccatgagtttcagtacggtattgggctggggctgcgcaaggaggcgctgcgtcggcgcggggcgataaaaagcgcggctgttcgccagccggggccggttctcgaccacatcgacctacaggaactgagcgggttgatggctcgcctggagcgtaaactggcagacaagggactgaactga

SEQ ID NO: 180371 - DNA, 678 bp, Klebsiella oxytoca
atgagtgaaacacagactgatgtagacaatattttcctcaattcgggcggcgaggatctgacagaagcgacctatcggcagctactggaaatgatccagcagggacggatccccaccaatatgccgttgcaggagcggacactggcggccgcactgggggtctctcgcacgccgctgcgtgaagccttcagccgcctggtcggcggcggcttcgcgacccgggtcggtcgagggcagctcatcgttaaagagcccacgctccgcgaatatctggagatcctgcaactacggattcttcttgagggggaagcggcgttcgccgccgcgacccgtatgccgacgacgcaggcgcaatcggtgattagcgcgctgaccgcccaccgccaggcgcgggacttttccgcctctgagaatcatcgtatcgataacctggttcaccagaccattgccgcccactgcggtaacgtcatgcttgagagcatgatttttgatttacgtattaaagcgcgcacttttgaccagaacggcaccgtcgcacgcttcgagcccggctgcctggagcatatcgcgctaatggaacgcattcacgccggtgatgcgccgggggccagagaagcaatggtctttcatctgacacaggcgcgggccggtatcgtagcccgatttacggcaatctga

SEQ ID NO: 180372 - DNA, 960 bp, Klebsiella oxytoca
atgcgctggctggaagttatctctccaggattattgactaccgtacaggatgaggggcgtcgtggttttgtgcatttgggcgtaccggcatccgggccgatggacatgattgcgtttcgattagcgaatgccgtcgttggaaatgggccggaatgcgcggcgctggaattaaccgcgcttggtgggcgataccgggtgatgggtggcgaatgcatcctgtgcctcggcggtgcagtcgacgcgcaggccgatggtcgggtcctggagccctgggtcggccatcggctggcggagggcagcgaactggtcgttggacgcatacagcgcgggctgcgcgcctatctggttctggctggtggtgtcgatgtggaacctgttttgggcagccgcgctacgctgacccgggcgtcgcttggtggtctgaatgggcgggcggtggcaaaaggtgatcgcttgccactggcggaacaaaccgctatcggacgacgccgctgcttgcacgcacatcttacatcgttgtacagcagcggtccgctatcggtggtgatggggccgcagcaggaggccttcaccgccgcctcgctgctgacgtttttacatggccgctatcgggttagcgcccatgcggaccggatggggtaccgcatgtcgggcccggcgctggctcatttgcacggggccgacatggtttccgatgcggtagtacctgggagcattcaggttcccggtaatggtcagccgattattgcgctgcacgatcgtcagaccacgggaggatacccaaaaatcgccaccttaattggggcagatctgccgcgcgttggacagctgcgaccggggcagagcgtggcgtttcgtgcagtcaccgtaccggaaggcgttgcgcgctggcggcgtttgcaagagggcatcgccgcctgtttacagcatattcaatcaacggaagtgagctggctatga

SEQ ID NO: 180373 - DNA, 717 bp, Klebsiella oxytoca
gtgaacggttatccacgttttatcgcggtgggcgaactggccctgttagttgaatttggcgaccgcatcgacaaccaactgaatgcccgggtactgacgctggcggcagcattgaacggtacgaccggcgtgagcgaaattattcccacctatcgctccctgaccgtggtgtttgacccattaacagttacctgtattgagctttgtgaacgcgtggcgcttctgcttaatcagcttcctgctgcacattcagcgcgtcgccgctggcgcgtgccggtgtgctatggcggtgaatatggcgaagatttgcctgcgctggcgcaaggacatgggctgagcccggagcaggtgattgatttacacagcagcgcgcgctatcgggtttatatggtgggctttatgccgggatttgcctatctcggtggtctgcctgaaatgctgcataccccgcgtcgttcgtcgccgcgtgcgatgacgccggcttccagtatcaatatcggcggccagcagacggcaatcagctcggtagcgggccccagcggctggcaccttattggccggaccccctggcgttcatttgatccgctgcgacaaagaccatttttgtttcaggccggggatgaagttggctttatgtccattactccggcggagttcgcccgactgagcgacgagtgccgtgcggcggattggtaccctgaaccggaggtagcgtga

SEQ ID NO: 180374 - DNA, 1002 bp, Klebsiella oxytoca
atgcgtcaaatgcagggtaaagatgtcactcttaacaccattcgcaaaacctacggttcaacaatcgcgctgccgcgtatcgatcttcaggtggcgcgcggtgagttctgtacgctgctaggtgcttccggctccggaaaaacgacgctgctgaaagtgattgccgggtttgagcgccctgatagcggcagcgttcagattgccggtaaggacgtgactcgcgaaccaatttccgaccgcaacatcggcatggtgttccagaactatgcgcttttcccgcatatgtcggtatttgagaacgttgcctttccattacgtatgcgccgcctggcgaaggtcgatattgaacggcgggttggtgaggcgctggcgctggtcagtcttgacacatttcgcaaacgcctgcccggagagctctccggtggccagcagcagcgcgccgcgttggccagggcgctggtgttcaatccggatattttgctgatggatgaaccgcttggcgcgctggataaaaatttgcgccagtcgattcagattcagattaagcaactgcatcaggaactgggcctgacggtggtatttgtcacccacgatcaggaagaagcgatgaatctctccgatcggataatcattatggataaaggggagattgttggcgatggttctccgcagaccctttatcgccagcctgatagccgctttgtcgccggttttctcggcgagtgtaatttcattcctggcgagcgtgacgggacgctgggtatccggcccgagcatatgctggttggccgcgccagcgagagggcggcccgacgctatcagggcaacattgtgatggcgaccttttgcggcctgcactggaagttattgattgagtatcaggggcagatggtcgtggcctacgcgccggtcgatctcccgcccgacgagcgtcattctggtcagaccatcagctttggctttcagccggaactggcgatgaccttcagggagtccgagtga

SEQ ID NO: 180375 - DNA, 1710 bp, Klebsiella oxytoca
atggtggcaacgatattgaccgacaaccttaccccatcccggcggatccgatggcccgggctggccctcgtggcgacgctaccgttgctgttttttttactactgttttttgtctggccgattgccgggttgcttaaacaaggtttcctggcacaggggcactttagcctcgaaaactatctccatctgtgggatacgcctatttatcgcattgtgctggaaaatacctttgttatcgccgtggcggtgacggccggctgcattgtgatgagctacccgctggcctggctgatggcctcggtgcgtccggcgatggcgaagctactgttttttgccgttctgcttccgttctggtccagtgccctggtgcgcacctcggcgtggatagcactgttgcagcaaaacggcccgctgaataatctgttgatgaccctgcaaattacttcacagccggtggcatttctctataactttaccggcgtgctgattggtatggttcatgttctgatgcccttcgtcgtactgccgctttacgcctcattccggtcgctggacagctcattgctgcaggcggcgcaaagtttaggcgcggattcgctaagcgtctttacccgcatcatcctgccgctgacgcgtcctggtgttgtcgctggcgcggtcatcgtgtttatgaacgccgtcggttactacatcacaccgtcgctgatgggcggaccggcgcagcgcatggtagcggagcttatttcgcacaatattaccgacgagctgaactgggggatcgccgccgcgctggcctgcgtattgctgatcaccacgctggtcgcgctatggctgtttaatcgactgtttggtctcgataagctgatggcaggttccagcggtaaagggagccagtctgttgtcgtggcgcagcgcagcagcggtgggcgtattagcgcaggcgcaggcgtgctggtggcgctgtttcttatcctgccgattgttgtcgttattccgatgagtttcggtaccgccagcttccctacgttccctcctgctgaatacggcatgcgctggtacgttaacttttttaccgatcgtaaatggatgctggcgctggccgagagcgtgcggattgggctgatcgtcaccattttgtcgatggtgctgggggcgaccgccgcgatggggatccataagctccgttcgccgcgcaaaagctggctggagacgctgttcatcgttcccatgtcggtacccgccattattacggcagtctcgctttattatctgtgcggacctttagggctgatcaacaattcggtagcgctgatcctcggccataccgttctggccaccccttatacctttattacgctacgtgcagcgctgaagggattcgatcccagccttgagctggcggcctatagcctcggtgccaaaccctggcagatgtttcgccgggttatgttgccacttctgctccccggcatgattggcggggcggtgtttgccttcgtaacctcatttgacgacgttgtgatgtcgctatttctcaccactatccgtaatcgaaccttgccgaaactcatgtatgaaggactggcgttcgattttgacccgacggtgatttcagcttcctgcgtactgatcgcggcgacggcggggatcctgattttgcagagtctggtaaaacgtaatggaggcaaacatgcgtcaaatgcagggtaa

SEQ ID NO: 180376 - DNA, 1050 bp, Klebsiella oxytoca
atgaaaccatcgatcaaagcaggctgtctgacattgggcctgttgaccatgagctatagcctgtccgccagcgcggatgagctctattttgccagctggggcggggcctatcaggatgcgattcgtgaagcctggctgaagcccttcaataaagaaaccggtattgatgtcgtggaagataccgacccgcaggtcagtaaactaaaagccatgcaggataccgacaccgtgtcatgggatgtggtgactgagaatagctcgcgcctggctcgcggcattaagctcggggtatttgaaaagatcaccccggaaatggtcaaccaacagcatgttatccccggcgcgcgtaatgattacggcgtcccgtctgagattttctccaccctgataggcttctcaagtaaggtcttcccggaagggaaaccgcagccgaaaaccttcgctgatttttgggatgtgaagaaatttcccggtaaacgcaccttgcaggatgaaccggccacagttatcgaagccgcgctcattgccgatggcgtcaagccggaagatgtctataaaacgctcagcaccccggaaggggtcgatcgggcgatgaaccagattaagaaaatcaaaccctatgtagcgaaatggtggaagagcggtgcggaaccggtgcaggcgctctccagcggtgaagtagtgatggctttgggctggaacggccgcttccagtcgggtattgattctggcgtaccgatcaaaatgtcatgggatgattctgtcgcacaggttggctactttgcgctggtcaaaggggcccacaaccgcgacgcggcgctgaagctactcaactatattatctcgccgcagcatcaggctgagttcagtaagtacatcgcctatggcccgaccaccagcgaggcgatgcagtatatcgacaaagcgcgtcaggaacgtttgccgtccaccccggaacgattgcagcacactctgtttatggatgccgcatggtgggataaaaatggcccggccatcattgagcgctacaaccaggtgcgtgcgcaataa

SEQ ID NO: 180377 - DNA, 777 bp, Klebsiella oxytoca
atgcaagaagtggacctgaattcagatctgggtgaaagttttggccaattcagcgttggcgacgatgaagccatgctggatctggtgacctcagccaatgtcgcctgcggttttcacgccggcgatgcgctggtgatgcatcgcaccatcgcccatgccagagcgcgcgggctggatgtcggggcccatccggggtttcttgacctgtggggttttggcaggcgaaccataaccggcgatagcccggcggatgtcggcaaaatggtggtgtatcagttaggcgcgatgcagtcggtggcgcgggtctgcggccatgtgatgacccacgttaaactgcacggcgcaatggcaactcaggccttcaccgacgatgcgttatcggaggccattgtcagcgccattcttgccgtcgaccgccggctggtgctggttaccacgccgcacaatgcgacagaacgggcggctcgcaaggccgggctgcgcgtcgcctgcgaagtgttcgctgaccgcagctacggtgaaaacggattgaccctgccgcgacatctgccggacgccatcatccacgatcccgaacgcgccgccagccgtgcgctgcaaatgattgaagaacaggcgattcgtaccattagcggggccaaaatcccgatgcccgttcacaccctgtgtgtccacggtgataacccgcagggcgtggccatcgcccgcacgctgcgcgaacgtctgactgccgcgggcgtcgtcattcgcccgcttagccaactgagtcatctttag

SEQ ID NO: 180378 - DNA, 924 bp, Klebsiella oxytoca
atgaaagacaaggttgaatgccgtgaaagactgcgcggaattttcaatattaccgtgaccccttttaccgcacagggcgaaattgatttcaccgggctggcagccaatatcgagcgcgtcattgacctcggctatgacggcatcctgattggcgggacctatggcgagttcccggcgttgagcgttgaggaacgcgtcgctattttccgccacgtcatgcaggtcgtgggggatcgcgttccggttatgctgtgcagcgccgggtccgacgcccgggtggtccgcgaactgaccgctttggcgggcgacctgggcggcctgccgatggtcacgccgccttttgtatcggaagtgactgatgcgcaaatcgttagcttctttcaacagatggcgccgttgtcgaagaccggtattctggtctacaacgcgccgggtattggcataaccttgcccccggcactgttggagcaactggcggatatcccgcaggtcgtgggtattaagcagggtgatctcaatccgaccgtcattgaccaaatcgccaatcgcttaaccggccgcctgcgtctgttctgtgcctcagatctggcgtttttagggccaatgatgtgcggcttcgatggtatcagcaccaccaacagcggtgcgctgccggagctggtgttggccagcttccgggcgctggaacgcggggatgccgtcaccgccagagaattacatcgcctatggtacggcttccgcgcgctggcgcgtcgccacggccagccgcaactggtaaaagccgcaatgaatctgcgcggcttcaacggtggacacgtgcgttcaccgctgatcgatgtcaccccggaggtgattgccgaaacacaggcggagcttcagcgactcgccgccgacgcgcgaagcggcgtcactctgccggcctga

SEQ ID NO: 180379 - DNA, 1254 bp, Klebsiella oxytoca
atgtcagcacaatttctcgcgccgcgaatgcggcgagttcgtccgtcgccaaccgccgccatcgccgaccgggtccgcattctgcaacagcagggaatcgacattatcagcctcggcctgggcgagctggactttgccacgcctgcggcgatcggccaggcgggtatcgatgctatccatcacggtgagacgaagtacaccgcggtcggcggtaccgtcgccctgaaagccgccattattgataaattcacccgcgacaacgacctgcacttcgcctcccgggagattattgccggcacgggagctaaacagcttatttttaatgcgctacaggccacgctgagcagtggtctggaagccattattccctcaccttactgggtctcctatcccgatatggtggcactggcggatggcgatcccgtcatcgtagcaactcaggaacaagatggctggaagctcacgcctcagtctcttgccgcagccatcactccccgtacccgctggctgatcctcaactcgccctccaacccaacgggggcgctgtacagctgcgaagagctgcaggcccttgcggaagtgttgttggccgcgccgcaggtactgattctggcggacgatatctatgaggcgctgcgctacgacggtgcccctttctgtacaatggctcaggttgcaccagcgctacgcgagcgtattctgacggtgaatgggctctcaaaagggttttccatgaccggctggcgtttgggttatgccgccgggcccgcatggctaatttccgcgatgaccattcttcagtcgcaaagcacctctaacccttgttcgctcgcgcaggcggcgggcgtcgcagcgttgacccagcccgccgacttcctgccgcagtggctggctatcctcggtaaacgtcgcgatcgggtgatggcgctgatagaccaggtcgacgggctgagcgccacaccgccgcaggccgcattttatgttttcgcaaattgttccggccttatcggtaaatcaacccctgagggcgttcgtctcaatgatgacgttgcggttgccgattacctgttaaccgaagctcatgttgctactctggccggaacggcgtttggtacaccggggtatctgcgtctcgcttacgcgctggatgatgccctgctggaatcagcctgtcagaaaatcgcaaacgcctgcggggaactgcgcccagcgctgttagaacattcaaccgttagaaagtctgtactaacctaa

SEQ ID NO: 180380 - DNA, 150 bp, Klebsiella oxytoca
atgaaaaacatcatcaaagcaaaagcaacctgtaagtttccgcttgatgagaccagtccggagttctactttccgtgcttaaggaaatgggcggatgggaaagcatcaaaatattacgccgttatgcccagccggcgtctaaccatttaa

SEQ ID NO: 180381 - DNA, 258 bp, Klebsiella oxytoca
atgatgacttctgagaatagccttgagcaagtgtatgtctggatctggctgcctggagcaacagaacccgttgtcgccggagtgttaagcagagacaacggtcggtttattttcaactacggccgcagttatctggagcggaaagaggcgatagcggtttatgtgccggagcttcctttagtcagaggcgcaattgtacctgcccctggtttgcaagtgaagtggacagaaaactcttctggggaaggatgtttttaa

SEQ ID NO: 180382 - DNA, 582 bp, Klebsiella oxytoca
gtggctcgtcctaagagtgaagataaaaagcaagcgttactggaggccgcaaccgccgcctttgcccaatcgggaatcgccgcctcaacctccgccatcgcccgcagcgccggggttgccgagggtacgctgtttcgctactttgccaccaaggacgatttgctcaacgagctttatctgaccataaaagcagacctggttcagacaatgatagcgggtctcaacccgaacgagacccggccaaaagagaacacgcgcaatatctggaatagctatatcggctggggcgtgcgtaaccccatggagcataaagcgattcgccggatggcgctgagtgaacggatcaccgacgaaacccgcaatcgcgtccaggagatgtttcccgagctcaatgaactgtgccagcgctcaatcaaacccgtttttcaatccgacgagtaccgtaccttcggcgatgcgttgtttctttcgctggccgaaaccaccattgaatacgccagccacgagccggagcgcgccgtccgttttgtcgagctgggctttgaagccatgtggcaggcccttgccgaggacaatagctga

SEQ ID NO: 180383 - DNA, 525 bp, Klebsiella oxytoca
gtgcgaagccctttaggctgggcgggtcatttagcctgccagcgcggagaaacctggcagtggcggggtttaacctttcgcgcgctctggccgctgcctggagcgacagcgcaggggaataatcgctcgtgcgtggtgcgtattgatgacggtaaacacagtattctgctgaccggggatatcgaaacgcctgcggaacgggcgatgattagccgctactggcagcatcttacgtctacacttatccaggtcccccaccacggcagtaatacctcgtcgggaatcgccctgctgcgtagcgttggcggagaagctgcgctggcttccgcttcgcgctataacgcgtggcgcatgccatcaaccaaagtgattcagcgctaccgaaaacagagttatcagtggttcgacacgccgcatcaggggcaaattacggtggttttttctccggatagctggcaaatccatggcttacgggatcaagttttaccgcgatggtatcatcagtggtttggcgggaaggcgtag

SEQ ID NO: 180384 - DNA, 594 bp, Klebsiella oxytoca
atgctggaaaatattaactactcgctgtttgcattcctcaatgccacccccgcgtcgccgtggtgggcaattgaaatcgcgacgtttatcgccaaagacctgattattattgtgccattattggtgttcgccttatggctttgggggccaaaccagcgccagctagtatttaaggtgatgatggcgctcgcgattagcctcacgctttcatggatattcggcgtgttttttccgcatgaacgtccgtttgccgccggtgtgggctataacttcctgcatcattcacccaataactccttcccaagcaatcacggtactatctgctttacctttgcgctggcctttatgttctggcaccgcctgtggtcgggcgcgctgcttatcgccgttgcctgcgcgattgcctggtcccgggtctatctcggcgttcactggccgatggacatgctgggcgggcttctcaccgcgatgatcgcctgccttagcgcccaactgctgtggcaaagcggcggaaaaaccctctatcagcatctgcagcggctgtaccgcctgttcttttcgctgccgattcgcaaaggctgggtgcgcgaatag

SEQ ID NO: 180385 - DNA, 240 bp, Klebsiella oxytoca
atgcttcgacaatcagacatcaaccaggcatttcgggaggcaattcttcgtaactcgaaaggctatcagtatctacacacacgagacttcatctcttgtttgatgctgcggggcattcatttctcagagtcagaagccaatcgctggattgagcgttatcagagctgcttcgctgacaaaacgccggaccataccgagaatagattatggattctgcggaatatggggagggtgatgtaa

SEQ ID NO: 180386 - DNA, 4056 bp, Klebsiella oxytoca
atggctgcagatgaactgaatccgccgctgggtacgacgacacctgaaatattcatggataacgtcaagcgcgctgacgaactggtgaacggtccggccggaacggttgacgaccgcggcggggaaccactcgatacctggcgccagatgatggcaaagaatgatgaggtccggcagaacatcattccgctcggcaagcaatacgttgatttgcctacagcgcaggcggatatcgcgaacatacctacaggcagcttcgtgtttgtgagaagcgcggaagactcacgaatagccaacgagtaccagaatgtggcgggtacgctgacggccaccggtaagtttttcatgtcgggggaaggagtattacaagcgatgtcccccgctgtgaaatcagccggttatgcggcattgagggcaaacgccgctgcgctgaaaaccacagcaccagaaatgcagactcgccttcgtgtttccagcgacttcactcaaatcctcgccacgaagaactttgacgggactgtagatgttgctttttctgctgactatgcggacccggtgatgctgaagctgggccatgctgcatggtcgagcacgttctccaactgcacaataacggtgactggtaacgggcgaaaactgtttgagcgcgtgttttttggtggtgaatcgctggaaaatggtgtactgaccacgccgtaccaggagtttgcgctctctgcgttcaccgtgtcctcctctgcgaaacagccgaacggctggacgctgtacatgacgggaactcttccgggtccgctgccttctgacacgtcccgcatgattcgtgaccgctcactgagtgtggcatcactactgccgggcgggggaggcaccgctacgactgacggtgtgagttataacgccacaacctcacgtctggagttcactgtcatgtcagcaggcattaccgctgccggatttgaggataccgccgctggcgctgagtcgtacatgtggtcgctgtatgccgggatgctcctaagccagcaaacgtccgccacgcaggaccgcccggagtattttgttttcttttccgacgccggagctgtaaccgtgacggcaaccgacaaaatcagcacgtcattcaccgtgtggaaaaagcctgttactgcgccgtctgaatcccgttcagtgaaaaacgccgcagacatcagcgcaacccgtgatgacctgattaaaaccctcatccgtgagaacaacgaaaaaatgaataccttcagcgctcaccagggcgcttaccgcatcaccggagctgtcgcggcatactcggcatcgattccatttaacagcgtacttaatctgtccggattatttctcgccactaacttttatcgcagcgtaatcagtatttcagacagcaccgggacggtgaaagaaatcactattctggatggagaggaaattactgcaggggcaatctctacgccgtatcaggatttcaccatcgacccaacggtagcctcatcgctcaccactatcggtaacggcgtggcagtgggttttaaggtttcgctcccgggcgccctgccaactgacacgacccgcattatccgtacccgcgatgggtcactgagcggggcgcatattgatctgattaacagcgccactacagacagcgtgacgtacaaagcgtcaacgggtgaactgctgattctggcgatgagcacgaacatcactgctgctggcatgacggtaacgctggaaaacgcgctggcttacgtgcttgataaataccgcaacacggtattcagccagaaaacggccactgctgtcagcaagccgatggtcacgcagttcgccgtcaatccaggaacactgactgtcacatccaccgacagcgtgaatatttacctttcattcgacctgtttgcacggccgggagagtctgccgcgtcgtctgcctacaaacgtttttccacggtggtaaaaaataacctcccggtagccctgacgaatgtcccgattgaactgaaatgtagctttgcgcctggtgaggctgtctcagaccagtacattgtggttgaagatgaaaacggcaatgcgttcctgccgcagtggtctgatgcgccggatttcaaccgccgccgcaatggctccctgggttactggggcgatggctccctgcgggctggttcgctcgttattatggactcactggcggcaggggtctctaaaaaatacaacatccgggtttacacggtgcgccagcgatacagcatctattcccgcgcagtacgggagtcctctacctccctgcgtgtcagtgcagatgatggcaccacactgacattcgacagctatcgcaactggctaccgtacaagctggggtcaggaggaaaagactacacctcgatcgcggaatttgttctgacgcgacgcgcgggggctggcggggctgcgaccgatttctcggcgatggccactaacgacccgaccgcatcctatcgcatcgtttctgatggcccggtgtttaccgaggttgaaactatcagctacagccagatttcagcaacgtacccggagttttccagccagtttctcaaattcacgacgaggacaaaggttttccagaacggcatgattaaaactgaaaacgttatggcggtggataaagcgatcccggcagatgtgcttttcggtgttcgtatgcgtatgaacctgatttccaccgcagccaaaacgacaaaagcgaaccacaatgttttgtggtccgacaactcagcaaaacagagcctgtcgctgatttacgctaacggtaacgcccgtcgcgatacgacagaaaccatgcctgtttacaacgttgcgtccgccactaccggtaacacctcctatgcaaggcaggatggcggagcggtatcgcctttcaccacgaccggggcagtcccgcagggctgggcgtggagtaacggcttcctgattaacgtcaaagagcaggcagctaataacgacgaccttgctaatcgcgttcagaatccgccggtgggatttgtggctcgtaacacaaccacgcagtacgcccgcacccgtgcactgatgaaccacatcggggatatcgtcgagggatacaccgactggtgggataatgaggccaccgccacggatacgggcaacggcgtcatcaacaccctgggcggtaaaattgtcgccatggtgagaagcggcaagggggattttaactccgtatacgctctctttgaggcgcacgctgatgcgcattacggtggcgtgacgaatatcaacatcggggaagcggttgacctgaaagggctacagtttatttcccgcactatcacgccggtggtgtggtggctgtataaactggcggtgaaaaacggcgatacggcaaaacaggcagcgctgaaaacggcaatcggcaatctggcgaatacggcaaaaatccagtacggcggcacacagaacggcaacagcaacttttatgcggctgctttccgtttgtgggcgatggccttcgcggttggtctggatacagacggcagctacaagaccaacatggaccgtatcgacacgctgtacaccgatgctaccgcgaccggatttgccaacgtgaaaaacatcatcacggacaacaaaaacgagtcggtatcggctgcgcggtatctggcctaccagtcctacgcgatgaacaactatgtgctgggttgccgggcggccgggcgcacaccagtagtcgatatgacaacgacctggctgaacgcgatttcagccgccggcggtctgtcagagtttgactattgcatcgcagagtcaagacgcgggacgcctaccacagtggcgtttttcccgtctctgctggcgttcaacggtgacctttctacagttgaggcatgccatcgactgctggacgggttcgatgaatacgccagcggatggaacgggattgagtacaggctgtgggatctggaataccaggtggttcgtcagacctctttttcagagttcggattcatggtgaacgttttcactgatgcgtacatggaatggtggtttctgaataactga

SEQ ID NO: 180387 - DNA, 399 bp, Klebsiella oxytoca
atgacttatcttaaaaaagacacattaaatcccagtggtgagaacattttgctgtttgaattatctgcttacagtcgaatgcaatatattgaatttatggttgaagaacggaaagctttaccacctgagggaagcactcctgaagaaaattttaaattggccaccttgttgactatgcgtgatcaggccatgcttgtcgctttatccttgagcgaggcagacgatgagaaccgtgagggaaaagatattttccatgaaatcatgcgcaaatatccaccgggattactgggtagtgcagccataatggtccggatgctttcggggatggttcctcccgctattgatgaaactgaagaaactattaaagaagaggaagaaccggatctggaaaagtcctga

SEQ ID NO: 180388 - DNA, 300 bp, Klebsiella oxytoca
atgaagaagctgattattgcatttggatttgtactattggctggctgcgcaaccgtaggcaaagacttctccgagagcgatgtcgcgtccattcagaagggggtgacaactgagcaaacagtattatcaacctttggaaagcctgccacagtaactgctgactctgaaggcaataagatatatacctggacctatgctcacgcaacggcatttagcgtagggcagggcaaggcgttagtggtgaaaataaacaaagatgggattgttgattcttatgttgttagtaagacgcaaccttaa

SEQ ID NO: 180389 - DNA, 249 bp, Klebsiella oxytoca
atgagttatgaaatgtatgaagtggtcaagcagtatctctttgaagtccatggagtgggacaagtaagggctgagatactaaaaacaattaaacctgaaataaacgctccgtatatgtggcgagcaagccacatatacgatggttatgctcctaatcacgggaactcattagaaacagcaattagtgaattaatttattatattgagcactttgatgctgattcagctgaacctgatccaaactattaa

SEQ ID NO: 180390 - DNA, 246 bp, Klebsiella oxytoca
atggcagaaatcaccgacgcccagcagattcgcctgaacctgctttccaccctgaactacgacacagcagcagctaaagtcgctgtagagtttgttcaggatagtccgcttaaatatcagccattcatccagcaatacagccgtgtcacatcagagactgaagtggtggcaaagacgatgaaagcagtgcaggaagcaactgaagcgctgccgctctttgataccgctgctgagcagtccagctag

SEQ ID NO: 180391 - DNA, 822 bp, Klebsiella oxytoca
atgaaccttgaaaatacagtgaaataccacttcgcaaaatccacgctgattagcgattctccgcgtgctaccgcctctgattcactgaccggcaccgatattatggcggcaatgggtatgacgcaggagcgcgctgcaatggggtacagcgcctttctcggaaagatgggtatcagcaataatgatcgggaaagagcgatcgatctgctggctgaatacgcattaacccggtgcgataaagtagctgcgctgcgcaaactcacaccaaacgtaaaaccccgggttatccggatactcgcagagttcgcctttgaagattactcccgcagcgcttccagtaaaaaaacatgtgactgctgccatggggctggattcatcaatgcagaggtgttcaccaacaaggtaacgtatccggacggcaaaccaccgaagtgggtcaaagttacgaaggggatttatccatcatactgggaggaggcgaagtctgttcgggagcaagttcgggtgctctgccaaaagtgccagggtaaaggaaccatcagtgctgcctgtaacgactgccacggacggggaaaggtagtgaatcaggatgagacggagaaacagggcgtgcctgtcatgggtaactgtaaacgctgtggcgggcgcggttatgagcgaattctctccactgctgtgcacaatgccatttgccagataactgacgccatcaccctggacacctggaagaagtcggttaagccgttcttcgacgtgctgatcactaaattcgatatagaggaggcctgggcagaggcgcagctcaaaaaaataacgcgctga

SEQ ID NO: 180392 - DNA, 519 bp, Klebsiella oxytoca
atgactgatatcaccgaactggcgcagagcatgaagcgtcgagcagcatcagcaaatgagtttggcgaaagcctgtacgtaaaagccgataatgttctcgctgtggtagaggcgctggagcttaaggaagagcagcgagcaaactggttccacatggcgcagaagttggggaataacttggatgcggctgaaaagcgcatcgctgagctggagcgcgaaccggcagcacgcatggtcgtaacccctactatctggaagcattatactgccgcccaaactgcgattatttacgagaaagccatgacagatgcaggcattaagtggagaagtattgatgaacgcttaacgcatgaagagttagaatcactatacttggcgatgaaatcacacttcgaggttatggctgaatccgcttcagaggctgaggttattgaatgcagccagatagtaagagcattgtgtgagttacaggaacgccgcaccgcaatgctcgcagtcgctccacaggaggtgaaatga

SEQ ID NO: 180393 - DNA, 753 bp, Klebsiella oxytoca
atgagttggctcttttcgcaggcgctggcggaggaatactcggcggacacctccttggctggcgaacagtttgcgcagttgaacgtgatgcctacgccgcacaagttctcgcgcaacgacaaaacgatggaattctccagcctttcccgatttggtctgacgtgtgcagttttgacggaaaaccatggcgaggaattgttgacatcgtttctggcgggtttccgtgccaggacatcagtgctaacggcaatggagccggcatcaatggaaaacgctccggattatggtctgaaatggcgcgaatcgtcagtgaggtacgacctcaattcgtctgcgtggaaaattctccacgactcagaggaaaaggtcttgccgtggtcatcagtgaccttgccgaaatggggtatggctgccaatggtttcgtgtttcagcatccaactgcggagcgccccatgaaagagacaggatgtggattgtggccaactgccaaagcgtccattcgcggggactgtccgagcgagcgtttgcgcagaactccagatcttccaagtgcgataaaaatgcgcccacttccggatgggagtgcaccgccccaggatggtcagctgaacccggattgggtcgagtggttcatgggctggcccatcgggtggacagaattaaagcccttggcaatggacaggttccgcgagtggcagcaacagcattctctttgctgtgtgaaaaatgatgaacaggagcgtgcagcatga

SEQ ID NO: 180394 - DNA, 570 bp, Klebsiella oxytoca
atgagcaacgacggattaacacttaaccaactggcagagcgcaacgcagtattggtcactgaggtcgagaaattacgtgctgagcgtgatcagctggctgcggagaatgtggcgctgaaggctggtcgcagttatttcatgtacagcgatgatgcagggtttgagacgcactcgactcgcgaagaggcaatcaaagcagctgaagagatgattgatgattatcgcggggatgctggcgatggatttccggaggaagcaggtacaacccgctggggcgtgattatccaacaggccactgagtgtgattacgaaaaaccgtcagctgaaaacgggtggatgggctcgtgcgattacagattgctgcctgaaacccccgccaccgatcgcatcgtagccgggattaaggctgatggggtggagctgttcgcggcagagcagcgaggcgtagcagagcgtttgaaaaaacgcggcggtgatgtggtgatgagcagtattaaattctgtttagaaagtgcagaagaggcagaagtgttcgcccagcagctgcgcgacggaggtaacggtgaatga

SEQ ID NO: 180395 - DNA, 786 bp, Klebsiella oxytoca
atggctaagaattcaatcgacgcatacggtgccagcggcaagacaaacgttctgatgtttgagccggaaaatctgcatattgtcactgacaaggctcatccgctttacgatgaacgtatttacttacctctcagtgaagccatggtgctgaacatcatagaccagggggttcttgagccgattattgtctggaaagacccggaaacggggctgtcctgcgtggttgatggccgtcagcgtgtccgccataccctggaagctaacgggcgtctggcaaaagagggaaaaaccccactgctggttccggcagtcactaaacgcggttcagctgtacgcatggctcaggcgatggtcagcgcaaacgaaatccgtcaggccgatacaccgctgggcagagccaaaaagatggctgatgcgctggagcgcgggcacgatgaggacgatttagcactgatgtttggcgtgagtgtccagacagtacgcgcaacgctgtcgctactggatgccacccaggcagttcgcgatgcagttgagtctggaattgtcaccgttagccaagcccgtcagctggcatcacttaaacctgaagagcagcgggagaaggtctctgaaatcgaagcggcaactgctggcacaaccggccatgaaaaagcgcgtcgtcagcgtcaggttctcggcgataagaaaccgcgccttaaaactcgcaaagaaatcactaaagccctcgaaggtgccagcggtgaatacgctgatgctctgcgctgggtactcggggaggctgtatga

SEQ ID NO: 180396 - DNA, 1077 bp, Klebsiella oxytoca
atgaacaatcaggtttttgaaattgttcaggccatgtcggggcaggggaactgcataacgatccccggaccgtatctggatttctttgcaggagacaggcaacagcatttgctggcggccattctcaatcagctggtgttctggtcgggcaagtcgagtctggaaaatggctggttttacaaagagcacgcagcgcttgccaaagagattcgcgccaaagatggcgacgtggtcagaaaagcaatgttcaagattacagagcagtacctggcgggggttattgaggaagagttacggcaggtaagcggcactccgaagaagcattatcgggtcgatcaggaggcgctaatcgccaaaatattcccgcaagggggaaattcaaataacccattgaaaaatatggatacggcccaagagccgaatggaaacggcttaagagccgaatcgaagcaagtgattgaaagtgatggaaacggctctcaagccgaatgcattcgtcccaagagccgaatggaaacggcccaagagccgaatcctggaaacggctctcaagccgaatcctatctctatacagatcttaaaaacagatcactacatacagatcataaaaaccacgcgggagagattcttcctgtggataactttgcagagtcaggacgtgaaccggtcatcccggaagcaaacattcctgacgctaccgaagacagtaacctggctaccgatgatgacttcgatctcgcgatgtggttctggtcgaccatcatcgagatgtacgaacgcgccgccgaatttgacggctctctggcaagaccgagagaaccgaactttgttggatgggctaacgaggttcgcatgcttcgccaggaacatggctgcagccacgaccaaatccgcaccatgattgagcgcattcagcgcgatcagttctggtgcccaaaagttcaaaccatgaagacattacgtaacaaatggcctgagctggcgctgaagctgtgcccggtaaaccttgctgtaggcggaaacctcggatttagcggcaaagttcaggcagatattccaaagggtttcaggggctaa

SEQ ID NO: 180397 - DNA, 270 bp, Klebsiella oxytoca
atgtctgaagagactttgaaactggccgttagctactcaaatgccaacatagttatcgagcgatccgtaaacattttccatagcgttaatgaaatccgttcatcactggatgatatgcgcgaggcaatgaaaccctgcggcatcgttatggatgaccagttggacagttacgacactgctctgcgtaatctggaaaagctactgcaaaagattgaaggcgacgcccgccaagaagctattgctctgcgttacaagcttaagtcgcaataa

SEQ ID NO: 180398 - DNA, 306 bp, Klebsiella oxytoca
atgaaagaacttaaattttacggtgccagtgatgaccttttcgaatgcgaaggcgctatcagggaagaaatctgcatatacagtaatccaggcgtttatcacctcaaatccgctgaaggtgagatgctcgttattgcctgctatacagacgaaggctgctgggctattggcgtgggccaggttaaagaagaaacgccacttccagcatggtccacatctttcacccagcacgaacgcggctatagcgttgagctcacgattcaggttcctgacgacacagaactggtactggaggatgacaaatga

SEQ ID NO: 180399 - DNA, 357 bp, Klebsiella oxytoca
atgagctgcggatatcaaggttatgaatttggtgcgcattacccggatagcctttgctgcgatggatatctgtgggattgcgacgcatacgaagatggcatgctgacgaatggtggtgacattccttgccctgtctgtaatcgcaagcagtggttggccttctaccgcgatcacatcattgagtgcggaatgatgcagtcagagcgcaagcatgggcctaaaactgtgaaatacgggggtttccctgagcccgtacgtggtgatgcaaaggctatgcgcaccatccgtcgctggctgcgtcgcggctggtatcagggtaggaagttcgatgcggaagcgcataaggtggtggtatga

SEQ ID NO: 180400 - DNA, 483 bp, Klebsiella oxytoca
atgattgagaaaaccattctcgacatgtgctgtggctcccgcatgttctggttcaacaaacgagatactcgcgcggtatttgccgacattcgagctgaagagcacaagctgtgcgacggccgccgtctggttatctgtcctgacctcgttgctgacttccgtgcgctgccgttcgctgatgcctcatttccggttgttgtgtttgacccgccacatcttgagcgcgtcggacaaaccgcttggatggggaaaaaatacgggcgcctgaataaaaaaacgtggcgcgccgatatccgcgccggattcaaagaggcattccgcgtgttgtggccacacggcgttcttatctttaaatggaatgaaacccagataccggttagccagattctagcgtttactgacgaaaaaccagcgatcggccagcgtaccggaaagaacgataagacccattggataatcttcgtaaaggaaggtacagcatga

SEQ ID NO: 180401 - DNA, 705 bp, Klebsiella oxytoca
atgagcttttttgaaattgactctcgatttttgatggatacagcatttcaccgcctggaaatcatccgtgacaatggcctgtatcgccaccttcgaatgcagcagccgggaacgtccaattactactatgacgtaattacctggcctggctatttgactgtgacgggtgacatgggaacctggaccttttcccgaatagcggacatgttcgacttttttggtgcctgggaaggtggaatcaatacccattattggtctgaaaagctggaagctggtgcgggctgttcggcgcgcgaaatgctggcgaaagagtacaaccacgaagcgttttgcaaaagcctgaaagagtcgcttagtgattacctggagggtgaggaaggctcagaacaagaagaggatgaagactgggacgacgatgacgatacgccagatagcgataaagcaagggtgcgagaaattgttcgtgaattatgtcgtgctgagtttaacaacgactttgaggcttacaacgccgtttatgacgctgattggcctgaaaggtttagcgcatgggatatatgcgacggcctgacctttaaaacgtataccagccacttccgctggattctgttcgctatcacctgggcaatcagcaaataccacaacgcgaagattgttgataaagcgatgggtacgtttctggctgtgaaaggctctatcgcataa

SEQ ID NO: 180402 - DNA, 1287 bp, Klebsiella oxytoca
atgaatatgcctgctggcgtagagctgcatgggaaaggaataaggattagctttctatatcgcggcatacgttgccgcgaagttttgcggggctggactgtatcaaatagcaatataaaaaaagctggcaatctccgcgctttaattatgagtgagattcagcaaggtaaatttgactatgcagagcacttccctgaatcaaaggcgcttaaaaaattcaccacgacacaaaaaattaaaaccttcggtgaattatgcaaagtttatcttgatgccaaaaagcttgaggtgtcagctgcctcatacagaggcgcagaatcacgtatagcaacactttgcgctatcgtcggaagtaatacgcatattgcggatattcagcataccgacctgttgaattacaggaacgcgctgttaactggtaacacctttagcgatcatgctccctggcttaaaagaaaaggtcgcgctgtatccactgtcaacggcctgatgaacaacctgactgcgttgctcaaactggcgaacctgagcggctttatcgagcatacccctcacgaaggtataaagatgcttaagcgctccaggagagacccggatccgcttctccagagtgagtacgaaggtttcataaaaacgttatctcctcggtatgctttgctctggactacagctatctttactggccttcggcatggagagctaacagctttagcctgggaggatgtggaccttgataagggtgagcttcacgtcaggcgtaaccagacgaatgagggcctgtttgtgcctcccaaaaccgaagcggggatcagaactgtaaccctacttgaacctgcgctgaatgctctacgcgaacaattcaagctaactggcgcattaagcaaaactgaaatcactttccatcaccgcgaacatggtttaactgaacaacaaaaactgcggttcgtgtttatcccgcccaaaaactggcgcggggaaacgaagtattatggctctcagtctctggggtatagttgggaggcgggattaaagaaggcgggaatcaggagcagacgcccttaccagtcccgccacacgttcgcatgctggcttttaactgcaggagctaatccgtctttcatcgcaggacagatgggccacgagaatgcaaagatggtttatgagatttactcgaagtggatcggagagatggaccgtaaccaggtggaaatgctgaatagtagtttttctaacgctctgtcccaagggtgccccaaacgcaaggtagtgggtataaaaagcgtttaa

SEQ ID NO: 180403 - DNA, 2433 bp, Klebsiella oxytoca
atgacaacgttgaaactggatactctgagcccgcgcattcaggcgcataaaatggcgctggtgcatatcgttaagccgccggtttgtaccgagcgcgccctgcactataccgaagcctatcagcagcacctggataagccgatcccggtacgccgcgcgctggcgctggcccatcacctggcggaacgcacgatctggattaagcacgatgaactgatcgtcggcaaccaggccagcgaagttcgcgcggcgcctatcttcccggaatacaccgttagctggatcgaaaaagagatcgacgatctcgccgatcgccccggcgccgggtttgccgttagcgaagagaacaaacgcgtgctccacgaagtgtgcccgtggtggcgcggtcaaaccgtacaggatcgctgctacggcatgtttactgacgagcaaaaagcgctgctggcgaccggcattatcaaagccgaaggcaatatgacctccggcgacgctcaccttgcggtcaactatccgctgctgctggaaaaaggcctcgacggcatgcgggcgaaagtcgccgagcgccgttcgcgcattaacctgaccgtgctggaagatctgcacggcgagcagttccttaaagccattgatatcgtgctggaagcggtcagcgaccactgtaagcgctatgccgggctggcgcgcagcatggccgcgacggagagccgcgaatcccgccgcgacgagctgctggcgatagccgaaaactgcgatattatcgcccacgagccgccgaaaaccttctggcaggcgctgcagctgtgctatttcatccagttgattctgcagatcgaatccaacggtcactcggtctctttcggccgtatggaccagtatctctacccttactatcgccgcgacgttgagctggcgcaatcattggatcgcgaacacgccatcgaactgctgcactgctgctggctgaagctgctggaagtgaacaaaattcgctccggctcgcactctaaggcttccgccggtagcccgctgtaccagaacgtcaccatcggcggccagaatctggtggacggcaacgcgcaggatgcggtgaacccgctctcctacgccatcctggaatcctgcggtcggctgcgttcgactcaacctaacctcagcgtgcgctatcacgcgggcatgagcaacgacttcctcgacgcctgcgtgcaggtgatccgctgcggcttcggcatgccggcgttcaacaacgatgaaatcgtcatcccggaatttatcaagctggggattgagccgcaggacgcgtacgactatgccgctatcggctgcatcgaaaccgccgtcggcggtaaatggggctatcgctgcaccgggatgagctttatcaactttgcccgcgtcatgctggcaaccctggaaggcggccgcgacgccaccagcggccaggttttcctgccgcaggaacatgcgctgtcaaaaggcaacttcgacaactttgaacaggttctggccgactgggatacgcagatccgctactacacgcgcaaatctatcgagattgagtacgtggtcgacaccatgctggaagagaacgtgcacgatattctctgctcggcgctggtcgatgactgcatcgagcgcgcgaagagcatcaagcagggcggcgcgaagtatgactgggtttccggtctgcaggtcggcatcgctaacctcggcaacagcctggcggcggtgaagaagctggtgttcgatcagggcgttattggtcagcaggagctggcaaaggcgctggctgaagacttcgaaggcctgacccacgagcagctgcgccagcgcttaatcaacggcgcgccgaaatacggcaacgatgaagacagcgtggatatgctgctggctcgcgcctaccagacctatatcgacgagctgaagctgtatcataacccgcgctacggccgcggcccgatcggcggcaactactacgccggcacctcgtccatttccgccaacgtgccgtttggcgcgcagaccatggcgacgccggatggccgtaaagcgcactcgccgctggcggaaggggccagcccggcctccggtaccgaccatctcgggccgaccgcggtaatcagctcggtgggcaaactgccgaccggctcaatcctcggcggcgtactgcttaaccagaagctgaacccggccacgctggagaacgaatccgataagcagaaactgatggtgctgctgcgcactttcttcgaggtgcacaaaggctggcatattcagtacaacatcgtgtcgcgcgagacgctgctggaagcgaagaaacacccagaccagtatcgtgatttagtggtccgcgtggccggttactcggcgttctttaccgccctgtcgccggatgcacaggacgatattatcgcccgtaccgagcatacgctgtaa

SEQ ID NO: 180404 - DNA, 369 bp, Klebsiella oxytoca
atgagcaaagtagagcgcgatcacaaaatggacaaaaagctgaaagtgagcgaaatcgcggcgcgtaccgggctgtcggtgagcacggtatcgcgggtgctggcgggaaaagcaaataccagcgccagggctcgccagagggtactggattgcgcccgcgagctgggcgtgatggagggtatcgccgccgggcgaatgctgctcaataatctggtggtctttgcccctcagcgcgctttcgatgaacgcacggatatttactactatcgtgtgattcaaagcatcaatagcgcccttatgccgcatgaggtacacctgcgctattgcgcgctggaagagaacgacagcgatgccaatttgtttttgtag

SEQ ID NO: 180405 - DNA, 1302 bp, Klebsiella oxytoca
atgagccaaggcctcaataatgatatggcggtcagtaaatcgcgccgaatagtgaagaacctgcgctggtggatgctggtgctgtttttactcggcgtcaccgttaactacatcacgcgtaattcgttggggattatcgccccggaattaaaaacctccctgggtattaccactgaacagtactcatggatagtcggcgcttttcagctggcgtacaccattttccagccgctctgcggctggcttatcgacgttattggcctcaagctcggctttatgatctgcgccaccctgtgggccatcgcctgcatcgcccatgccggggcggggagctggctgcacctggcgattctgcgctttttcatgggcggcgctgaggcggcggcgacgccagccaacgccaaaacgctgggtgagtggtttccaaaatccgagcggccgatcgcggcaggctgggcgggcgtcggcttctccgtgggcgccatgctggcgccgccgattatctacttcgcccacgcttcgttcggctggcagggggcattcatgttcaccggcgcgctggcgctgctgtgggtcgtgctgtggtgggcgttctatcataacccggaaaaacaccctaacctcggtaaagctgagctggcgctgatccagcaggacaatgaagcgccgccggtcaaactgcccttctttaccgcgctgaaaaccgtatcgaaaaacaagcgcttctatggtatcgccattccggcctttatggctgagcccgcctgggcggtgctgagcttctgggtaccgctctacctggcgaaagagcacggcatggatttaaaacaaatcgccatgtttgcctggctgccgtttctggcggccgacctcggcagcgtcgccagcggctatctgaccaaactgtatacccgctggttcggctgttcgcgggtgaactcggtggtcgccagctccgtcaccggcgccttcctgatgatttcgctcgccaccgtggcgatcacccgcgatccctatatcaccatcgtgctgatttcgataggcggcttcggccaccagatcatctcctgcatgctcagcgcgctggtggtggagtcgttcgataaaggacagatggcgaccgtgaacgggatgcgcggctccgccgcctggatcgccagctttctgttctcgctgctgattggcgtcaccgccgacaaaatcggcttcaacccgctatttatcgccatggggttctttgacctgattggcgcggtattcctggtggcatttattgctgaacgtcgcgcaaaacgcgcctga

SEQ ID NO: 180406 - DNA, 2364 bp, Klebsiella oxytoca
atgaagactttgaaaaactggactttgcaccaacggctggaccaccacgttgagctgatcgtagacggccagcacaccctgtgtctgtacgtgctggaagagaatatgttccgcgtgctgctaaagcggcacggccagctggcgctggatcgcacctggagtatcgctccccggcaggacgtgccgtgggaaggacgcccgcgcgaagatttgagcggctttagcctccccgcctggcagctcacggagcatagcgataccctgagcatcgccaccgaccagctgcgcgtcaccgtccaccagccgctgtggctggaatggagctatcgcgatgagggcggcgagtggcagccgctggttaacgaccgccccaccagcgcctacctggcgaatgcgcacggcgacggcgttgcccactacctgagccgacgcaaagacgaacgcttctatggtctgggcgaaaaagccggcgatctgcagcgtaacgggaagcgctatgagatgcgtaacctcgacgccatgggctataacgcggcgagcaccgacccgctgtacaaacatattccgtttaccatcgcgcagcgtagcgatgtcagctacggtctgttttacgacaacctgagcagctgctggctggatctcggcaacgaaatcgataattaccataccgcctatcgccgctggcaggcggaagccggcgacatcgattactatcttttttccggcaaacgggtactggatatcaccaaagcattcgtacgcctgaccggcaaaacgctgttcggaccgaaatggagtctcggctacagcggttcgacgatgcactacaccgacgcgccggatgcgcaaaaccagctgatgaacttcatccgcctgtgtgatgaacacgccattccgtgcgattcgttccagctctcttccggctatacctcgattgacggcaagcgctacgtctttaactggaacaacgacaaggtgccgcagccgaaggtgatgagccaggccttccacgatgccggactgaagctcgccgccaatattaagccctgcctgctgcaggaccatccgcgctataacgaggtcgcggagcgcgggctttttatccgcgattcacaggcggatgctcccgagcgctccagcttctgggatgacgaagggtcgcaccttgactttaccaacccgcaaaccgtcgcctggtggcaggaaggcgtgacaacccagctgctggagatgggtatcgactccacgtggaacgataataacgagtatgaagtctgggacggcgaagcccgctgttacggatttggcgaggaaattgccattaaacatattcgcccggtcatgccgctgctgatgatgcgcgcgtcgctggaggctcagcagcgctttgcgccgcacaaacgaccgtacctgatctctcgctccggctgcgccgggatgcagcgctacgtccagacctggagcggcgataaccgtaccaattgggatacgctgcgctataacacccgcatggggctgggaatgagcctctccgggctgttcaacgtcggccacgatgttggcggcttctctggcgataaaccggacccggagctgttcgtacgctgggtacaaaacggcgttatgcatccgcgctttaccattcactcgtggaatgacgaccagacggtcaacgaagcctggatgtacccggaagtcacgccggctatccgttcagccattgagctgcgctatcgtctgctgccgtacctctatacgctgctgtggcaggctcacgccgacgatgaaccgatgctgcgtccgaccttcctcgatcacgaacacgatccgcagacgtttgccgaatgcgacgacttcctgctgggtcgcgatctgctggtcgccagcgtcgtcgaacccggcgcgcgtcagcgccgcgtctggctgccggccaatcaggacggctggtacgactttgatagccaccagtggttcgcgggaggccagtggatcgtccttgatgcgccgctggaaaaactgccgctgctggttcgcgccggagcaggcctgccgctgagcgagcgtatccgccacgtcgatgcgcaaaaagacgattgccgcgagctgaaactcttcccgctgaagggcgtggggacccgtcgcggcctgctgtttgaagatgatggcgaaagctggggctaccagaatggccatgcgctgtgggtagagtgggaaatggtttgcgatagcgccagcatcaacctgaaggtgaacgcacgcggcgattatcgtccggcgtggaaagcgctgaaggtgtcgttgccggcgggggaaaaacgcaggctgctggtgaacggtgaagaaaggagcgagtggcggatgtag

SEQ ID NO: 180407 - DNA, 522 bp, Klebsiella oxytoca
atgcagggagtatttaaagcagctccgctgttatgttttttacttttgggctgtggcccgattgaaaaagaagaatcacgcggcaacgggaagaccagctacgtagcggccgatctacagggctataaccatgtggcaggcacgaatatcaactggttctccgtcaacggctaccggggacacgccgggggatttacctgctgcatatcgctgccggaaaaatggcggcccaatatgcaggtggcagtggagtgggaggtggatcctgacccgtttccgaaggatatgccccgcttgggaacaaaagagtttcgcgattatgtgaaagctcacgaagcaaattatcgccattataaagcggtggccaccattcctgaatatgaagagtcctgcggactgcaggttcattttttaccctgtcagcaggttaaagttaccgcgacctgccacggcgtgacgcatcctgaccacccgattaaagagcctttcgatctgccggagtctgcccaatgccctcaataa

SEQ ID NO: 180408 - DNA, 1428 bp, Klebsiella oxytoca
atggcttttgatgatttgcgcagctttttgcaggcgctggacgaccaggggcaactgctgaaaattagcgaagaagtgaacgcggagccggatctggccgcggcggcaaacgcgaccgggcgcatcggcgatggcgctcccgcgctgtggtttgacaatattcgcggttttaccgatgcgcgcgtggcaatgaacaccatcggttcctggcagaaccacgctatctcgctggggctgccgccgaatacgccggtgaaaaatcagatcgacgaatttattcgtcgttgggataaatttccggtgacgccggagcggcgggcaaacccggcgtgggcggaaaataccgtcgacggcgaggcgattaatctgttcgatattctgcccctgttccgtctcaatgacggcgacggcggcttttatctcgacaaagcctgcgtggtttctcgcgatcctctcgacccggacaattttggtaagcaaaacgtcggcatttaccgtatggaggtgaagggcaaacgtaaactcggcctgcagccggtacctatgcacgatatcgctctgcatctgcacaaagcggaagagcgcggtgaagacctgccgatcgccattaccctgggtaacgatccgattatcaccctgatgggcgccacgccgctgaaatacgatcagtcggaatatgagatggccggcgcgctgcgtgaaagcccgtacccaatcgccaccgcgccgctgaccggcttcgacgtaccgtgggggtcagaggtgatcctcgaaggggtgattgaaagccgcaagcgcgaaattgaaggcccgttcggcgaatttaccggccactactcgggcggccgtaatatgacggtggtgcgtatcgataaggtttcctaccgcagcaagccgattttcgagtccctctatctcggtatgccgtggaccgagatcgactacctgatgggcccggccacctgcgtaccgctgtatcagcagctgaaggctgagttcccggaggtgcaggccgtcaacgcgatgtacacccacggcctgctggcgattatctccaccaaaaaacgctacggcggctttgcacgcgcggtgggtctgcgggcgatgaccacgccgcacggcctgggctacgtgaagatggtgatcatggttgatgaagacgtcgacccgttcaacctgccgcaggtgatgtgggcgctgtcgtcgaaggtcaacccggcgggtgacctggtgcagctgccgaatatgtcggtcctggagcttgatccaggctccagcccggcggggatcaccgacaaactgattatcgacgccaccacgccggttgcgcccgatctgcgcggccactacagccagccggtacaggatcttcctgaaaccaaagcctgggctgaaaaactgaccgccatgctggccaaccgtaaataa

SEQ ID NO: 180409 - DNA, 1284 bp, Klebsiella oxytoca
atggtaggaaaacaagagggaaagccactttcgtttaaagcggtagaaatgatgaagcctggcgacaaagataaggctgatgtaggcgaaaatcgtggcttacgtgtctcctgtggtgcaactggggttaagtcttttttctaccgttacacaagtcctctgactggcaagcttgctcaggttaaaattggtaacttcccgcagacttctctcgccgctgcacgtcttaaactccacgaattaaagctcctccgacaggaaggccggtgccctgcgactgaactcaaaaaagataagatccagcgtgcgattgaggctgaacaagctaagatccctgaattgaccgtacagggattagttgaactgtatcttaccgaacgtattgaggatcgtaaaacgaaggacgggaaggttattcccggcgccagaaagccgaaagggcaggctgaggttcgtcgtactctctatggtgacgccgttaaaagcctaggagcccgaaatgctgctgagattacgcgccaggatgttattaatttaatcaatggcattgtagctcgaggtgcaactgtacaggcagggaatgtactgagggagctttcactcgcatatgaatttgctattggccttgggcgctttgatgacagttttgcgaatccagcgttgttagcaaaatccagtttacgacagaccagaatcaagctcacaaatggacgcggaacacgagtactgagtgaggatgagcttgctaaattccttaactggcttccgggctctgcttatacgccaacgatcaaaaacgtgctacgtttgactctctggaccggttgccgtaccggtgaagtctgcaatatggcatggaaggatgttgatcttgaaaaaggcactatccatctgcgagaaaccaaaacaggggtagaacgctacgtacagttatctgatcaggcaatcgactttctcaaagtactacggcttacctccgacaaatatctgtttccttcgaaagccactaagaagccaatccagcagaagtatttaactgaaaactcatggcgtttacgtgaaagcggccaaatgcttgatatacctcattggacaccccacgatctacgtcgtacagtgcggacaggattatcccgcttgcaatgtccaaatgaggtggccgaggccatactggggcatacgcgcggtggtgttgaggggatttataacttgtataagtatgacgctgagtgccggaagtggttgcaagtgtgggctgattatttagacaaggttaaaatttaa

SEQ ID NO: 180410 - DNA, 1791 bp, Klebsiella oxytoca
atggcgacacaacaaattcaattgaaaaccgttcatgaactacgcactttccttgcagatggacggccccaacgctttttcatcccagcctatcagagagggtaccgttggtcctcgttccagataacccagcttttggatgacattcacgagttcactcagcgacccaaccctcagcctcaggaattctactgcttacagcccttagtaatcaaatcgcggctacaaggggactgggaggtagtagatggtcagcaacggctgaccacacttttgttggtccttcgtcactttaacgagcgtttagccgagcgattccgtcagccactctataagctggattatgaaactcgtcccaaactgccggcctttttagaagagccttcctctgaactggcggagactaacgctgactattttcatctttatctagctatgcagaccatagaggactggtttgctcgacacgagagtgaggtggaaacgatcaaggctgcaataataaaccaggtcaagctcatctggttcgagttggcagatgaagatcatccggttgaggctttcaccaggctgaatgtaggtaagataccgctaacttcagacgaacttatccgcgcgctgtttctgcgtcgaagcaccggtgccagtgctgatcccacaagcgctcagttacgcatagcctatgaatgggaccagctggaaaaagccctccaaaacgatgctttttggtacttcataagcaacaagccagctcctgcccagaaccgcattggcctattgtttgaactggttgcgcaagaagacggtttatcgcagttatggcagtatgacacctatgcaacatttcatcatgtcaatgggcggcttaaggcatccggtgccagcgttgaagacgagtgggcacgcattaagtccagcttcctgcaattagaagaatggtttgaggatcgtaggctcttccatatggtgggttttttggttcatcaacgtgtcggaatcaacgatatccgcaaactggcgcaaggcacgactaagagcagtttcgagctgactttgcgttgtaagatcttccacctcgttacaggtgatgcgctgtctgttcctgtgagcgaggaggttgtacgagagcgcctgtctacacatatggatggactcagctacgatcgtaagtcgagccacggccgcattcgtgcttggctgcttctatttaacctcgcaaccttgttgcaagatgtgcgctcaaatctgcgtttccagttcgacagtttcaagacccagtgctgggatatcgagcatattcgctccgttagcgatgacaagcctggccgtacggatgcacaaaggacctggctggaacattgccttagatttctggctacgcaaggctcgaataatgctttatacgaagagattaagatcaacttagttgacccagcagcctctaagcttcctgaagtgtttgacgaactgtatgacaaagtgctggagtttttttccgaagtgggggagtgggaggaagagcatggtttgtgcaatctgactctgctggatgaacataccaaccgcagttacggcaatgctgtgtttgcggtaaagcgccagagattactatccctggatcaggccggtatctttgtgccgctgtgcacccgtaacattttcctgaaatgctacagcccccaggtgggtaatgccctgttctgggctgagcatgaccgagaagcttacgaaatagctatgctggatacactcacctactttttctgcggcagcaaaagggaaattcaatga

SEQ ID NO: 180411 - DNA, 2385 bp, Klebsiella oxytoca
atgaacctaggccaacaaatcacctacattcagctgctgcaacagcatacacatatccaaatcccgattattcagcgtgactatgcccaaggtcggcctgatgagcaagaggttcgtgatactttccttgccgcactggaggatgctctgctcaagcccgctcatgacgtcagcttgccgctaaatttagattttatttatggcagtgttgaagaatgccaaggaaagacacagttcctccctttggacgggcagcagcgtttgaccaccttgtttctgcttcattggtatttggcatggcgcgatagcgcctgggaagaatttacagcattgttcgtggcagagggaaagtctcgtttccgctacggtgttcggcctagtagtaatgacttttttgaccagttggtggtgtatcgtccaaccgaagctgtggatgaggtggtttcgcttgcgaacattgtttgcgatcaaccttggtttttccgaagctggctacgcgacccctctatccagtctgttcaaggtatgatggacgccatccatgagcgctttgcaactcattcgaacttattcgctagactggtagacgaagctcgtccagctgtcacatttcaactcctaggtctgcatgactttggcctctcggatgacctttatatcaagatgaatgcccggggaaagcctctcactgagttcgaaaacttcaaggctcgttatgagcagttgcttaaaactaagtttgtagatcgcaggttttatattggtgaaagctcatttcccatccatgaatacgtgtccatccaactggacacgcattggggggacttattctggcaatttcgtgacaaagaaagcaacctgtttgatcaagctttccttcgcttgtttagggtggtggctttggtaacgcgagactcagggggagaagcattcaataaagataccgagctgttgcgaaatctacatagcacattgtcattccaagactaccatcaccgagattggcttgatgagcgtttttctacgtcgcttatttatttgctggatacgttacacgcagaaaaaaatagattgtacacggggttgctaaacgatcagttctttaatgagtcatccatactaggcaaaattattagtccgtacttcacctccctaagctatagcgaagcggtgcagttcgcggcctatgtgggctatctccacaaacataagggcaaacctgagccagaggcatttcatcactggatgagagttatcaagaatctgtcagtgaatactacctataaccgggtagatgatttccggcgtagcttggaaagtgtaaatgcacttttgattcatgcagatagtattctggagtatctagcgattcccgacaactctgtggatggcttcaataggcttcaaattaacgaggagcgtatcaagtgtgcattgatacaagcccatgaagggtgggggcctcttatccaaacagcggaggtacatggatactttgctggtcaaattgacttcctaatagagttctcaggtgtagcggaccagtttgaaatggtagctccctgtgactggactgctgaccaacatcttgagctccagcatgcctttgagcactactggagctgggctcatgctaccttttcgaatgttggcttaaaggagttaggtgcgtactattggctgcgggctctgttgagtttgggggactgcttactgccaaagggaaaaaatcagtccttcatagttgatcgtgcagatgatgaagccagctggaagcgattcttacgttctgagggaaaacgcggtctgctgaaaaatctgtgggaccgaatgaatccacatattgacttgtcgaatcaactggaagatgtcatttctagtgcgcccctgagtgaggattggcgaggattgatcgtccggacgccggcagtcatcgagttttgtgaagctcgagcccttcgtgttgagtctaacgagaaggtttatatactaaagcgcagccaacttaatggtgaacatgccgagttgctcacattctgcctttatcagaaacttagggataaattccaagcttttaacaatttaaatataacttatatgaccgcagtaggtactgctttctgcccttatatcagactgatttgccttcagactgatgagggatggcctgaattcagcatcattgcagaacgcaaccaattcatcataagaacaatattacctacaaaggaaattgatctacaaattggcaccacgcttagagacacttttcacttccaagaaaatgattattttcagatagtgacggacagccgtgatgttgaacatgtgttggggctgctaaatggccacatttcaacagagtctgaattaccattaagctaa

SEQ ID NO: 180412 - DNA, 945 bp, Klebsiella oxytoca
atgaaaaataaaagaaaatctaaacaggatttattaaaaaggagactgcaacaagttgctacaccgcttgtcgcaatagttagtgggactattgctggcggggtttctggtatcggtggtggtggtgtattgccgggggctgcaggcggatttttatcaactgttttatttgattgggcaactcggagtttgtcgaaaatagaagttgagcgagttgtttcagttgtgtctatcgcagcaaaaagggctgagaggtttatagaagttgatatgcttcctgtaaggaatgatggtttttttggagagcaagagaataggagtaaagagccaaaatcagtggagatgttagaggggataataactatcgcaaaaaatacatatgagcaacaaaaaataaaatatattggtaacttgtatgcatcgatgtgctttaacgaaaagataccattacaacagatgtcttcctttctaaattttgctaacagattgtcttataatcaatattgcttattggccggttttatggacaagaatagtacatttttatttcatattcctcaggtgaagtttgaggcaggaaaaactacagcagaacagatcgttgtcttaactgagctttacgatctaattcagttagggtttatagtatctagtaaaccagttaattattttttaaatatagatatagcatcactaaaaacgcaggggattggagtggctttgtgggatagtatggggctaaatcaaataccatactctcaagtcaggaaagtattgtcgcctttgggggtaacttataatgaaaaattattagaaggtcgcaatcccaagtcgaaaccacatgaagacgatgggttggatatcacaattgaagaactgattgattctcaaatagatattcggcaaagtatagctgttggaacggtagaggactttattgaatga

SEQ ID NO: 180413 - DNA, 225 bp, Klebsiella oxytoca
atgaaaaagatcatcaaatttaccattatagctattattgcatttagttggttcattacactcaatacaactgagccagagaaagttcttcctgctaatgctcctttcattattaaatctaacgtaccaggcatgtgcaaggtcagcgccatcacaacctcttccggtattaatcaaaatttacccatcgtagcgtgtaaagtacaatcattcttggttaattaa

SEQ ID NO: 180414 - DNA, 336 bp, Klebsiella oxytoca
atgaaaagaacaatgcttctggtattaatagcggctggtttgctggctggctgtggcgagaaaacaccaaaatgtagtagtgatgatgcaaaaaatctggtcgtggatattgcaagaaagactatcgagaaaagcatgacactggataaggatgtgcgaattacagtagaaaatgtcagaacaataagccacgattcaggccttgacgtttatcagtgtgcggctgatttaacgttcacaaaacctgatctgcaaaactctctgccaataacttaccgtatacaaaaaacagatgagggtaaaggtcagttctatataaatgtatcaggattataa

SEQ ID NO: 180415 - DNA, 360 bp, Klebsiella oxytoca
atgaacagaaaactgttggccttattgatggcagccataacgctacctgtcgcagcagagcagtacgtaaaacccggagcggttctaaccctgaatccggaaaagggcaatgctgaattcaacattaatgcctcaacaggggatgggtcgggcgtatgcaatatagaggggacagcacagcaaatagctgccggagaaagccagaagcgtcgctgggtctggaatgacaataccagccagtgtgttgcagtaattagtgaactgaaaaaaggtaaggccagcattatgactcgtggttgcgaaggatactgtggggcttctgcggcaggcgcaatggatggcctgtttaataagaaataa

SEQ ID NO: 180416 - DNA, 528 bp, Klebsiella oxytoca
atggcaaccaccatcactgaaataacgaaatgttttgagtatttttttagttctctttatcgcagggagttcgtcaaaacactgcgtctgaacgaatgtagcgagcgggaattactgcctctggtacgttgctatttgctgggttggtttgcagataatgtctcaccggaagtgaaaagcaagctgccaggaactgtatccggacacggttacattgattttgtcattgatgatgtagccgttgagtttgcagtacgtaaaccaactgcggcacgttccaatgtctccgcgaccgtcaacagtacagaagtaaagaaattgatgaagcacgatggcaaagccttgcttgtgctgtttgacttctctgacacgccttattcagaagaacagatcgaatccttccgcaactggccttctcttggtcgagggaatcatcgcaagtccgcattcaacgtcgtttatttctttgtggaaaaacgcagaccgctggcactggggaaaatcaccaaaaacatccgtatcacttag

SEQ ID NO: 180417 - DNA, 489 bp, Klebsiella oxytoca
atgagcagtaagagatcagtatcggctataccgacccatcctgaagcttctgttgaagaggctaaagactggttgacagcagaggaattcactcatattgagggcatgccgggcactgcgcgtggcgccaggatgcgcctggaaaagctggcatccctgcacccggaaatacgtcgtaaaaggactgccgggaaaggcgtggtttaccatatcagcgcagccacaatgtcgcttgatgatgagagaaacagggctaagggtgaagcgtttactttcaccgacagcgatcgccagcttagcctctggatacagttgtatcgcaatatgtcgccagcttcgcgggcgcaactgatggagcaggccctcaggctggtaaaggacgatctgatgtctcaggggcctaatgtttctgaactggcggtacaaatcatgaagctgcccgaagatgagcgtaagcgcctctttgaaaagctgaacgggaaggtgtga

SEQ ID NO: 180418 - DNA, 393 bp, Klebsiella oxytoca
atgcccgtcgatcaggaattaataaatatcatattaaatgaagcgggaaatccaccgccgcataaagccagaattaccgctattagtctgttatttaaagatctgacttacagcgccgaaaagggcggttatcatcccgtcgaaatacggcttatttctcgcaatgacgaatggtattttgattacattaccgacttcagttatatgggagtggtataccccgaactggaaaaggaaattgatatcagctggagtcagcagtatgtctttcttactcatgttggtgatctgcctgttaacgcaggaagggagttgtttgaactctggcaatccaactttattcagtatcacgccatgaacgcttacaccattactgtcctgtgggaaagctaa

SEQ ID NO: 180419 - DNA, 540 bp, Klebsiella oxytoca
gtgacgactgacagagggatacgtgcgtctcaacagggcgaactggactgtctttgcggtgcttattgcgtggttaacatgctgagctggctgtatgacggcagggtgaaacgacgcccgttaatgaaccggcttattcaggcttatcagcagcgctggcctttgcatgaatggctgaatgaagggattgaagaggaccgcctagactggctgatagcgcaggtgttgcaaaaagggcactacagccgccagttcccggttcaaatcaccagaccctttgcagggaagcggggagtaacagatgggcgactgttcagggaaatgcagcggtttcttgacgttactgaccactcccgcctgattatgctcagcgaccagtttcactggtcccttctggtcaaaatgaatgaagaaacgctctatttcttcgacagtaacggacgaaccaccatgccccgtaaagctttctccctgcgtactggcgtaacccgccgccagctgtttcccgacgccatttacttcattgaacgggaattctga

SEQ ID NO: 180420 - DNA, 453 bp, Klebsiella oxytoca
atgaccatgtttacccagcgtgaaacccgtatcctcgatcaggcgcgtgacatcatcagccggtactatcagcgtggggttcaactctgtacccctgatgatgtgcgacggtgcgtaatggttgagctagcaccgcttgaacatgaagagtttggcatcatcctgctcgataatcagaatcagctgctgcaccgcgaaatcctgttcaggggtacgctaaactcggtcagcgttcacccccgtgaagttatcaaactcgtgctgaaatataacgccgccgcagccatccttgtacacaaccacccaagcggcgagcctgaacccagccgttgtgatatacaactgactaaaaagctacaggagctgctggagatgcttgatgtgcggttacttgatcactttattgtggcaggaactgaaacagtgtcgatggctgaacggggactagtgtga

SEQ ID NO: 180421 - DNA, 918 bp, Klebsiella oxytoca
gtgttacgtcaggtcgtgccggtggtgcaaacaaccgtgtttgatgcgtatattggcggtctggccccctcggggcggagaggtatcaccagcctgttaaaccgcagcgccagcatacttaaacgcggtactggcgcaaacaattacccgtgggaacaacttaactacgccgccgtcgctaaagtacgtgcggcattgctggatgacggttacgccgtgtcgtcggtgaacatggcactgtcagcactccggggcgtggcgcagacagcctttaacctcaattatatggatgccgaaacgctggcacgtatccggtcagttaagcgcgtgagcggcgatatccagcgtaaaggaagggcattagacaggcaggaaatccgggcgctgattcaggccgcaaaacagcatccgcaaccggtacggcgctgtcgtgatgtcgctattgtgctgatgctttgcggaacgggcctgcgggccggggaactggttaaacttgaacgccgggactatgacaatggcatcctgacagtcaggcaagggaaggggcgcaaatatcgcgaaattcatgtggcggatacagtagaaaagaccatccgtgcgtggctaaaggtcagtgcagatgaggctgacagtgcgttgttcaggcgaattcatcgcagtggtaaggtcgcaagccagccgctgactacgaccgggttaacgggtatcctggctgagttacagcacacatcgggtattgcgcgatttaccccgcatgacatgcggcgtaccttcatcacccgtttgctggagcaaggcgtggatatcaacaccgtccgccagctggcaggccacagcgatatttccacgacaacgggctatgactgtcgtggtgaggggatgaaaatacgcgccagtcagcagcttaaatgctggtaa

SEQ ID NO: 180422 - DNA, 528 bp, Klebsiella oxytoca
atgacagagaagcatttaataccagtttaccctgagctgggtgcggattcactcagaaagctgacaatgattgcttcacagcattatccgggctgggcaaaagaagaaaaaaggagtggtgaaccgctgaatatgaccatgagttactgtattgaggtagcctataacctgctggaaaagtcccgcacaacccttccactttatgatgctttacccccacccaaaacggtcaaagcccagatcctctacgacatttatcaacgcgtcacgactctaaaaggcaacggcagctccacagcacagatggtgttgttcctcaaccaggcgcaatttccgaccccagatgacctgttcgcagacaaaccactgacggcagcagcccgaaaaccttcacgctgggataaccgcgatattgatacaattatcacccgagatgggcaacccaccgatctgctgagagaacacctgcaggcactgaataaacgcgggcagcgcaaaagagcacctggtgcaaaaagtgtacgttag

SEQ ID NO: 180423 - DNA, 207 bp, Klebsiella oxytoca
atggcaataaaacgagtattaaaaattaatgatgttttgcaccgttgtagcatttcaagatcgtctctttatcgcttaatttccaaggggcactttccctcgcagctccgcttgtcaccggaaggtcgtagtgtcggctggcttgaagaagacatagagggatggatttctagtcgtaagcctatcaacgatggaacgcttaaatga

SEQ ID NO: 180424 - DNA, 879 bp, Klebsiella oxytoca
atgaaaattccgtcagtgaagataaacgaagcagtgatacagccccctgttaatcctcagctcgaggcgttcgcaaaagaaattaaaagacaggtgcctaaattcgaaactatcgaagatgtctacgaagaaagattaaagcgtataaagtcattacgaactatagggaggcgtctggataaaagggagtatctaaaattagcaataaagcttgaaaactgttggctcggtgggccttgtgggagcgcggcatgtccggaatgcttcagactacaccggctggaaatgattggggaggtacttcgcttatgtaagaaacggaagaattggcgaggtttaaccttaatattctatcaggatgcacttagtgacagtcaactgcttcaatggcaacccaatacattaatagcacgacttcgtcgctggctaaatgaatgtggctttgatgaaatggtgatcggtgggtttgaattggattttcatcgagaagctaataagtggatgccacattttcatctcatcattccaaatgacaaacaggctattaaaagtttacgtgtcaggatgaaaaataagagaaacatgaatgcacgaaagaatgtaataaaccgtcctatgctcgtgagtaaattaaaaaatccaatgcgacaggtgagttatcgttttaaagctatctggtggcgagtcgaatcaattcagtatgatgattatgatatacaggggagcaaggaaaggaaaaggaagcgctggactaaaaaataccgtctatttcgtaagcaatatgttgattctctgattaagctagattctattggtatagctggattgacttttatgtataaggtaaggaagtatggtgaccatttgatattaaaataa

SEQ ID NO: 180425 - DNA, 1689 bp, Klebsiella oxytoca
atgaaagtatataaagaaagtttaagtgacaaagaagaaaaattacttgttacattgttggctcgtacaaaaatttccgaattatgtccagttgcataccggtttattaaaatcactgattcgcaggggctggagtcgacatgtgtacttgtccctgctttggcacttgtcagtgtattagagttgaagaaaatgttattaaaatgtgggcataatcccaatgtaactaaagaatactggagtcgggcgtatcaggaggtcgttaaggaaacggataaggtaatcacactgtgctataagcctggtttttatggtgatgcttatttgcgtgttaatgataaagtagttggtgagataaaaaaagataaaccaatattacaccccagcgcaaaaaatcatttacctgtcgaggggaaacaggaatcattaaaattatggaaaatgaatgttgctccatacgcgctaaatagctcgcgcattatgttggctctgtgctgcggattttctggctttctccttaagctttcaggtatggaagggggcgggtttcatttatgggggatgagtagtataggaaaaacctccagtgcctacatgctggcatcattagcaggatcgccgaaagacattgtcgtactgtggaacaatacggataaagggcttgaggagattgccgtggctcataacgacagctacttggttctcgatgagtcgaagctgttagataaagacgtactggcagccgctaaaatcatgcagaaccgcgtgtatacgttatcgggtggtaaagggaaaacacgttcggcaatttatgagaacaaagttgctgaatggcaggtaagcattttcagtacgggcgagtgcagccttcaacaactggctgcttccgggaacattgagcgccttgaaggcgaaaatgtgcgtgtaatcgacgttcatgccgatgctggtagtgaaatggggatcttcgaatcattaccggatggtgttaattccagcaacgaacttgttcatgcgatcaaggatgcaactcaccgatattacggtagtgccaaacctgcctttctcaagcgcctggtggctgatattcaggatgatcgtgagagtgtgaaacggaagcttgaaaaagggattgagttctttctggataagcacaaggtagatcgtaactccggcattcaggtgcgtatcgccaaacgttttgccatcgcttatgtagcaggttccatggctgtgaaatatggtgttttaccctttacaaagcaggatgtgatgaaggggatctcaacctgctacctggactctcttgaggtggttttatctgaacctgaggtaatgaagtcaccattaggtcgttcgtttgatgcaattattgatttttgcaaaaaggatgatcttttaaatctgattggaaatgatcgtgtaacccaaacggcgattaaaaaggcaccggtcattatccacaaagttaaaggtcgtgccgtatatgcagttgataaggatctggtacataactgcttgccgaaatctcagcgcaaaggcatcctgatgctattaacaaaacaaggggtattattatccgatacgaataaggagtacagtactattcagattgtctataagcgtaagcaggtgggtcgtcgctactgttttatctgcaaacaccttgataaacttatgaaagaatag

SEQ ID NO: 180426 - DNA, 750 bp, Klebsiella oxytoca
atgaaggaagttttagagaaatgtactgtggaagactttaactacatatcagctactctggatagctatgtatctttcacaaacgataagcgcagaaaaacactattatctgcatatcaaaacaacccagcattgcatgctgaattaatatcacttattgacacacaaataaaatacttcggttcttccgatttggcttatctgaagaggcatttaattaaaggagagggttcaattccggccacagaaatcattgacgacgtatgcaaaaaactaaaagtcaatattaaagtaggtggttcaatagaatcaaagctggaaaaactagtactctctgttgttgagaaagaattattaagcaagacaccagaagaattgtcaaaatctttcgaggaaatgggagttggtgatattgacagagaggagataatctcccatatcaaaaagaatggcaaagtggcaattttgcctattgtatttcagatacttggccctaaaattgcgctgggaatagtagagacaattatagtcagccttatcgctcagatgattggaagggaggcagcgaaacaactcgtaaaagaattactcaagcgtaacccctggattaatagcttaggacccattctatgggctatatctggagcatggattgcctatgatcttcaaggcccggcttatcgcaaaactgtgccaatttgcctgtatcttgggatcgtggcattgcgtgatggcgaagaaatgctttga

SEQ ID NO: 180427 - DNA, 453 bp, Klebsiella oxytoca
atgaataccgatttgatgcccaatttctggaagctgtcacatggctggaaggagttctcattcctggatatggtcgaatgtattgatgaaaagctcgtctacattcaccgcacgaccgctggtaaagggcagtcttccgtcagccaggcagaggagtttgtaaacgctccgattggcgattacttctacctgactcacggtaatcagggtgtatacctgcttggtcagttcactggcccggttaactacttcactaaacacagcgatggctggatggacagaccattccggctgatccacaaagctaatgccagagaggcgtattatggcgtcgagaaatggtggacacctaatcacaactctacctttgttaaggttccgcaccacgaatatgatttatttgaagaactgatattgatgccctatttcgatatcaacctgaaagatttttaa

SEQ ID NO: 180428 - DNA, 1473 bp, Klebsiella oxytoca
atgaaaccatacattacgcataacaatatccttgtgacagattcaacgctggactatttcaagacggtcgttttcagtattccttataatggtgtgccaagtctgcggcgtcccttttatcgtaatattgcagtatttcttcagcatgttatatgtgtcgctacctgtagccgtaagaacaggaaaaaagcaaagattaaagcgaataaaaaatggtcttattctgtgcctgtgccatttgagctgggtagggataaacttcccggagtatttaagaaaagtgggccgacgcatgaacgtgcaatggaggcactggcaactgcgggaatcattaaactaaccgggtattcaaatactaaccatttatgccgggaatatgctgtttctcaacgttttctgcgtaagttgtttggcaacgaccgcgaggcataccttagccgtcaggatcgttaccattatctgactgacattttcaccaagcgtaaaagctactcatttgatgatttgatcggcgttgcgatcgaccgtgggcagaacgctaaacatcagcagtctaaacgcgatatccctaacgctgccttcagggagctggtagtgagtgtctggaacaaccttgagccgcttgaaatcaatctggatgcactacttgcttatcatcgcaaacatcctaccaagaagaacaaaatattcattttcaacttcctgtcgcgactggctgaaacaggcgtggatttggtgaaggaatcaccgctaacggtttcttacaggcagtcgtataaaacagcgtacatcggcggtagatcctttgaggttggcacaggcttccagactctaccgtctaaaatgaagtgggcgtgtctggcacgtggtgtgaactatgacatcaagggatgccagcttgagatactgcgacatgagctgttgagtattggcatttcggctaagtcgctggaggtgctggaaactcaatatatctgccgggtattgcgtattgctgaggaattggtgaagcaattccggttttccagtgtattcaacgctgggttcgttacgctatcgcttaaatccagaacccgacgcttgttgaatcgtgagctaggtaaggtagaagcaaagcgagtactgaaacgctggaagcatcttctgaaacccctgaggcgagatctggctttactgctggatcattatgaaggcacagctaaaaccaatcgttacggtaaatgcgttaccaatgcggtagggcaatctttcaacattacctacaaagatgtggcagcgcgtaaacgcaggaagtcagatgtgatgcgccgaaagctgttgtcgcacatgttacagggactggaaagccgggctgtctacgattacgttgccagtcataagggtgtttgcgcactggaacacgatgggtttgtttcatatgaggaggtaaccgattggtcccatccataccttttaattgagaaaaagcattaa

SEQ ID NO: 180429 - DNA, 1536 bp, Klebsiella oxytoca
atgaagcaagaaacgatcgttcaaaaaatttggagtctctgtaacattctaagaggtgatggtatcacctattatcagtatgtttctgaactaagttatctgctttttctgaagattgctcaagagaatggttcagaaaagctgatacctgaaggctaccgctgggctgatctcgaatcccatccagaagcaggattattagggttctatcaagagatgctcacccacttgggtgcgcatgttaaaaatgaagtcataagagagatttacgcattccctacaaccgttttctcccattctgaaaatttaaaagctgttatagatggtatttcaaagatagagtggcaccaagtaggaaaagatggctttggtgatctctatagcggcttaattgataaaagtgctcaggacacacgttcaggggctgggcagtacttcacaccacgttctttagttaacactatagtgaggttaatacaaccaaatcttggggacttaattcaagatcctgcaacaggaagtggtggtttcttagtttctgctgacagctacatccgaaacaaatactcacgagaagaatacctaaaaaattcacctaaataccaaggggtggagatagaaaaaaatactcgtcgcatttgcctaatgaacacctttttgcatgatttagatgcaaaaattatttatggtgatgctctgactgatgacgtggcagaattagatgaacccgatgtgatcgtagctaatcctccctttggtaataaagctggggggcagcgccctttacgaaatgatattccatttcctaatgcaaataagcaactcgtttttttgcagcatatttatttgagtcttaaagctggcggtcgtgctgctgtagtgttacctgataacgtactatttgaatctggtgtcggtactgatgtacgtcgcgatttaatgaataaatgcaacttacatactatcttgcgccttccaactggtattttttatgcccatggcgtcaaaactaatgtgttgtttttcaccaaaggttcagccaaaaatagataccaagaagaaaactgtactgagaatgtctgggtgtacgacttgcgcaccaatatgcctagttttggtaaacgcacaccctttggtaatcctgatattggtttttctcctgaagagtttggtacagatccgcacttaggagtctttgagacagtgtttggtgacaatcctgacggcactagtgaacgtaccgagggggaatacagttttggtgctcaacagattgaattagatgtagatgctattgaagaaaaccagaattttgacgaacgactggcacattctcgctggcgctgttttggccgtgagtggatagctaatgctaaagatgattcgttggatatttcatggctaaaagataaagacaatgtggatgcagctaatttgccggagccagtagtactagcgcgggaggcaaaggaagaactcgaagctacactgagcgaactggatgagctattgattgcgttagaaggggcaagttga

SEQ ID NO: 180430 - DNA, 1614 bp, Klebsiella oxytoca
atgaataagattcatttgccgcaggggtggtgcatttccacgatctctgatatttcaattaaaggagaacagcgcaagccttcaggagaagaatcttttatttatgttgatattgggagtatcaatagaaatttaaaatttatcgaatcaccccaaacattaattgggaaaaatgcacctagccgggctaggaaaattattaatacaggagatgttcttgtatctttaacaagacctaacctcaatgctgtcgcattggttccaagtgaattagacaaccaaatagcttcgactggctttgaagtcatcaaatcattattagttgatagtcgttatatttttatgttgactcgttcaaaagactttattgattccattagcggcgttgtacaaggtgctttgtacccggctgcaaagtcttcagatgtccaagcttataaatttccattgccccctttggcagaacaaaaagtaatcaccgacaaactcgacattcttctggctcaggtggaggctactaaagcccgacttgagcgcatacccgatatccttaaaaccttacgccaatcagttattactgctgccgtcagcgggaagttgacggaaggttggcgagaattaaataagcaaaaccttggtatgtggaaacatggggttctcggtgattttgttgaaaaaccaacttacggctcatcggctaaatctcagccagaaggcctcgtgcctgtattgagaatgggcaatttacaagacgggaagatagattggacaagcttagcctatacatctgacccagaagaaataaaaaagtataagctattcgcaggtgacgtactgtttaatcgtacaaatagtcccgagttagttggtaaaacctcgatttttcggggggaaagagaagctgtatatgctggctatttgatccgaattaaatgcaaagaaaatttgaaccctgagtttttgaattaccttttaaatagtcaagatgccaaagattattgttatcaggtaaagtctgacggcgtaagccagtcaaatatcaatgctcaaaaacttatagcatatacaatcagtgttccatcaatggtagaacaaacggaaatcgtccgccgcattgaagatattttctcatttgcagataacatcaaactaaaaactagtgtcgcattagaacgagtaaataatcttactcaatctattctggctaaagcttttcgcggtgaactctctgctgattggcgcgccgccaaccctgagttgaccagaggtgataacagcgctaaagctttgcttaaaaaaattcaggcacaacgtgaagctatcgtaaaagaacctaagacaactattaaaaagaaggctgacagccgtatgagcaaaaaaatcatcaaagttgttgaagcgttgaaacatgccggggaaccgcttagtggccaacaattgttggcggcggcgggctaccccagcgacagtagcaccgagcaactggagcggttctttttagatattcgtgatgctcttgtaatcgaagagtctattgtaaaacttgatcgcggtgacgatagccaagattggttcactttggctaaattaccaatgaataaagcaaagaattaa

SEQ ID NO: 180431 - DNA, 1623 bp, Klebsiella oxytoca
atgaaagtcgacaaactgcatattcgcacacgtttcaaaaatcttgaaaatgtgaaagtggactttgatgaagaccacctaatgacagtcgtggtaggtcgtaatggttcaggtaaatccaacgttcttgaagctttggtcgctatattccgaaatcttgatttaggagaagccccaacgttttcttatgagttgtactttcaacttggtgaagaaggcggtgtcaagtggtatgacgttaaggtggatgcagatccaaaccgaggaacattagcaaagcaatatcaagtttctgtcaaagataaacacaatagcaaagcggatttcaagctcatacctttctctaaagtgaagcgtgataagagaactaagcaagcggaatttcttcctaactttctgtttgcctattattccgggccatcagatcgattagaaaaatattttagaaagcatcgtgatgattattatcgcgagctgctctacaacgacctagacttgaaagctgatattcggtcgctattttatgcaaagtctcttcatagccaatttgttttgatggctttttttcttagccctgagcttaaaagagaacgcacatttctagaaaaagagcttggcatagaaagtcttgattcaatacattttgtattgagacgtccggcatgggaaagagacaaagaggacagattctggggcgctgatggtgtcgttcgtgaatttatagatctactttatccccatgctttagctcccgtgaaggtgactcgaaatgaggacactagtctcacagggaaaaataaaaaaaatgatttcattcatatatttctgccatcagttgaaactctgcatgaaatagccaagcagctaacgccgagtattttctttaagatgcttgaaagcacagttctctctgaaattatttctgaagttcatgttcgagttaaggtaacttacgctcaaaatccaatcacattccaggaactcagtgaaggtgaacaacagctactgactgtattaggccttcttaaattcacgggtggtaaagattccttatttttactagacgaacctgacacgcaccttaatccctcatgggccgttaagtaccttaaattcctgcgtgaattcgtacctaaccatgagacctgccatttgctgatggtaacacatcacccattagctattgctgaattagagaagcagcaaattcaagtaatgtggagggactctaaatttcaagtacatgcacaagaaccagaggagagccccaaaggcatgggctatggtggaattctgactagcgacatgtttggtctacgaaccaccttagataatccaacggaacgtttattgcgattgcggcgtcgctttactgaaaaatctgaattatcccctattcaggctgggcgtttaaaaaaaattgataaagcgatagaggggcttggttttacgacagcacattgggatgaggaatacgctcagtatttgcgtgtgcgtagagaagtggaaatagaatctgaagctgctaccgtcacgcctgaacttaaacgattacgtaaagagcgcgccaaagcgatcgttcaacgcatacttgctgtagaacgggaagagaataaaaaatga

SEQ ID NO: 180432 - DNA, 126 bp, Klebsiella oxytoca
atgatcgacgtctacatccgttccttgctgtggagcctctgtgtaccaacacttgtaattgaacaaggattccagtacatgtttcaccgctttccagtgatcctgattttttttaataatctctga

SEQ ID NO: 180433 - DNA, 330 bp, Klebsiella oxytoca
atgccccggttttctaaggaaaagcatgcccgtaagtttatgcgtgccgaccagtctattttattttataacctcaatcattcagattttgtccgttgccgcatagaattacgagaccagattgataaggaagtcaacgctgcaaaaaggtactttaacaaactggagacaggcgacgcggataacgactttgcatatgaacagacaatttgtcgtttgttggaaatgacaagtaaaagggcaccattttccagtttttgtatcgcttacttagatgggttcaagcataaaccggaatatgaaggggtgcttgatgcagtctatttatga

SEQ ID NO: 180434 - DNA, 618 bp, Klebsiella oxytoca
atgagccgatactatgtatccagcagtgaaggtcagtatgagaaagactctggcgagcaagttttggctaacaagcaggggatcgctacttctgatgagatggatgaggctgaacttgtcctgttagaacaactctaccagtctgtttttgaagaacagttcccggaagggcagctcagcgtagccatgctaaaaagctggcatcgccgctggttaggcaacatctacgagtgggctggacaagaaagagcggttaatatcagcaagggcggctttatgtttgcaccttcagcacaattgccaaaactactgaacgaattcgacacaaaatatctggctcaatacacgccgtgtcgcggcatggacgaagaacaactcatcaccgctatcgccatcacccatgtcgagctgatacttatccatccgttcagagagggaaacgggcgattgtcgcgactgttagctgacgtaatggccgttcagggaggatacaaaccgctggattatcaaagctgggagcaaaacaaaacccagtatatctcggctatccatgcaggtatatcaatggactacgagccgatgagacacttggtaagagaagcattaagaagggattag

SEQ ID NO: 180435 - DNA, 1239 bp, Klebsiella oxytoca
ttgattgagattcatctcattaattttaattataaagatatcatgacgatacatttactaccgacgttagccagcatcgctaatatcattgatatgattaacccacggctaaatctgcaccatgtcagaacggcgtttatcgcatcgcatctggcaaatttagtcaatttttctgcggcccagcggcgtaaaaccattctcgccgctcttattcatgatgtcggcggattaaatgaaaagtcgcgccttgagccgctcaactacatcgataatgaacataataatcacgcgctaatcggcagcgagttgcttagccgaattccgctgtttcgcccgctcaacagaatcgttcgctatcatcacacccgctggcgtaacggtctggggcgttatattgaaggtgagcgggtacccgaagagagccatctgctcttcttcgctgaccggctggatgtactttattgcgagcaccgtaccgaccatagcgcctttttaagcaacaagctggtcgacatcgttgctgccggagctaatattttttataaacaggagtatattcaggccttcagaacgctctccgccgatgaccatttctggtctgtcatggcatccaccgactatcgcgattacattaacgcaatctccggcgttcataacgaccccctctctttacacaacctccgcgatattgctgagctggtctcttttattatcgatcaattcagtcagcagacgccctggcactccgccgccgtcgggcacattgccggttatctggcgacaaaaatagaaatgagcgcgacgcaagcgctgaaagtagaaattggcgggttactgcataatatttcctgtctggatcatagcccgccgtcaaaacgcgttggtgcgtcagacaacgcccggcacacgctttatcctattgaaggtattgatgatatttctgagtggatggccatgcaaaatggccccgcgccgcttcaattacccgaggaaatccttacgccagaagccgtgcttatcgcggtgagccgacgggtggtccatgcgctaaatagaccgaaagcggaagagaagtcgctggcgcagttaataaaaaataacccgggagaggaaattcccccgtttatgttatccctgattgcccaatattccccacaaattatccaggtctatcgtgcaaccgctggcgaaatacaggcgttaatgaatcgcattgcgcaactcacgcattccctttag

SEQ ID NO: 180436 - DNA, 813 bp, Klebsiella oxytoca
ttgaataaccgcgacaagcgcccggtcgggcgctttgttcttaaaagtgaatgttatacaatgctgcaattctcagcactctaccggacagcgatcttgagcataaaatccattcaaaaacagaacgttgtaaatgaaatttatgatcagatcagcgcaaagctgctggatgggagctggccgccgggtagccgccttccgtctgaagcggagctgaccgcttcctttaacgttagcagggtcagcgtgcgcagcgcggtccagcgctttcgcgatctcggcatcgtcgtcactcgtcaggggagcggtagctacgtaagcgatcactttacgccgcagatgctgagcaacgatcctcgtcccatcatgcatcttagccgcgaagagtttcacgatatgatgatcttccgccagaccgtggagttcaaatgcgtggagctggccgttactcatgccacggaagaggacattcttgagctcgaacaggcgctcaacaatatgctgattaacaaaggcgactacaaaaagtattcggaggcagactacgctttccatctggctatcgtcagggcctcacacaacagcgtcttttataacgtaatgaattcaataaaagatatttattactattatcttgaggagctgaatcgcgcgctcggtatcacccttgagagcgtagaagcccatatcaaagtctacatgtcgataaaaaatcgcgatgccagtacagcagtgaaagtacttaacgaagccatgtcggagaacgttaccgccattgataaaattaagtcttcaaccagcagcaacaattga

SEQ ID NO: 180437 - DNA, 1050 bp, Klebsiella oxytoca
atgaacactgagaaaataacctgtaacgcctgtctggcacatgctgaaaaagacgtgcggtttgcaacacgcgatattgaatacggcaagcatgatgtgttggttaaagtggcctacggcgggatctgcggttcagacattcactattatcaacatggtcgcgcgggtatgtcgattttgaaacaccccatggtcatcggccatgaatttgttggcgtggtggaaaaatgtccggcagagagcgggttaaaggttggtcaaaccgttgctatcaacccctcttgcccgtgtaaccaatgtgagatgtgtctttcgggcaaacaaaacatgtgtagctcaatgcgctttatgggaagcgcgcagtttaacccgcacgtgaatggcggcttttctgaatacgtagcggttaagccggaacaatgtattgcgtacgatagtcgggtgccggccaacgtcatggccttttccgaacctctggccgttgccatccacgcagtgaaaatggcgggccagttaattggaaaacgtgtactggtgattggggcaggccctatcggctgcctgattctggcagcggccaaaagcgcaggcgcctctgatgtggtggcctgcgatttaagcccgcggtgtctggagctggcgcaacagatgggcgccacggcagtgatggatcctcgggatgaaaagcgcagcgcgcattatcagcaaaacagaggctacttcgacatagtcttcgaagcctccggcgcacctgcggcgatagcatcaacggtggatttcacccgcccaaccggaacgattgtacaagtaggtatgggcgtaagcccgataacctggccggtctctgccatgctggtcaaagaaattaatctggtaggctcgttccggtttattgacgaatttactatcgcagtgcgctggcttgaagatggccgcattaatccgtgcccgctaattagcgccgaattctcccctgccagcattgaacaggcattgataaccgcggcggacaaaaatatctcagctaaggtcctcattcgctttgaataa

SEQ ID NO: 180438 - DNA, 1365 bp, Klebsiella oxytoca
atgaaggcttcaagatcacgactctttattctcacattgttatttattgtcaccgctattaactatatggatcgcgccaatcttgcagtcgcaggctcaaatatccaggatgactttagtttaacaccgacgcagctcggtttacttttttctatgttcacctgggcatatgcagctagccagatccccgtaggctatattcttgacagaataggctcccgcattctgtacggtggcgctattattttatggagcatatttacttttatgatgggcttttcgtcccaccatcttttctcgacagcgacggcatccttcgtcatgctattagcttgccgggcgttaattggtgtcgccgaagcaccgtcattcccctctaatacaaaaattattgctacctggtttccggatcatgaacgagcaagagctaccgccatatactccagcgcacaatatattggtctggctctactgactccagcgttgtcttttatcgtcgccaattatggttgggaaatgtcattctatttatccggcggcgcgggaatactgtttggcatatactggctgatatattatcgcgacccgcagcacagcactacggtgaatcaggcagagcttgattacatcaaggctggaggcggctatggctcagagaaccaatccgccgtcagtacaaaaattggctggcaggatattaaattcttcctctgccggaagaccgtctggggcctgttcattacgcagtttgcctgttcctcaacgctctatttttttctcacatggtttattgtttatctggaaaaagggctgcacctttccatatcaaaagcaggggttggtgccatgctaccttatattatggcaatgtttggagtgctatgcggtggcacactcagtgatttactgctgaaaaaaggaaaatccagaacttttgcccgtaaattaccagtaatggctggtttattagttacaatgattattgctttagttaacttttttgaagaccagccgattattgctattgtgatactttccattgcttttttcgccaatgccttttcaaatttaggctgggtagtgtggagcgatgtcattccgcgaaatttcctcggaaccatgggcggttttttaaatatatgcggaaatctttccgggatcgtcagcccgattgttatcgggatcattcttgagcgcactcaaaatttccaatatgccatgtggtatatcgccgccgtcgccggactaggtctgctggcctatatctttctggtaggtaaaatagaagttattttacccggagaggataatccagatagccgcgataataacgcattgcacccggcaacaaataataaatcctga

SEQ ID NO: 180439 - DNA, 768 bp, Klebsiella oxytoca
atgagcgcattattcgatttaacgggaaaaacggctctgatcaccggttcggcgcgcggtctggggtttgcctatgcggaaggcctcgctgcggcaggcgccagagtgatactgaacgatattcgcgaaacgctgctggcagagtcggtcgatgtgttggcaagtaaaggctacagcgcgcacggcgcggcgttcgacgtcaccagcgaagatgcgattgagaaagcctttagcaaactggatgcacagggcattcacgtggatattttgataaacaacgctgggattcaataccgcaagccgatggtagagctggagctggaaaactggcaaaaagtgattgataccaacctgaccagcgcatttctggtctcgcgcgccgcggcaaaacgaatgatcgcccgccggtccggcggtaaaattgtcaatattggttcgctaaccagccaggctgcacggcctaccgtcgctccctacacggcggcaaaaggggggatcaaaatgctcacctgctccatggcggcggagtgggcacagttcaatatacagagcaacgccattggtccagggtatattttgaccgatatgaataccgcccttatcgaagataagcagtttgatagctgggtgaaaaacagcaacccatcgcagcgctggggccgcccggaagaattgattggtactgcggttttcttgtcctcgaaagcctcagattatatcaacggacagattatttacgtcgacggcggctggttggcggttctgtaa

SEQ ID NO: 180440 - DNA, 1254 bp, Klebsiella oxytoca
gtgagtaacctgaaaatcaccaacgtgaaaacgattctgacggcgcccggcggcattgatctggcggttgtgaaggtcgaaaccaacgagccaggcctgtatggcttgggctgtgcgacgtttacccagcgaatcttcgccgtgaaaagcgctatagatgaatacatggcgccttttctcattggcaaagatcccacgcgaattgaagatatctggcagtctggcgcggtcagcggctactggcgcagcggaccgattatgaacaacgcgctatccggtgtggatatggcgctgtgggatattaaaggtaagctggcgggcatgccggtgtatgatttgttaggcggtaaatgccgcgacggcattccgctgtattgccataccgatggcggggacgaagttgaagtcgaggacaatatccgcgccagaatggaagagggataccagtatgtacgctgtcagatggggatgtacggcggcgcgggtaccgacgatcttaagctcattgcgacccaactggcgcgggcgaaaaatatccaaccgaagcgttccccgcgcagcaaaacgccgggaatctattttgacccggacgcttatgctaaaagcgttcctcgcctgtttgaccatctgcgcaacaagctgggattcggtgttgagttcattcatgacgtgcatgagcgcgtgacgccggtaaccgcaattcatctcgccaaaacgcttgaacaatatcagctcttctaccttgaagatcctgtcgccccggaaaatatcgactggcttaaaatgctccgccagcaggcctccacgccgatctctatgggggagctgtttgtgaatgtgaatgagtggaaacccttaatcgacaataagctgatcgattatatccgctgccacgtcagcactatcggcgggattacgccagctaagaaactggcggtgtatagcgagtttaacggtgtgcgcaccgcatggcatgggcctggtgatatctcaccggttggggtttgcgcgaacatgcaccttgatcttagctcgcccaacttcggtattcaggagtacacgccgatgaatgatgccttgcgcgatgtcttcccgggatgcccggagatagaccacggttatgcctacctaaatgataaaccgggtctgggaattgatcttgatgaggccaaagcggcgaagtatccgtgcgaaggcggcattccgtcatggacgatggcgcggacgccggatggcacggcttcaagaccgtaa

SEQ ID NO: 180441 - DNA, 780 bp, Klebsiella oxytoca
atggataaccgctatagcgcgcgttcgctgtcgctgcgtctgggtaaccggcagattattcatgatgtttcgctccagctctgcggcggtgggatgacggcattgattggccccaacggcgccggtaaatcaaccctgctgcgcctgttaaccggttatttaacgcccgacggtggcgaacgggtggtggaaggccgtccgctggagagctggtcggcagaaacgctttcccgccggcgggcggtgatgctgcagcgtacccagcttcacgccgactggccggttgagacggttatcgccatgggccgttcgccgtggggcggcgtagcaaatgaggagatgatccgccgggtgatggaagagaccggctgcgatcatctggccgggagacgctacccttccctctccggcggcgaacagcagcgggtgcagctggcccgctgtctggcacagctgtggcgcgatggcgcccccgagggctggctgtttctcgatgagcccacttcggcgctggatctctattaccagcagcacctgctgcgcctgctcaaacgcctgacccgcagcagccggctgcacgtctgcatagtgctgcacgacctgaacctcgcggcgctgtgggccgaccggattctgctgctgtatcaggggaagctggtagccgagggcacgccgcaggaggtgatccagcagccgattatcagccgctggtacggcgcggaggtcagcatgggtgaacatcccgatgcggccgttccgcaggtctatctggcgccgtga

SEQ ID NO: 180442 - DNA, 1080 bp, Klebsiella oxytoca
atgatcaaattgatggtatacccattcgcgctgctggctctgagctttggcgccagcgccaaggagtgccatcttgacgatggcagaagcggctcgttaacgctgaacaacggtgtaaccacctatccaataacattcaagacagcattaggtgaccagggaagcaagaaacccgagctgcttaccttcgacattcagtccagttacgctctccggaccgaatgcgatgcgggaaacgatggatttgatttttatgcaaaaaccaacccaagcgccacgccgaccaccgtagacggcagagcacttttccctacaaatatagagggtatttattatgcggtaagaatatacacccaggccggcggcggcggatatttgccagaggttaacagcagcaaggactgggtttgggtcagcggcggcaatcagtcgtactggaataaccagcaattaaagtactctgtgaccttgtatcaggacgtcccttttcaaggaaacctcaaccacgacatgagaatttaccctaaagattcaagaacattgggtcaaatccgcgtcggttcggcagattcagatgacaataacccgtggacgattaacgtcaatcccagcagctttagcatactggtcatggccgcaacgtgttcttccgccatggtcaataacggcaccaataacgtgaacttcggcgacgtcatgttctcatctttccgggaaggctactggccgagaacaccgtttacgttaaggttaagcggatgcaataacaccgtctgggtacgtatgaagcttgccacacctaaatcagaattgagcgcgaccggcggcgtgacgctaatgaccaatacgctcaccggcagcgatgcggcaactggcgtaggagtagggttagcgtcgaacttcactaccgccgatggtttcaacctgcagcccggtttagaaatatggtcgccgtcaacaagcgtcagcaattcgtcatcatatgactatagctttgatgcctggctttcccgcacatccggtgagctaaagccgggaaaatttaaagcgataggcacgtttaccatcgattatttctga

SEQ ID NO: 180443 - DNA, 627 bp, Klebsiella oxytoca
atgtcattctgtatccgtctaatcggcccagttgggaaggcgttgctggttgtgggagcggcaggcgggctgtgcatggctccttattttgcggatgccgcggatgaaaataaagaagggctggacgtcaccctgacagccaatattgtggaaaatacctgccagatttccatctctggcaatggaaccgttcatctacctacggtttcccgccgttggttttataacgatgacggcacttcgcgtttgcagcccggcgaccctgccagcgggacgctatttagcgtgaacgttgaaagctgctcaggcgatgccacgacggtcaatactctcacctttggctttaagccacaaaatgggatctggcccgtggaaagccagcaggtatttatcaatgaagcgccagccgccgcaggcggggcggagaacgtcgggattgtcattttttctacccacgataaccgtaacgttgtgaatagcgacggtagctccgccgtggttattgatgtttcaaaagcggataactatctggccagctacgatttttatgcccgctatcaaaatacgggcaccgttaccccagggaaagttaacagtcatgtcctggtagacgctatttaccagtga

SEQ ID NO: 180444 - DNA, 558 bp, Klebsiella oxytoca
atgaaaaaaatctcttttctgggcggtgttgtcggcacgttgcttttttctgcgccctctattgccgagataaccggaaccagcagcatttccgccacttttacctcgacaattcaagccggtacctgcacggcgcagattcagaacgccagcggtcagcccatgagtacgctgaatttcggcgatgtatttaaatccgatctggttaagcaaagccgcagcgaaccgttcaaggtagcctttagcgactgttctggggtgaaatccgccaaatatcaagtcattcccggcagcggtggcggctgctcgggcccaagttcgaacggcgactcttttgccgcaggcaactcaacggcttttgaagtgtggcaaggggagtccggaacgggaacgttgcttagctgtaataacaagccctcacaaacgctcagcatcagcggtcgttcgctcagcgtcagttttgcttcgcgcattgttatcgctaaagatagaaaaatagccaacgtcacagcgggtagcgtcagctctcccgtcacgtttgttatcacctatcagtaa

SEQ ID NO: 180445 - DNA, 582 bp, Klebsiella oxytoca
atgaagataatcagttttagaaaacgctgcctgctgggctgtagcggcattttactcgctaccgcgttaccgggtcaggcaacatcgctggatgtcacctttaccgctaacctgcgcgaaacgacctgcgatatggccattgaaggcggcagcggcgatggcaaaaacaacaccattcctgtcggcgcgaatggcatagtgagcctggataaaattatcagcggcgacagcgcggcgcaggcaacctttaagctgaaaatcacggaatgcccgagcagcctgcagtcgcttaaaaccaccatcagcgggacgaaatcggcggaaaaagagacggtgattctgaatggtaacgcaacggcagatgctgcgggagcccttgggatcactatcgccagagcttccgccaccgatgcccctttcgtgattaatgcgggctcggacacgggtcgactggtatggaccagccaggaaattaacaacaaagaagttcctctggtcgcgacgctggttgaaacgcagacgggacaaggcacgacgggtgcctttagcgctttggccactttcaacttcacctacgaataa

SEQ ID NO: 180446 - DNA, 2496 bp, Klebsiella oxytoca
atggcggaacaagcgctttcagcggcttcagatgaagttgaatttaacgatcagtttttattcagtaccggtagcaatattgacgtcagccgtttttctaaagggaatccggtgccgccgggcacctataagacgcaagttttactgaataatcagccgaagatgctggtggattttacctttaatgataacggtacgcctcgcgcaacgccctgcttcaccgcaaagctgctggcgcaaattggcgtaaaaacggtgggaatggatctcgaatccgcggcctgtatcgatattgcgcaacagtatccgcaatcgacgtggaattatgatatcggcacccaggagctctcgctctcaatgccgcaaatttacacccttaaacaccctaacggttacgtcgatccttcactctggcagaacgggattaacgccgcgatggtttcttacgatctcaacgcctggcataacgaaagcgacagcagcagctccgattcggtttatgccggattgaagtacggcgtgaatgtcggcgcctggcatctacgggccaggggcaacgccaactgggatgaagactccggtagcgattacaccagccaggatatttatctccagcgcgatgtcgccgcattacgctcgcagtttctgatcggcgactcttatacccgcggtgatggcttcgattcgttcagcctgcgcggcgtacgtttttacaatgacgatcgcatgctgcccggcggcgcctcaacctacgccccggagatccgcggcgtggcgaaaagtaatgcgaagatcgtgattaagcagaacggtaataagatttatgaaaccaccgtcccaccggggccctttgctatcaccgatctcagcactaccggctatggtagcgacctggatgtctccattgaagaagcggacggcagcatccgtactttctcggtaccctactcatcggtcactcaaatgctcaggcccggatatggacgctgggatatcggcgccggggaactgcatgatgacggtttacatgacaggcccaggttaggttacgccacgggatattacggcttaaacaacaccttcaccggctatgctggctttcagtatatggatatcggctactacgccgggttagcaggtatcgcgacgaatacgcccatcggcgcgttcgcttttgacatcacgcattcaaccaccgctatggataatctggagaccctgacgggccagagctatcgcgtgacgtggagcaaactactcagggaatcaaatacctcattcaacattgccgcctggcgtttctccaccgaaaactatatgccgttacgcgacgcggccaccttaaatagcaacgtcaaacgtcatgataatgcgtcgcagcaggagtactcccgttttcagcggatgaaaaatcagttccaggtcaatgtgagtcagccgatatccctttgggaatccagcagcggcaacctgtatgtaagcggtagctgggaggattactggaacaaaacctcctctacctcccagtactctatcggttataacgacgcattttcatgggccagctatagcgtttcactccagcgttcctataacgaatatggcgataaggacgacagcgtttacctcaatctgagtattccgctggaaaacctgctgggacacaacaaacggccgctcggtttttcaaccatcaataccagcctcaacagcgacctgaagtcgaacaataacatctccaccagcgccaacggcaataccgacgactatcgcttcagctacagccttaacaccagcgccagccggtcagatggctcgtcaatcaaccaggttggcggttacggcagctacagcagcccgtgggggcccttaagcctgtcggcttctgcttccgatgatgacagccgccagtactccatgagctacagcggcggcatgctgctgcattccggcggcttgactctggccccgggcagtattggcgataccgataccctggcgctggtgcacgcctccggggcggaaggcgctcgtttaacgaatggcgacgggcgtattaatcgctttggctatgccattcaaccttacttatccgcctatcgggaaaatagcgtcggtctcaacatcgacacaatggaagaagatgttgaagtgaagaataccagtacggtcgtggtcccccgcagtggctccgttgtgcgggttgatttcgaaaccaacgaagggcgctcactcctgctggagcttcagcgctccgacaaggggtttatcccgctcggtgcggatgtgcaaaacgaacggggcgaatctatcggcacggtcggacaggccggaatggcctatgttcgcggcgtcacggaaagcggaacactacaggttatctggggaagcggccacgaaggacgctgcaccgttcattatcagctcgctgatagcggtgccgatagaaaagtggggcttacccgtctactgagtcatcaacgctgccagatgtaa

SEQ ID NO: 180447 - DNA, 564 bp, Klebsiella oxytoca
atgggcaaaaagattctgatgctggtgggcgattacgccgaagattacgaaactatggtgccgtttcaggcattacaaatgatcggtcatcaggttgatgcggtctgtccagataaaacaaaaggcgacttcattatgaccgcgatccatgattttgacggcgcccagacctacagcgagaaacccgggcaccgctttgttctcaacgccgattttacaacggtgaaagaacaggattacgacgcgctgttaatccccggcggccgggcgccagaatatctgcgcctgaatgcgcaagtgcttaaactggtgcaggcatttgacgcagcgcgtaaacctattgctgccgtttgccacggccctcagctgttggcagctgcgggggtattaaaaggccgcacctgcagcgcctatccggcctgcgcgccggaagtgcggctcagcggcggacattttgccgacatcgatatcgatcaggcgcatgtggatggcaatctggtgaccgcccccgcctggcccgctcatccgcaatggctggcgaaatttgccgaattgttgcagtag

SEQ ID NO: 180448 - DNA, 543 bp, Klebsiella oxytoca
atgccgtacaagctctatacagccgtgttgcttctcgctgccgcaagtttctctgcaacggcaatttctgcttcaaccccttcgattggcaatttgatcaatgaacgtttgtccttgatgaaagacgttgccggatataaagcgcaacatcaccaggcgattgaagatctacagcaagagaagaaggttctggagagcgccactgctgatgctgattcgctgggattaaaaggcgagagcgtaaggccatttattcaggcgcagatggacgccgccaaggcgattcagtaccgctatcgcgccgactggttggccgcgccggaaactgactggcagcctcgcccgcttcaggatgtccggacgcaaatcggccaacttagccatcgtattctgcaaagtgtggcggcacgattaaagtccgggcaacctctgacggaacagggccaggaggcatttatgcacgccgtgcagcagaagaatttacacgagcaggataagcatagaatctgggaaacaatgaaagggatttcgttgaaagattaa

SEQ ID NO: 180449 - DNA, 735 bp, Klebsiella oxytoca
atgatcccgatgattttgtttaatcaggtcaataaatggtatggcgattaccacgccctgactgacctcagtgccgaagtcaaagcgggggaggtggtggtggtttgcggcccctcaggctccgggaaatcaacgctgattcgcacggtgaaccgcctggagcctatcgagcaggggcagattctgtttgatggtatagatatccacggcagcagcatgcgtctgaaccagttgcgcacccgtatcggtttcgtctttcagaacttcaatctgtttccccacgtgtcggtgatggaaaacatcatgatgtcgccagtaaaagtgctgggcaccaaacgttctgaggcgcgtaaacacgccggggaactgctggagcgagtgggattgtcgcataaagctaatgcctatccggcccagctctctggcgggcaacagcagcgcgtcgctatcgcccgtgcgctggcgatgaagccgccggtgatgctgttcgatgaaccgacgtcggcgctggatcctgaaatggtgggggaggtcttaagcgtcatgcgctcgctggcccaggaggggatgacgatgatgtgcgtgacccatgaaatgcattttgcccgcgatgtggccgataccatctggtttatggatcaggggcaaattctggagaaaacaacgccgaagcaattctttagcgcaccgcagcatccgcgagcacggcgtttccttagcgatttactgaattga

SEQ ID NO: 180450 - DNA, 771 bp, Klebsiella oxytoca
atgtttgacgtttttaccattttgcaggaccacggcatgctgttcctgatggggcagtatccgaacgggccgctcgggggcgttctttgcacgctgttaatttcactgctggcggtcgtgctctctttcccgctgggcgtgctggttgggctggcgaggttgtctccgtggcgcgggctgcgctgggcggcggcctgctgggtctacaccctgcgcggtatcccgctgatgatggtagtgttctggacctacttctgcgtgcccttgctgattgggcagaatatcagcggtttttccaccatgctctgcacgctggttatctacgaaagcgcttacatcgccgagattgtccgcggcggcattcaggcgttaccgcaggggcaatatgaagcatcacgcgcgctggggatgagttatctgaaaaccctgcgactggtgatcttaccgcaggcattgttcaacgcattgccaagcctggtgagccagctggtgtcgatcatcaaggacagtaccctgggctatgtgattaacgtgccggaactgacctatgcggcaaaccaggtcagcaaccagctcctgaccaagccgtttcaggtcttcgccatcgtggccctgagctactacatcatctgtttcagcctgacatggctggcaaacaggctagaaagctggattgccaacaaacggctcaatgcgcggccgcagcagggagaagagcagaacgatcctcttttctttgccaaccgcaaacttaataaggaaacatcatga

SEQ ID NO: 180451 - DNA, 696 bp, Klebsiella oxytoca
atggcgcttgattttagtaccattttaacaggccactatggcgagatgatcgtgaagggcgcgaccgtcacgctggaactggcgttgggcgcctggctgctggctatgtttatcgcactgctgctgctggttatccgcctgtcggaaaaccgcatcgctgtgcgtctggtggcagcttacgtctcgtatcaccgcaatgtgcccacgctgattcagttgatgatgtggtatttcgccattccgacgctgctgccggaatcggtacagatgtggattaacgatttcaacgccgagttcctcttctcgatgttcgccctgggattatgccaggcggcttacttttccgaagatattcgcagcggcctgcgtgccattcctgacgggcaaaacgaggcggcgcgtgcgctgggcatgaactatatgcgggcaatgggctcggtgatcctgccgcaggggatccgcaatgccttgcctgcactgattaaccacaccgtgctgctgtttaaaaacaccagccttgcgatggtcatcggggtgaccgagttaacctatgtgacgcgcgatcttgagaatcagaccttccgcacttttgaggcctatgccattggcacgttgggctatctggcgttttcgctgctactgatggggctgggtgcgctgttaggccgtcattttcaacgcgtgtacgcgaggtaa

SEQ ID NO: 180452 - DNA, 753 bp, Klebsiella oxytoca
atgccattttcagattataaagtcgccctggtcaccggtgcatccgccggtatgggcgaagccattgtcgagcgtttatgccgggaagggattacggtgcacgccgtggcgcgccgtcgggaacaattagccacactggcggagcggactggctgtattccccatgccgtagacgtggccaacctcgacgcgctgacgcgtttatgcagcgatctgcaagtggacattctggttaataacgccggtgtatcgcatcccggttcaattctcaatgccagtgaagaggtgattgaaactcagctcaacgtcaacctgcgcgcggttttgcatctgtgtcgtttgctggtgccagggatgatggcgcgcgaccgcggtcacgttatcaacatcacgtcgattgccgcgatttacaacttcaacggcaactccgtttatcacgccaccaaagcgggcgttcatgcgctttcacgccagctacgcgttgactgctacggcaagcgcgtgcgaattaccgaaatctgtccgggacgcgtggcgaccgatattttcggcaatgtttctggcgatcatgaagatgcgcgcaagcgttttatcgatggttttgagctgccggaggccaaagacattgccgattgcgtggcctttgccgttagtgccccgatagcagtgaacatcggcaatattgaaataacgccgacgctgcaggtacccggcgggctttctacgatgcgtccaggcgaaagcgcagtctaa

SEQ ID NO: 180453 - DNA, 924 bp, Klebsiella oxytoca
atgaatctgcgtcgcctgaaatatttcatcaagattgtcgatgtgggaagtttaacccaggcggcggatatcctgcatattgctcagcccgcgcttagccagcagctcgcgacgctggaaggggaagtcaatcagcaactgttgattcgcaccaagcgtggcgtgacgccaaccaccgcaggtaaaatcctgtatacccatgcgcaggcgattttacgccagtgcgcgcaggcgcagagcgccattgaccgctcaggcatggagctgtgtggcaatgtctctgtggggctcgcccccggaaccgcggcgcaacagcttgccattccgctgatgcaggaggtacagcgtcagcatcctggcgtcgtgctttatttcaatgaaaacttcggcaccactttaagtgagctcatcatgaacgggcggatggatatggcggtgatttacgataaccgcgcgatccacggactgcgttttattccattgatgaaagagcacctgtgctttgtttgccccaatgcgcttgataagcccattaaagagatcgcgctggctgatgtggcgcgttacgacctgtttctgccccgcatttacaacatcatgcgtaaagtggtggatgacgccttcgtcaaagaggggctggattaccgggtcgcctgtgaaattgaatcgcaaaccaccctcaatgcggcgctggctgccgggctgggatgcacggtcatgccggaatcggccgcccgcgcgatgttgaaagcctctgatgcctggatggcaaaaatcattgagccggatgtccatgcgtcactgtcgttctgtatttcggatcatctgccgctgtctgaacctgccgaagcggtgaaatcgatcctgctgtcactggtctcgaaccgcacaccggataaccgccccctgacgctggtgagctaa

SEQ ID NO: 180454 - DNA, 1203 bp, Klebsiella oxytoca
atgcctgatattgccgatcgacttaaaaacatagctatttcagcgtccgttgcgatgacgcaaaaagcgcgcgatctcgcagcgcaggggattgacgtggtggggctttccaccggcgagccggatttcccaaccccaccgcacgccattgaagccgcctacgccgctgcgctggctggcgacacgcgttatccgccaacggacggaacgcccgcgttacgcgccgccattcagcgcaagttcaggcgtgataacggactggattatgatgtcagccagataatcaccaccggcggcgcgcggcagatgatcttcaatgccatgatggccacgttaaaccctggcgacgaagtggtgatcccgtcgccatcatggatcagctatgccgatatcgtgaaatttgcgggcgcgacgcccgttccggtgccgtgctacgaagaaaacggctttaagccgctacctggcgatatcgccgcggccatcacgggaaaaactaaatggctgctgctgaactacccgagcaaccccaccgggtccgtcgccagccgcgaagagctgcaggggattgccgatgtgatgctggataatccgcatgtctggatcctgactgacgatatttatgaacacctgatttatgacggctgcgtcttcctgaccatcgcgcaggttgaaccccgtctatatgaccgggtgctgacggtgaatggcgtgtcgaaggcttactcgatgaccggctggcgtctcgggttctgcggaggaccggctccgctgattaaagcgatgagcaatgtgaacacgcagaacgccggggggatcgccacgctggcacaggcagcggcaattgcggtactggatggcccacaggatctgttgaaagagcgtgcggctatctatcgcgagcggcgcgatttcgtgctggagaaactggcggcaatccccggactggtgtgccacaagccgcagggcgcgttctatctgttcgtcaatatcgcggcatttatagggaaagccagcgcgggcggacggcaaattaacaacgacgcggattttgtgatggcgctgattgaagagcaacacgtggtgaccgttcagggggcggcatacggtatgagtccgtatattcgcctctcttacgccaccagcatggagcggctgcaaaccggctgcgagcgtctcgccgcattttgcgagggatgccaataa

SEQ ID NO: 180455 - DNA, 774 bp, Klebsiella oxytoca
atgatgaaaatagatgtgaactccgatatgggagagggctttggtgtttatcaactctgtgacgatgaagccctgatgcaggtcgtctcttcggccaatatcgcctgcggttttcatgcgggggatccggccatcatgacgcaaatggtacgcctggcgaagcttcggggtgttggaattggcgcgcatccggggctgccggacaggtcaggatttggacgtaaagagatggcctttagcccggatgagatttgccagcaggtggtgtaccagattggcgcgctgcaggcgattgcgaagcatgaaggggcgacggtgtcgcatgtgagtttccatgcggcaatgggcaatatgattaaccgcgatgaagcactggcgcgtcaggtgatgcaggcgatttatcgcctcgacccgagcctgatcgttttttcccagccagacacccttattgagcaggcggcgaaaagtgtcggtttaccggggttaacgctgtttctggctgaccgggcctatgatgccgccgggcgtctggtgccgcgcggcaagccaggtgcggtaatcaaagaagaaggtgtcgtgcgagggcgggttcgccagtttttgcaggaagggacggtgaccaccattgaagggtatcctcttgcggtacgcgcccgctcgattctggtacacagcgacacgccgggttcattagcgctggcgaagattgtacgcagcgagattgaagcctgtggcggcatcgtggctccggcggcggaagtgttacagcagtag

SEQ ID NO: 180456 - DNA, 987 bp, Klebsiella oxytoca
gtgatcgaaatcgaacgcacgggctcgctaaacaccgtgcaggatttggggcgttttggtttccgccaccttggcgtgtcagtcagcggcgtcatggacccgctggccttgcgggcgggtaacgcgctgttgggcaacgatgacaacgctgccgtcattgaagtgcagatgtttccatttcgtgtgcgctttcatgaagcagtaaccattgcgttgacaggggctgactgccgggcgcgtctggatgataccgatctgccaccctggtggggctgccaggttaaaaaaggccaggtactggagatgcgttatcctcgttccggtagccgggggtatctctgtgtggccggcggcatcaatgtgcccgaggtgttaggttcgcgcagcaccgcgctgcgaggcggctttggcggcgttgaggggcgtccgctggaggcaggagatcgactaccccctggcccggcaacgtacaagccgttgcctgaaggcggtgtgggtattgagccgccggaactggcgctacgtgatgtttttgccgccccggtgaagggaattgtgccggtgcgggcgattccatccggcgagtatgcgttattcgcggcggatcatctgcgtttctggcagcaaccctggcagatttcccgccaaagcaaccgcaccggttatcgccttgccggtgaaccgattttcccctcccgtacggttgagatgcgttcttatgggctgattccgggcattgtgcaggtgccgccagcaggggagccgatcatacagttaagcgatgcgaataccgcaggcggttatcccaaaattgcctgcgtgattgaagaagatctttggcggctcggccagctacaggccggacagtcgattcagttaatccagagtgatgcgaagcaggctatcgtggcgcggcaggcgactgaacgctggctggcacggttgcgcgatttttcgcgttcgcttatcagcgtgaatgggaaatag

SEQ ID NO: 180457 - DNA, 690 bp, Klebsiella oxytoca
atggcctggttagagcaacacgcgtctgtttctttagcggcggagatcacgctctcgactatggggagtcgtgcctggctggtggaagcgccgggggaatttagcctggccgcgcaacggcgaatctggtccctggcgcaaaggctctctcaatgtgatgacgtcgaaacgctgattcccggcgtcaccaatttactggtgttgctcagacagacgccggaagaggaggacgcattcccgcatcggctacgtgaatactggcgagaagcgcgggaggtgcagccgcaggggcaattgattgagatcccggtgcactatggcggcgagctggcaagcgatcttgcatcggtgtgccgccacaccggttttacggaaaaagaggtgatccgccgccactatcagggggaatacaccgtggtggcgttgggcagcgcgccggggtttggttatttgcatggtctggatcctttgctggcgacgccgcgtaaaaaggtgccctcgctcaatatgctcaaagggacagtgaccattggtggtgcgcaaacgggcgtgtcggtattgaccgggccgaatggctggaacgcgattggttttgccgaactggaggtgtttgatccgcatgcggctaaccccgcgttgatggcccctggtgacagcatccgttttttacccgaaaggatagaactgtga

SEQ ID NO: 180458 - DNA, 837 bp, Klebsiella oxytoca
atgacagcaaagaaattatctgccgctctggcattgccacttttactgaccagcattggggccagtgctgatctgctctcggatattactgcgcatggcgatctgaaatgtgcggtctactccgacgtaccgccattttcatcgccggatgtcaaaacgcgtcaactggtgggcatggacgttgatctttgcacggcgctggcagagaaaatggggctgaaattaacgctggtgccgacctctgttgaggcacgcattgcggttatcgcaacgggccgtgccgatgtactgattgctaaccttgcctacaccaaaacgcgtggcaatcagatccagttcagcgacccgtactatgtcgccaaagagatgctgctggtgaaaaaagagaacgcggataaaaccctcgccgattttaaaggcaaacgtatcagcgccaccaaaggcaccacctctgagcagtcgatccatattaaaggcggcaaggccgtgacattccaggatgcggcatccgctttcctcgcactggaacaaaacaaggtggtcggctttgtgaccaacaccatgaccggcattaagatgatctcccaggcgaaaaaagacggtgttgagcttgcgatgatcaaagaacctatggcactggagccgattggcgtgggcatgaaacgtgacgaacccgcgctgctcaacgcggttaataccagcctgaaaaccatggacagcgatggcaccatcgacaaaatctgggaccgctggattgggccaaataccgagtacaagatggtgcgcgaagagcgcgtacagccactgtcgaacctgaaatttgaaccgctggaataa

SEQ ID NO: 180459 - DNA, 918 bp, Klebsiella oxytoca
atgaatgccaaactcgggatgttgctgaaaataatgtcagcactgtgcgcgacattaatgctggcctgcgtcaaagggctcaacggcgccatccccaccggagaagtgatttttttccgttcatttgtcgcattattcccgctgctactgtggctaaagctgcagggcaacgtcatgaaaagcctcaaaacccgcaatattttcggccattttattcgcggtttttccgggaccggtggcatgtattttaactacctggcgctggtctatatttcgctggctgatgccaccgccatcagctatgccgctccgctctttaccgtgctgatggcggcactcctgctgaaagaaaatgtccgtttttcccgctggctggcggtagttgttggctttagcggcatcgtcattatgctgtcgtcaaacctgacgctgggccacgctttgcgctcatcggggcttactcttgacggcgcagccttaggggcggtgttcgcgctgctggcggcagtctgttcggcaacctccagtgtacaaattcgctttttaaatggtatcgagacgccaggcgccatcgtcttctatttttcattaatgacgacgctaattggcctgtcgtctgcgctatttggctggtcacgtccaacaggctggcagtgggcgctgctatttggctgtggtttttttggcggtgtggcacaaattctggtgacactcagcctgcgctatgccgatgcatcgctgctggcaccgtttgattacaccacgctggtgtggtcgatggtgattggctatctgtttctcgacagtctgcccggacacgccacactgattggggccgctatcgttgctgtcgccgggatcttcactatctggtgcgataggcgtcagcgcaaagggcaaatcatgcgttcctcataa

SEQ ID NO: 180460 - DNA, 1272 bp, Klebsiella oxytoca
ttgtctgaactgtcttatgtgtccggtgcgcgtcactcggcgtggtccatctatctggcgcaagtggaacgtgtcctgcccttgttgggggagctgagccactgggccgataccctgcgtcatccgcgccgcgcgttaatcgtcgatattccgctggaaatggatgacggcagcgtacgccatttcgagggctatcgggtccagcacaatttatcgcgcgggccgggcaagggcggggtgcgttttcatcctgatgtcactctggaagaggtgatggcgctctccgcctggatgaccgtcaaatgcgcggcgctgaatttgcccttcggcggcgcgaaaggcggcgtgcgcgtcgaccccgttacgctgtcacataaagaactggagcgcctgacccggcgctataccagcgaaatcggtatttttatcgggccacagcaggatattccggcaccggatgtcggtaccaatgcgcaaatcatggcgtggatgatggatacctggtcgatgaacgttggcaagccctccacgggcgtggtcaccggtaaaccggtccatctgggcggttcgctggggcgcgttaaagcaaccggacgcggcgtgtatgtgacgggctgccaggcggcgcaggcgctgggtatcgacgtggcgcaaagccgtgtggcggtgcagggctttggcaacgttggcagcgtcagcgccgggctgttccatcagcacggcgcacgtgttgtcgcggtacaggatcagttctgcacgctctatcacccagacggcattgatataccggcgctgattgcctggcaaaaggcgcatggcaagatcctcggttttcctggcgctgatactgtggcggatgaaacgttctggacgcgggatcacgacatactgatcccggcggcgctggaagggcaaattaccgcagaacgcgctgccgctttatcctgcaagctggtgctggaaggggctaatggcccgacactgccggaagccgatgatattttgcaggcgcggggcgtggtggtcgtaccggatgttatcgccaacgcgggtggcgtcaccgtcagctacttcgaatgggtacaggatttttccagctttttctggagtgaagaggagatcgacaaacggctggataccattatgcaaagtgcgctggaaaccgtgtggaataaagcgcagacactgaatataaccctgcgtaccgccgcttatgccgtggcctgcgaacgtatcctgttggcgcgtaaagacagaggattatatccgtaa

SEQ ID NO: 180461 - DNA, 1350 bp, Klebsiella oxytoca
atgctggataaaattgttatcgctaaccgcggcgagatcgcactgcgtattcttcgtgcctgtcaggaactgggcatcaggaccgtcgccgtgcactccaccgcggatcgcgatttaaaacacgtactgctggcggacgaaacggtctctatcggtccggcaccgtccgtgaaaagctatcttaacatcccggcgatcatctctgctgccgaaatcaccggcgccgtggcgatccacccgggctacggcttcctttctgagaacgccaactttgccgaacaggttgaacgctcgggctttatctttatcggcccgaaggccgacaccattcgcctgatgggcgacaaagtgtccgcgattaccgccatgaagaaagccggcgtgccgaccgttccgggctctgacggtccgcttggcgatgatattgacgtgaaccgcgcacatgccaaacgcatcggttacccggtgattatcaaagcctccggcggcggcggcggtcgcggcatgcgcgtcgtgcataaagatgccgacctggcgcactccatcaccatgacccgtgcggaagcgaaagccgctttcaacaacgacatggtgtacatggagaaatacctggaaaatccccgtcacatcgagatccaggtgctggcagacggccagggtaacgccatctatctggccgagcgcgactgctccatgcagcgccgccaccagaaagtggtggaagaagcaccggcgccgggtatcaccccggaattgcgtcgctatatcggcgagcgttgctcgaaagcctgtgtggatatcggctatcgcggggcgggtactttcgagttcctgttcgaaaacggcgagttctactttattgaaatgaacacccgtattcaggtagaacacccggtaaccgagatgatcaccggtgttgacctgatcaaagagcaactgtgtattgcagccggtcagccactgtctatcaagcaggatgaagtggtggtcaggggccatgcggtggaatgtcgtatcaacgccgaagatccggacaccttcctgccgagcccgggtaaaatcacgcgcttccacgcaccgggtggttttggcgttcgctgggaatcgcacatttacgccggctataccgtgccgccgtattacgattccatgatcggcaaactgatctgctacggtgagagccgcgatgtggcgattgcgcgcatgaagaatgcgttgcaggagctgattatcgacggtatcaaaaccaatgtggagttgcagacccgcatcatgaacgacgaaaatttccagaacggtggcaccaatatccactatctggaaaagaaacttggcttgcacgagaaataa

SEQ ID NO: 180462 - DNA, 468 bp, Klebsiella oxytoca
atggatattgataaaatcacaaaattgatcgaactggtcgaagcgtcaggcatctccgaactggaaatttctgaaggcgaagagtctgttcgcatcagccgcaccgcgccgaatgtcggctacccaatgatgcagcaggcttatgctgcgccgatagcccagccttcggtagccgctgtcgtaccagccgtaaccgctacggaagcaccggctgccgcagcggaaatcagtggccacatcgtacgttccccaatggttggtactttctaccgcaccccgagcccggacgcgaaagccttcatcgaaatggggcagaaagttaacgcgggcgacaccctgtgcatcgttgaagccatgaaaatgatgaaccagatcgaagcggataaagcaggcgtggtgaaagccattctggtggaaagtggccaaccggttgaatttgacgagccgctggtcgtcatcgagtcatga

SEQ ID NO: 180463 - DNA, 1224 bp, Klebsiella oxytoca
atgactttactctctaccggcaccgactatgaacagctggcggcgaccttccgaccgatttttgctcgtatcgcgcagggggcggcggcgcgcgaacaaaaccgcatcctgcccgatgagcagatccgctggctgaaagaggccggatttggcacggtacgcattccgcgggaaaagggcggctggggcgcgtcgttgccgcaattcattgcgctgcttattgagctggctcaggccgactccaacctgccgcaggcgctgcgggcgcatttcgccttcgttgaagaccgcctcaatcaacctgactcgccggcgcgcgatcgctggttccgtcgcttcctcgacggcgagctggtgggcagcggctggaccgaaatcggcgcggtcaggctgggggaggttttcactcgcgtaacgcccgttgaaggcggctggcggctggacggtgagaaattctatagcacaggtacgctgtttgccgactggatagatgttttcgcccggcgcagcgacaaccagggcgatgtgattgcgctggtcagcacgagccaggccggcgttgaacgcgaggatgactgggatggcttcggtcagcgtctgaccggcagcggcacgacccgcttcaaacaggcgcaggtggagcaggatcacgtctacgactttgcgcagcgctttcgttatcagaccgcgttttatcagcatatcctgctggcgacgctggcgggaattggcctggcagttgagcgtgacgtcgccgaaggcgtgaaaaagcggacccggatgtacagccacggcaatgccgccgtgccgcgcgacgatgcgcaggtactccaggttgtgggacaaatcagtagctggagttgggcgacgcgggcggcggtattgcaggcggcggaatcgttgcatcaggcctaccttgcgcatgccagcggcgacgaagcgctcattgaacagcgcaatcgcctggctgaagtcgaagcggcgcaggcgcaggtgattgccagcgactggatcccgcgtgcggccaccgagctgttcaacgccctcggcgcgtcggatacgcgagtgagtaaggcccttgatcggcactggcgcaacgcgcgcaccgtggcatcgcacaatccggtgatttataaggcgcgaaatatcggtaactggttggttaacggcgaagcgccaacatttatctggcagattggcgacggcgagaaatcgcagggctga

SEQ ID NO: 180464 - DNA, 1392 bp, Klebsiella oxytoca
atgagttctgtatcgctaagcgaagcgcagttcgtcggcaccgatcgtctgctggcgggtattgtattgagcgttctgaccttctggctgtttgcccagtcggtgattaacgtggttccggcgatgaagagcagcctcgatatttcgctggaaaccctgaccctggcggtgagcctgagcgccttattcagcggctgcttcgtggtcgccagcggcgggctggcggataaattcggccgcatgcgcatgactaccctgggcctgatcctcagcattgtcggtagcgcaatgctggtgttctctcagggacccgcgctgttcctggccgggcgcgttttacaggggctgtcggccgcctgcatcatgccggcgacgctggcgttaattaaaacctggtatgaaggcaaagcgcgccagcgggcggtcagcttctgggtcatcggctcgtggggcggcagcggtctgtgctcgtttgtcggcggggcgatcgccaccggtctgggctggcgctggatctttgttttctccatcgcggtagcgctggcggcgctgtttttgctgcgcggtacgccggaaagccgcagcgccagcgcgcagcagcataagctggatatcagcggcctgctcagcctgatccttgcgctggtgctgctaaatctgtttatcagcaaaggccacggctggggctggaccagcgcaacctcgctggcgatgctggccggcgcgctggcttcggggctgttttttatccgcagcggccagcgtaagggcgacgcggcgctgattgatttcgcgctgtttcgcaaccgggcctacagcgccgcggtgttgtcgaactttatgctcaacggcgctatcggtacgatgatgattgccagcatctggctccagcaggggcatcatctgagcccgctggagagcggaatgatgacgctcggctatctggttaccgtgctggcgatgattcgggtgggcgagaagctgctgcaaagctacggcgcgcgtttgccgatgatgagcggcccggtctttaccgcggtcggtattcttcttatctcctgcacctttctcgataaatcgacctatatcgtcacggtctttttcagcaacgtgctgtttggcttcggcctgggctgctacgccaccccgtcaacggacaccgcggtggttaacgctcctgagaataaggtaggcgtggcctcggggatctataagatgggcagttcgctcggcggagcgatgggcattgcggtgacagcgtcactttttgcgctgtttttaccgctcggcatggccagcgcggcgcagtatgcgctgtggtttaacgccgcgctctgcctgggttcaatggcggtgagcgcgctgctgcttccgcgtacaggtcaaagctga

SEQ ID NO: 180465 - DNA, 2373 bp, Klebsiella oxytoca
atggcccagacgtcgccggatgcggacgacattattgcagacagcatgaccgtggccggagcagacgtaatgtttaccgggctggacacggatgatggcgatgatgacgacgagaacgacaattctctgccggatagttgggtagaaggcgcgattgttgagataaaggctcccgccaattaccagatatcaacggcggccgggtacagcgttatcgccagtcctcttctgtcagagatcgcgccggtggttggtatgccggtgacgctcagtttcaatagcgtcgattacgatctgtttattgcgtcatatacctctggccaggctgcggtgccgggcaccgggggaagtgcggtaaaagttcaggccagcgcagcacctaccacctacgacttttcgaccagctccagcacgttcacgatcacgtggcaggggatcgtttacgcggtgtcgctggtggcgaactatgtgtcgatgtctggacttctggcggccatcaccgaggggctcactggctccggcctggtcgcgcaggataacggcggcactgtagtgataaccgaggcggccagcccgttcgcgggaggggcgatcacatcctcttcgctgcctgctgccgttttcggtgatgcccctgtttacaccgccggcacggcatcaaccggcggcagcccggcggtaacggcaaatttgacgcttgcctataacagcgccacgggaaccgcattttcgggcatgcctgaaggcgtgcaacggctttcacttgctcaccgcgggaatgagtacaggattgtgtccgctgacggcacgacggcgacggtggcgcgtctggttaacggtgcagttgatgagtcatggccgggattcaccaccaggacgatgatcgactatgaggccactggccttaacgacacgctgagctggctggggccgttcctggtatgcccggaaaatgaagtggtggatatgttcgaagtgaatttttcctttccgaacggcatctgcggttttgataacaaaggcaaaaagcgactccgacatgttgagtgggaaattcagtaccggatttacggctccggctctgggtgggtcagtaaacagggcgaatacgcgctgaaaaacgttaacggtctgggctttactgagcggatctcactcggttctccggggcttgtagaggttcgctgtcgacgtcgcaacgagcagggctccaataatgccagggattcgatgtactggcaggcactgcgcggacgactgctgactcgcccagcatcctatcccggtgtgtcgctgatggcggcgaccgtcgagacgggcggtaaactggcggcgcagtctgaccgccgagtaaacgttgttgggacgcgtgcctatgaaaccggaacggccagaaccatttcgggggcgctgctgcatgtcgggaactcgctgggcctggagatggatgtcgatactattaacacgctggagtctgcgtactggacgccgcggggagagtattttgatttcgctaccggcgacagtatctcggcactggaaatgctgcaaaagatcgccaacgccgggaagtcacgttttctgctgagtgatggcctggcgacagtaaaccgggaagggattaagccctggacaggtgtcatcaccccgcatgagatggtcgaagagctgcagagtggtttcactgctccatctgacgatgattacgacggcgttgacgtgacttacattaacgggaccacttgggcggaagagacggttaaatgccgcactcccgataaccccacaccggtgaaaatcgaggattacaaactcgacggggtattgagtcaggatcacgcttatcaaatcgggatgcggcgcctgatgaaattcctgcagcagcgggtaacgttccagacgacgaccgaactggacgcactctgctacaacgttggcgatcgtattgtgctgaccgacgatataccggggaataacacgatttcctgtctggttgaggagatgacaacggctggcggtgtaacgaccttcaccgtcacggagccgctggactggtcttttgaaaaccctcgcgcgctggtccgttaccaggatggctcggcctccgggctgatggtggcgaccagagtaggggattatcaactttcggtcccgcatctgagtgagtttgatgacctgctgaaaatcgatttatcgtctgcaaccatcgagccgatccggctggtgttctgcggctcaacgcggcatgtctatgatgcgctggtggcagaaattgccccgcaggcggacggaacctgccaggtgaccgccaacgaatatctcgaatcgttctacgcctacgatgacgccagctaccccggcgacgtcgcgtaa

SEQ ID NO: 180466 - DNA, 537 bp, Klebsiella oxytoca
atgcaaataatgtcctttcaacaaaataccggattcaagaccggcgctttgataaagcgaaatcagccgatagtggcagagcacgaccacattcgctccgccgttcgcgcctgggctgcagttagagggcaggatattgtttctgcttacatcgtcgaggaatggcgacagcagggcggcgaggtgatcgcgtttcctgatgacatcagccgtgcccggcagaagctttttcgctacctggacaacccggccgattctgagcgctatcgcgagtacgttcgccttcttaccccggcaatcatggccgttcttccgctggagttccgccatcgcctgatgcccgaagacaattttatgtcccgtctggctcgtctggaaaaagaaaccagtgaagcaaaggttgccgttgctatgggggcaccacgccatcagaagctaaaagaactgagcgagggaattgtcgagatgttccggatagaccctgagttaacggcgccgctgatggccatagtcacttcaatgctaggagtgacgtga

SEQ ID NO: 180467 - DNA, 381 bp, Klebsiella oxytoca
atgagaaaagaagaacccaacctcgtcctggtagaacgccttaccgagatcactgatcgcggcgttaccaaagcagacatggcgcgtatagctggagtcacccctcaggccgtaaacggctggttcaaaaaaggcgtgattagtaagaaatcagcattagcaatagccgacgcagttggtatttctgtcgcctggctactcggtgaagaagttggcgaaaaagacggactcaagtcagacgaaaagcgcctactggagctctatcgtcaactgccagaagaagaacagcaaaacatcttacggatcgtgtcgttgcgcctgaaagaactcgatgagctgtacgcaaagtacatggggcgccgtataagaggtaatgattag

SEQ ID NO: 180468 - DNA, 747 bp, Klebsiella oxytoca
atgcttggtaatattttgcacataaaccatatcatcaggcgcatgtctacaggcgttaccgagccgttcctgtgcgaatgtgatgatggattaaaatatgtcataaaagggcaacctcgagtcacaagaaaggaactcatggcagagtgggtttcctcgcaactggctcataggcttggcctttcaataccagaaagctttttagtctatattgatgacgatgtcatttccttcgctaaaccagaatggaaacgagacctcagggagggtcatgcgtttgcttgtcagtacatagagcaaagtatacctatctccttctaccaagctcacagcaacgttgatatccagacaagaaaattcatatatctatatgataaatggataaataactctgatagaacgctatcaaataatggattgggtaacgtaaatcttctttttcatgttctgagcaataggtattacctgattgaccataaccttgctttcttccacgattaccatcaagaagaatttgagtcacatgtgtactgcccaaaccatcggaagtggacatatgacttggttgatacacaggattttcgtgaccgtctaaccttggccgcctcaaactttgacagcctagtaagcagcatcccggatgactggaagttagacgagccagagtcacaagaagagtatttaaactttttcaaaacaacactcgaaagggctataagtgatgaattttggagtaacttgatatga

SEQ ID NO: 180469 - DNA, 831 bp, Klebsiella oxytoca
atgaaaaccccttgtttatatagcataatcaggtacatcccattcgctgaaactgaagagttcgctaatgtcggtatccttttgtgcgcaccgaaacagggggtattgttatacaagttagcgaaaggaaacgatgcgagagtaaaaacgttcttccgtgacgacaagattttcccactagcaaagcaagccctcactgccgaactaaaatttgcgagagagaacttatataactttagcagtgctcagaaattatccaatttttttcatgcttttgtatctactcgtgaatctatattccaattcagcgactcaaggataatcatggctgacaacccggcacatgaggttgaagccctatatgacagatttgtaaatcatgctgaatatacacccgagagacgggaagacatcttagctaaagaactacgattgagatttgatagctttcaagacctcagaaaaaccttcaagaaagaaacaattggaggggagttcgcgaaatttaccatgcctctagttgcttcagaggatggagttgctgtatgtgccatcaagccactagtatttgatcagtctgataccagtaaaatgatggagcattgtgataagtgggttgctcgggtgacaagagcggcggatgaaaggcttttgaacctatctggcgtcctcttccccatagcggggccattaaagtccaccatcagggcaaaaaatgccattgaaaagattgtgaaaacttttcttggccatcaaatcaactgcgttgaccatgaaaatgagggctcaataattaagttcgcacaatcaacaatttatcaaataagataa

SEQ ID NO: 180470 - DNA, 309 bp, Klebsiella oxytoca
atgagtaaggtaaaggtggcgcctattgaactcgaaatagacgccacggaagtaatcaataaggtcgaggaactactggggttacttgagcttccagcccgttcccttgaaggcatccctgaggatgtcgtcaacctgctttttgacaacatccgtcccttgcttaacgacatcgtccttagtgatttctcgaccacagttggcacaactgacgccaacaaaatttgtctcaaagtcgaaatcatcgggacgcttgagcatctcgcttccgcaatcagggcaagcaactttcatcgttgtcagttttga

SEQ ID NO: 180471 - DNA, 1626 bp, Klebsiella oxytoca
atggctgactggcatacgcgggccattatctatcagattgattcagcactgttttacgatcttaacggcgatggctgcggcgatatcgccgggatcgcggcgaagctgcgctatattcgccgactgggcgcgacggtgatctggataacgcccttctacctgacgccgtttctggatgagggttacgatgtcagcgaccatctgcaggtcgatccgcgatttggtcaactggcggatatcattgcttttatcgagcaggcccgcgaattaggcatgcaggttattattgaattgctgatccagcacacctccgacgctcacccctggtttcaacaagcgcggcgcagccgtcgctcgccgttccgcgactattatctgtgggcagatagcgatgatgacaatacgccgcccatgtttcccggcgtcgaagagagcatctggtcgtgggatgacgaagccgggcaatattttcgccatatgttttaccgccatgaacccgatctcaatctggcctctcccgcggtgatcaaagaggtcgaaaatatcgttatcttttggctgaagctgggggtttccggctttcgtctggatgccgcctcgcatttgacgaaacaggccggacgcggcgaggagaaacgcgggctatggctcctggaacatctgcgtcggctggttgaacaacataatccgcaggccatactgctcggcgaagtcgacgttgaggtggcgcagtatcgcgactattttggcgataataaccgacttaatatggtacttaacttctggttgaacaaatatttttacgtcagcctcgccagccagagcgcccgcccgctgatcgacgccatcaagaaaatggtagtgcctcctgacgcctgctgcttcgcaaactggctgcgcaaccacgatgaactggatcttgaagggatcggtaacaagaacaagcagaccgtgctggatgccttcgcgccggataaggagatgaacgtttatcagcgcggtattcgccgtcggctggcgcccatgctgaacggcgaccggcagcggctggcgttctgtcatgccgtgcttttttcgctgcccggcgtaccgatcatgcgctacggggatgagatcggcatgggtgacgacctggcgctggaagagcgctacgcggtgcgtacgccgatgcagtgggccggttcagcgggcggcggcttctccgcagccgatccgcagacgtttgtggctcccatgatcgaccgggggccgtttcgctatcagaaagtcaacgtcgctgattccctgctgcaccgccattctctcctgcaccgtattattgatatcgccaatacgcggtcagaattcccggaaatcgccgttgcgcctttccgcatcattagcaccgatcggcaggcgattctcgggatctgctacgatgaccacgagcgcagcgtcatcgcctttcttaatttcagtgataaaccgctgcgttttaccgcgaaagggatctatgcggcggtgtggacgccctgcctggccgacaaaacctacgcggacgcgctcactcccggtaagcacgctaagctggagattagcgcatatggctatcgatggttctggaccaacagtagcgcgctgcgttag

SEQ ID NO: 180472 - DNA, 990 bp, Klebsiella oxytoca
atggcagtcatggcgatcactggcggtactgcgggagtcggtaaagcaacggccctgcgctttgcgcgggcaggctatgacgtcggcattattgcccgcgatggccgaagccttgaggcgacgaagcaggagctccttcgttgcggcgttcgggtgcataccgtgcaggccgatgtggcaaatgctgatgcgctcttgaccgccgccggcgaaatcgaaaatcggctcggggctatcgaggtatgggtcaataacgcgatgtgtgcggtgctggcgcctttcagagcgatgacccacgacgaatttagacgggtaaccgaggtcacctacctcggctacgtcaacgggactcgcgccgcgctggcgctgatgacgccccgggatcgcggagtgattatccaggttggctccgcgctcgcctatcgctccattccgctacagtcagcctactgcggggcaaaggccgcgattcggggttttaccgatgcggtgcgtacggagctgatgcatgaaaatagcggcgtgagtattgcgatggtacagatgccggggctgaatacgccgcagttcgagtgggcgcgcaataagtttgcctgggcgatgcgcccggtgccgccggtatttcagccggaagtggccgcccaggctatcttcaacgtcgcgcgccggcccgtacgcgaactctgggtagggagcagcacgattcagtccattattgggcaatttcttttcccgggcttccttgaccggctgatggtcaaaaaagcgtgggaagggcaaatgacccggcgcttgaatgccgacgaccgtcaggactatctcgaacagccggtcagcggattgcataaaacgcacgggcgtttttcctctgaggcgaaatatcgcgccaccgccatcacttccggcgtgccgggaaaagcgctgctgggcggcgcggcagcggcgggggtacttttagcaaaatggtttatctcgcgtaaaaaacgctaa

SEQ ID NO: 180473 - DNA, 552 bp, Klebsiella oxytoca
atgaaaaaacgaaaatatttaagtaaaaaagaggtgcaggcattaattgatgcttcgcagcagcaggatggctcgctgcgggattattgcatgctcctcatgtgttttattcacggactgcgcgtaagtgaattacgttttttaaaagtgagcgatattgatttatccagccagcggatcgccattcggcgtttaaaaaatggcttttcaactattcaccctcttcagccccgtgaacagctggcgttaagccagtggctggttaagcgcacgagctgtttaaacgccgatcttccctggctgttcctgtcgcgaaaaggcactccgctttcccgacagcatattcacgttatgatgcgaaattatggcgtgcaggccggcattgccgttccggtacacccgcatatgctgcgccacgcctgcggttatgcgcttgcggaagagggcgttgatacacgcctgattcaggattatctcggccatcgcaatatccagcataccgtcttgtatacggcgagcaatccggcgcgctttagctcgattaccctctga

SEQ ID NO: 180474 - DNA, 147 bp, Klebsiella oxytoca
atgaaatgccttttcattacgttatttaacagctcaattgtaaggccgatcgcaaaatttaccctgatggcaatatccataagcgcgattgatgttcgcccggcgccagcgggtattatttttgtgtgcaagaaaacgcaacactga

SEQ ID NO: 180475 - DNA, 360 bp, Klebsiella oxytoca
atgagtgagcgtaaacgcggcggcgccgcgtccattgatatagatgccctgcttcaggatacctggctgcaggtgatcagcctgcgtcacggtccgatattccaggacggggaagggcgcacgctttgggaacgctgcattgctgatgtcgaacgagtccagcgtgagctgaaagcgagcgaacttgatgaagccagctgtcagcatattctcacggcacagtgtgcgctgctcgatgaggcggtcaaaggtcgcggtgtggaggacgatgcctgcgtgcagtggtataacattcccctgcaggggctcttcccggcctgcaacagcagcagtggctcgaaggcaaccgcaccgtgctga

SEQ ID NO: 180476 - DNA, 1266 bp, Klebsiella oxytoca
atggctctgagtgatgtgaaggttcgttcggctaagcctgaagcaaaagcctataaacttactgacggcgacggtatggttttgctggttcaccctaacggttccaaatattggcgtcttcgttaccgcttcggcggtaaagagaagatgctggcgctggggaaataccctgaggtttcgctagcagatgccagggctcgtcgcgatgaagcccgtaagctgttagctaatggcgtcgatcccagtgaaaacaagaaagccgttaaggtagaacaagagcaagaggcgataacgtttgaagtggtcgccagagactggcatgccagtaatcagaaatggtcggcatcgcatagcgctcgtgtgctgaaaagcctcgaagataatctcttcgctgctatcggtaagcgggacattgctgagttgaagacacgggatttacttgtacccatcaaagcggtggagtcatctgggcgtcttgaggtcgctgcccgtttacagcagcgtactactgcgattatgcgctttgctgtgcagagcggattaatcgactacaatcccgctcaagagattgccggtgcagttgctacggcgaaaagaaagcaccgtgcggctctggatcttgaacgtattcctgaattacttcaccgcatcgataactattctggcagaccgttaacccgattggctgtcgaactcacgttgttagttttcatccgttcaagcgagctgcgttttgcccgctggtcagaagtggattttgaaacggccatgtggacgatccccggtgagcgtgaagcgctggacggtgttaaatattctcagcgtggttcaaagatgcggacgccccatcttgttcccttatcgcgtcaggccttagctattctggaaaagatcaaaagcatgaatgggaatcgagagctgattttcgtaggcgatcacgatccccgtaagccgatgagtgagaatacggtgaacaaggctcttcgagtgatgggctacgacacaaaaacggaagtttgtgggcatggtttcaggaccatggcatgtagctcattgattgagtcgggtctatggtcgagggatgccgtagagcggcagatgagccatcaggagcgtagctctgttcgggcagcttacatccataaggcggagcatctgggggagaggaggttgatgttgcagtggtgggcggattatctggatgcgaatatgcaagaagttatctctccctttgactatgccaaaactaacaacccattgagataa

SEQ ID NO: 180477 - DNA, 1320 bp, Klebsiella oxytoca
atgagtaatcagatcaattcaacgctcggtgatttggttaaagcgggtggcggaatcatacatacaggtccttttgggagccaactccatgcagaagactacgttgcgcaaggtattccctgcattatgcctgcgaatatgaaggacaatagagtagacctctccaatatttcatatatttcaaatgaagatgctcaacggttatcaaaatatctcgtcaaggcaggtgatattgtttacagccggagaggtaatgtcacactcaaggcgttgatccgaaaaaatgaagctgggtatttttgtggtacaggctgcttgttattaagacctggtaatctgcttgattctgactacctaacttattatctgagcacaccaaaaattcagtcatggcttattagccaggctattggggcgacgatgcccaacctcaatacggggattttggcgaggattcctttttcaggccctgaaaagtctattcaggagaaaatttcatcagtgcttagggccatcgatgacaaattagaactcaacaaccgtatcaacgctgaattggaagcgatggtgaaaacgctgtatgactactggtttgtacagtttgattttcctgatgtcaacggaaaaccgtataaaacatccggtggaaagatggtgtataacgccatactgaaacgggaaattccggcggactggagtgtaaatactttatcagactggattgctaatgataaaacgggagattgggggaaagaaaatagagaagggaattatacacttcaggttaattgtatcagaggtgccgacattaatggtctgaatggttatggtaatacatcgatgccagttagatatatcttgggaaaaaacaaaaaaaaattattatccacttacgattttgttattgaaatctctggtggaagtcctacacaatcgactggacgcatggcctttattactaaagaaatgttggaacgtttcactcacccagttatatgctctaatttttgcaaggcaattactctcaaagacaatttgtatttctataactttgcctacacatggaatgatatttacaacaaaggaattttatttggctgggaaggtaaaactagtggcataaaaaatttactttttgattcttttgtaacaaaacatcatgtatgcgttccgcataaagaactcgtaaaaatgtttcatgatattatgatgccgctccaccagaaaaaacaaatgaatcttaaggagaattcagaattggaaaaacttcgcgactggctcctccctctacttatgaacggacaggtcacggtcaaataa

SEQ ID NO: 180478 - DNA, 1635 bp, Klebsiella oxytoca
gtggtagaactggaatttagagacaaaaccaaaacactgatcgacagcctgaaaagcatctgtgcgaactacggtctgggcaacgacggtaacgaattcaaaatcatcacacaggcattcctgtacaaattcctgaacgacaagttcgcctttgaagccaaaaaggtggataaaagcatcgccagcgccgaaaaatgggaagtcgcgcttaatcagatgagtgaggaacagcgtgacaagctgcaactgaagatgagcgccgacaccgcccgtctgaaaccgcatcacttcattcagtatttatacaaccgtcaaaatgaggccaatttcgccaccacctttgacgataccctgatggacatcgccgccaccaacaacgacgtcttcgcggtcaaaaccgacggcggcgcgaaagtggtgctgtttgaacgcctcagccagtacatcgccgacgaatcaaagcgcgacgacttctgccgcgccattatcaacaaactggccgatttcagctttgaacgtatcttcacgcagaaattcgacttctacgccaccatctttgaatacctgatcaaagactacaacagcaactccggcggcaaatacgcggaatactacaccccccacgccgtggcgcgcatcatggcggaaatactggtgccgaaagcgcagcagggcgtggtgcgtaacgtaagctgttacgatccgtccgccggttccggtacgctgctgatgaacgtggcgcatgccatcggcgaagatcgttgcagcatctttgcgcaggatatctcgcagaaatcctccagcctgctgcgcctgaacctgatcctcaacaatctggtgcattcgatccccaacgttatccagggcaacaccattctgcatccgttccacaaggacggcagcgcgctgaaacgctttgactacatcgtctccaacccgccgttcaaaatggatttcagcgatttccgcgacgatctcgacagcaaagaaaaccagcaacgtttctttgccgggataccgaaaatcaaagccaaagccagggacaaaatggaaatttaccagttgttcctgcaacacatcattttctcgctgaaaccgggtggtaaggcggcggcggtggtgccgaccgggtttatcaccgcgcagtcgggcattgataaagggattcgcgaacatctggtgaaaaacaggatgctggcgggcgtggtttccatgccgtcgaatatcttcgccaccaccggcaccaacgtgtcgatcctgtttattgacgccaacaacaaagagaaagtggtgctgatcgacgcctcgaatttaggtgaaaaagtcaaagacggcaaaaaccagaaaacggtgctgtccgaagaagaagagcagcgcatctgcgaagtgttcaacaataaatggagcgaagaggatttctcggtggtggtcagctatgacgatatcgccgcgaagaattactcgttcagcgccgggcagtattttgatgtgaaaattgtatacaccgatatgacgccggaacaatttgccgcgaagatgaaaggatttactgacaatctggagagtttgtttagccagtcacgagagctggaagcggagattaagaagcagatgggggggctgaagtatgagtaa

SEQ ID NO: 180479 - DNA, 3099 bp, Klebsiella oxytoca
atgaaattcaccgaagacacccgggtaaaaatccccgtcatcctccacctgatacggctgggctaccgctacctgtctctgaaagaacaacactgggacaaagaaaccaacatctttcctgaccttttcaccgctgcagttggcagaattaaccccggaattgcgcccgacgacatcgggcgccagttaaaagatctcacgctgcttctcgacaacgacgacctgggccgcgccttcttcgaaaaactcagcgaccgttccggcatcaaactgatagacttcgataacttcaacaacaacagcttccatgtcgtcaccgaactgacctgcgaaaacggcgatgaagagttccgcccagacatcacgctgctgatcaatggcatgccactgatctttatcgaagtgaaaaagcccaacaaccgcgaaggtatcgtcgcagaacgcaaccgcatcaacgaacgctttaagaaccccaaattcaaacgcttcgccaatatcacccagttcatgatcttctccaacaacatggagtatgacgacagtgacccggagccgattcagggggcattctacgccagcagctcatacagcaacccggtattcaactacttccgagaagaagaactcttcaacctgaccaacttactgaaaccgctgtcagaagaaaccgaaatcgccgttctgaaagacaacaacctggaagtcattcgtaccaacccggaatttcagactaacaaagatcacaaccgcccgaccaaccgcctttgcaccgcgctgttgagccgcgatcggctggcatttatcctgcgctatgcgctggtgtacgtcgccgaaccgggcggcatccagaagcacatcatgcgttacccgcagctcttcgccaccaaagcaatcgagcgcaaactgaacgctggcgtgaaaaaaggcattatctggcacacccagggcagtggaaaaaccgcactggcttactacaacgtgcgcttcctgacggattacttccagagccagcaggtgatcccaaaattctactttattgttgaccgtctggatctgctccagcaggcgcagcgcgagttcaccgcccgtggcttaattgttcaccttattgactcacgcgaagccttcacccgcgacatcaaagcggcgcaggcgctgcacaatcaccacggcaaagcggaaatcaccgtcgtcaacatccagaaattccgcgatgacccggacgtcgtcaccatcaaagactacgacatcaacatccagcgcgtgtatttcctcgatgaagtccaccgcagctacaaccccaaagggagcttcctggcgaacttaagccagtcggacaccaacgccatcaaaattggcctgaccggtacacctctgctgggaacggactacaactcccgcgacctcttcggcgactacatccacaaatactactacaacgcctccattgccgacggctacacgctgcgcctgatccgtgaagagatcgccaccaactaccggatgatcctgcaacaggcgctaaaagacgtagaagtcagaatgggcgatgtagatcgcaaatacatctacgcccatcccagcttcgtcaaaccgatgctggactacatcgtcaccgactttgccaaaagccggggcgcgctgaatgatggcaccatcggcggcatggtgatatgtgacagctctgaacaggccaaacagatgtttgaattgttcaacgccgactacgccgaatcgcccaccgttgccgatgaagttaccgacgaaatgtctatattacaggccgcagaacccgctgccgtttaccagattcacgccaaagaaacacggaaaatcaaacgcgccgctctgatcctgcacgacatcggcagcaagcaggaacgtaaagaatgggtggaacaattcaaggcgggtgagattgacctgctgtttgtctacaatatgctgctcaccggctttgatgccaaacggctgaaaaaactctacctcgggcgggtgatcagaaagcacaacctgctccaagcgctgacccgcgtcaaccgaacctacaaccacttccgctacggctacgtggtggacttcgccgatatccgccaggaatttgacgccaccaacaaagcctacttcgaagagctacaggccgaactgggcgacgaaatggagcactattcccgcctgttcaaatcggcggaagagatccgcgaagaaatagaacacattaaagatgttttgttcagtttcgatacggaaaacgcagaaattttcactgaccagataaaccagatccaggaccgggaaaccgcgctggcgctaaaaaacgcgctggccgatgcccgcagcctgtacaacctgatccgcctccagggcaacactgagtttctccaggcgctggacttcaacaaactcaacatcctctaccgcgaagccagccaccgcctcgacttactcaacctgaaggcggatctggagcagggtgttgacctctccggtctgttgaaccgtgcgctggaagaggtgatctttgaattccacaaagtgggcgaagaagaactggtgctggctgacgaactgaaagagacgctgcgccgtacccgtgaagcgctggccgccaacttcgaccagcaggacccgcagttcgtcagcctgaaagacgaactggagcgactgtttaagaaaaagaaactcagcgaagtcacccaggaagaaatggttgcgaatattggcacactcaataaaattcatgaccgtattaaagagctgaaccgtcagaacaacctgctgcgccagaaataccggggcgatgtgaaatacgcgcgtacccacaaacgcctgcgcgagcacggcggccttagcgagccagaacgtaaaatattcgaagcactgcttggcgttaagctggatgcggatgaaaaagtgctgaacaacagccagatactgaacaatgaaagctactttgagcgccagattgtgtcatgtgtacttgaccactttgaacaacagcagcacatcatcctcagtgcgaaagcggctggcgacattaaccgcctgattgtggcggaatacctgaacgaatttaataccggagcacgtacgtggtag

SEQ ID NO: 180480 - DNA, 918 bp, Klebsiella oxytoca
atgacagaatttcatgacgttcatttggaactgcttgttgaagcctattcgcttcctcaggcagagcgactggcgtacatcgatttgtgtatacgctacctcggcagcatatccagggccgaaattatggctgagttcaaagttgcacaggctgcagcctcaaaagatcttgctttatatcgggaactcaagccaggtaactgtagtattgatacggcaaccaaaaggacgattatttctcatggtacctatactccattggtgcagattagtgttcatacggcgctgaatctgatccagtatggtttctctcgttcggagctgatgcaaaaacgtccgatgctgccgattgatgagatagacccgctttatctacccgagcgtttgaaggaagaacaggtctatgttgtcaccaggtcaataaaaggccgctatgcgatcaaatgcacatatggctcagaaagtggcgagcatggcaaacggatactatttccatcagcattatttgtagatcggaaaaactggtacttcagagcttatgatcgaaacgattcggatccaaaactgagtgggtttaaaaactttaagttatcgagaatttttgatgttgagcaagaggaatcgatactgccgacggttgcagagttgacggacagagaatggaatgaggaggttacctttatcattgcattcaaaaaggatcttcgacctgagattgtagataaaatctcccgcgagttttcgatcagcggtaatgtacattctgttacatgtcgcgctgctttggcctggtacgtaaagaccaactggaaaatagatctgactggaaataacaataatggttggttgtactttgatgtcctgaataaagaagctttacaagaagttaaatgcctggagaagttttttgaagagtaa

SEQ ID NO: 180481 - DNA, 516 bp, Klebsiella oxytoca
atggaaaaagtaaccgaccagtattcacccgaaattgcgcggcataagctcaatgcttatttttcaggtaatttcatcatgcttgacgtgataaaacgtttgcaaaaatcaagcctgtgcgtatttgcagccttatgtgatggaaaaacgatcacgactgcagggtatgaaattaatgccgattttagcgttaagcgagcctctgcggtcattcactccttgaagctgaagaatctccctgtctcaacaaattccgtttcaacgggctctgatgttggtggaatcaccaatcaggcggtttttttcatcagtaaagaggatcttcattctctgaagtccgatccggagaagattatgagaaaatgcgcaaggctacacgctcaacataaacgctcacatgcacaaagggacattgctcgtctatgcaaggagtttggtaaggaagcgatacttaaattagtaaaccaagctgcagccaaccctaagatgcctcctgatgggatgagtgcatgttaa

SEQ ID NO: 180482 - DNA, 972 bp, Klebsiella oxytoca
atggctactctcgttttttcctattctcatgcagatgaggccttgcgtaacgagctcgaaacgcatctctctccgttaaaacgcatgggaacaatcagcgcgtggcatgaccgacgtattgctcctgggcaggaatttgagcatgaaatagatcgctatttcgccgaagccaatattattctgctgttagtcagtagcgacttcattgcatcggattattgctggaatattgaaattaagaatgcaatggcgcggcatgaacgaggggaagcgatagtcatcccggtgattttgcgcaattgtgcctggcacaatcttccttttggtaagctactggccgcaaccaaagatgggaaaccgattactcagtttcccagtcatgatgacgggtttgtgcaggttgttgatgcagtatcaaaggctgctgcccgtattgataccaacaattcaacccaagtgccccacgcttcaacttcagcaaaggctcaactatcaccgtcagtaaatacagttttacagccccgatccggcaacctctcgcttccaaaaacattcagcgatctcgataaagatcgggctagccgtgaaggttttgaatatgttgcacgctatttcgaaaactctctcttcgagctaaaacaacgcaacccaggtatacaagtggaatttcaaccggttgactccagcgcgttcacttgcgcgatttatttacacggtacccggacggggcagtgtggggtctggcgtggtgacagactccatggggtaggctcagtatgtttcagtcatgacggcatggttcgaaacaactacaacgaaagtctaagtttggcggataacggtcagtctctgggttttcgcacgatgatggggttcaccggaaacagtcataacactttactgactaatgaaggtatggcagaacatttgtgggatatgttcttcaaatccgtaaaacaacgtatgtcctga

SEQ ID NO: 180483 - DNA, 423 bp, Klebsiella oxytoca
atgcgtatgctgaaatgttatctagcaaataaccgtggaggtcactttgtgacggctgacgaagcaatgagcgcaccggggcagatatggagctgcgcctcatgtggctgtcgtctggcgctgcatgcaggctcttcctgtgatgcggcttggtttgaacacgaccagcgctcagtggcgcaacatgtactgatgagctgtgcccatctggatccggaagtcaacgcggaaactcgccacagaaagttacgcagcattatcgacggattggatgtaccggtgataacaagctcctggtactgtgtctggtgcagtgctcattacagtggggataaatactgtgcttcatgtgggacgggcatttacagtattgaagaatccagttggcaactcaattactgctgcgacatcggtcttgaataa

SEQ ID NO: 180484 - DNA, 426 bp, Klebsiella oxytoca
atgtttgcaaaatcttttatcgtactcgacggtaattttcgcctgaccggtgcaagaacgacaaaacagtatccgtatagccataacagcggtcccctgtgtggtagtgcgctgcaattcaatcctcaatacgacacaaaacggccgtggtttgaatacggtgcagaagatctcacgaagggctacggcaggcagtactgcccatatgtaaagcccggtgtgacggagacctgccatatccggcaaatgcaacattatgtacaggatgcacgacagttggttttcttggctgtttggcactggtacggctgcgacagcgattaccgcggtgaacgccactgcctgacctgccgaaccggtgagcatagccatatgttctctgatactgaaacccggcctgcggaggtggtgatatgcgtatgctga

SEQ ID NO: 180485 - DNA, 798 bp, Klebsiella oxytoca
atgtcagaacgaatcactttcaatgtaaccaattctgagactttgcgtgttgtggatgaatacagcaaaaaacagaagatctcacgatcacaggttatttccatattgttggatgctaccgttccggtactgaaagatattaatcgctattatcagcttgcggacgaacttaaggcccggctactgtctggtgtctatcagcaggatttgcctcgccgaagaaattttgtagctgctgaaaagtattgtatggagatctgggagagcaagcttcaggttggaaaagtgtatgactttgacagcgttaatggcaaggcgcatgtccgcgaacataagcgacaccaccgccgggataatgcagttggcagggtcgaaaatcgacatatcaaagagttctgtcagtcgctcctggaaaggtcagaacaggatgcccgctatgcttgttttatctataccgaaaggattgtttttgctgatgttgaaacctctggacactcttcatccccaataaaactggcagcaggtgacgctgtaattttgctggcaaaagatgtagtttttaacgagtttttctttgatataggtaaggcgctttttatcaatgtggttgatcttatgtcatacggtacaagtggtattccggagacgacaagagacccacgtgttcactgctgggtgccaatcctggttagtgggaaaaatgccgtgatagtgcctgtgtatctgattgacccagctacggcaccgacgttaagaaaaccagacaacatcacagtggtctaccagggcaaaaagtaa

SEQ ID NO: 180486 - DNA, 807 bp, Klebsiella oxytoca
atgaacaaagccggaaaaatagcgtattcatggctaaaggcacagagcgatagtggaaaaattcgatttattgcacaagggttggagagtgtcgaatatcaggcgtttataaaaaaacatcagcctgaaaagctgcatacccacaatctacctttaagttttttgaaatggtatttgcctcagaaactagtggcctcctatcacggcaaggagatcggcctgagaagtgtgccggagacggttggcgataagctggaaattcggcacacctggatgccaacagggcagtttgctccttcgcgccatggatcttacataccactgggaacccagtttgtttgtactgctctgatgcaaccctttttgcaaaaacagcaggaaaaatgtctggagcaggcctggcaggcagcgcttcccctgcttctgtcacctgacatcagtaatgacaatgaattcaccgctccatggctggattacgaaccctatctcaatggtgaaagggatgtgtactttttactggatgaacctcaggaaagagtcaagattggaatatcaggtaatctcaggcaacgcgtggataccttgaagcaacaacataataccagcctgcttcttatctccataatacccgcagggggtattgagacagaatccgcattacatcttttctttaaaaaatacaggctggatcagaagggacttggtagagagtggttttcttatacggatgaattacgtgaatttatcaataccctgaacacctatgcaatcagaagccactgccttagagcttacggcattatctga

SEQ ID NO: 180487 - DNA, 909 bp, Klebsiella oxytoca
atgaaacaactccccacatgcgctgaagcaaaagcccacgctaaatacctttcacggtcgctcaatatcaatctaagctacgcccgggatgcagtggcattacgttataactgccataactggtcggaactcaccacactatttggtcagcttagcgataagtacatgtcgtgctatggccttgccagccatgaagagaagtgtgtttttagccagcttctggcaccatatatcgcagaattgcaaaatgccattcatcctgaccgccatgtgccggaaagcttgatacgtaagattgctgaaggccatatttctcgggtatccggtaaagtcatgtcagctgtaatacgtgaatgcgaggattctccccccacgacaattaaagacatcattgaactgcttgaattttatgatgaaacggccagccgggtattagcaggacaccacaagcagatcccgaccaataatccttggctggaaccttgggtatttggtgtgcgcttttatgcctattaccactttaatggcaagcaggtcaccatcttaagtcgggagtgggatttagatattcatgatgcctacctgccacatgcccgtgacaaagtattttcacgcccatggtttcaggactatatgatcggctatctggcctacctcgtgaagcaatttatcgggttgggttacgacggtaccgttaagatatgttgcattaataattacagcgcgctgaattaccatcagaaaaaagcagcccccaacggtcgtgtggggctcaatcacttatacagagagttacttaatcgcggaggagaggaaaagtggtcgtctagtcaaaatggtcataaacatgattttggtatcgagctcccgtttgccgcattgacctcattgaagaaaggaagaaaatga

SEQ ID NO: 180488 - DNA, 1506 bp, Klebsiella oxytoca
atgggaggggttggtatcgagttacgcatggggattttgcataatgccgccaagcaacaaatgctaggcccccttttgtcccatgggtggattgcttcggtcgtagaagagtccaaagatggtgaatacttagtaatagacgccacaaaaggtgcgaaaaagcattcagtcgcactaatgtatacttcagcaacagataatcgacactacaggcagttggaaagtaaggtcagtcatattttcacaaatggccagctttaccatgttgaggagtatacaagaggagtcgctactccagtttcttcactggatgatttttttcctctgctggtcgagtggaatagcgaattagcaccaccgaaactaagtaaaaaaatcgcaaactcccctgactcgataatcagaattgtttcagaaaatcctttggccggtatttgggctcgtctgaatcagttctccagctctgagatagctaaaaagctggtcttaaggcgagccgagagagaaggagttgtgctggcagatgagcaggtcctttctaaagcgtatggcatcgcgtttgcgttgggcaacgctgctgattattacaaaggcgcgccgtacgaaagtttgaataagcgagttcttagcttgtactacggaaccttgagccttgcatttgcagagatgctggccgcacctaatgggccctccgatcttgatcagctggaaggcatgaccaaacagggacatgggctgttcgctctgtcatcagtaaccggtcatttcggagacctgaaggttggtgtactggctactgggttttaccctaattgggtgagttttctggggtatgacaccggtttttatcctaaggctaaagcgaaatccgtgggtgatttagataattcggttaagtatccctcacagtcatttaccggcatgtctgttttactatctgcgattcccgaattgggggatctattcactcaggtctacgacgatgagcctgcttgggttattccgtatatcgatatgatctctcaacacgcacaaagaactgctaatccttcgagcagttacatattgcttaaggatcggtctaataagatatccgaggcacgaattgctttgcaggattggccgcttgctgagttaacaaaggttgaaactccccacgatggtgaagtgtttcgggcgcgcgttgatcatcaggggttgaagtcttggcacgatgcgttgttattgcatcgcagcccttatctaagcagccccacattaatcttgccggtattaggaggtgtgccggagtatagggtcacctctcttgcgatattgtattcgttgtcaattctggtgaggtacatgccaagtgcctggaggcgggtggaaggaggtgattgggaccagcatttaagtgtcatgcgtgccgtactggacgtatttgagaggattctcccacaacaatttcttgaaagcatttcaggcgagcgtgttcatacgagcttaccaggctctcttatttaa

SEQ ID NO: 180489 - DNA, 864 bp, Klebsiella oxytoca
atgataattgatgaagttgatgagtgctattcttatcgtgagttgaaatctctcacaaatgataaaaaacttcttacggttgtgaataaactccgtaaagaatattccacattagctaagacatggaatcctgaccaaaactcccagtgggtgtgccgcatctacttttgtacaaaaatgattctcaatgccactgtaattcttaaacaatctgactttgctgaggagaaaaatttaagagcagcggtcccttactttcattattatgccatgctgtcaatattaagatgcgtagtattaactttacctaccgaagactgggaagagggtaagattcttagcatttctcataaaaaagccagaataaagacacgtgagtggcttgctagatacgataaaaatattgccgatcgatttgataatatttttaaaacactaaaatctaacagagagttgttatcctacaaagccccagctagtggagatgaaaacattcaaatccaagatgaagttaattttttttgcactttacttgctgaagttgcacaacttaattcagctatattgcataaagcagtattaaaacatgctgatccaatgaattttgttgttatggatgagcatatgagcagcatatataacgtagagatggaaggaaatagttattatgatcgtgaggatcattatcgattagactacctacgtcgcaaaggttcaaaaccttatagtatttttctgactatgaccgaaggacagactgaagattttattggagcctgggatgcagaaaatgatgattctgaagaggcaagattctatagtggttctccctgttcatggcaagaaatcttcgatataccttaa

SEQ ID NO: 180490 - DNA, 564 bp, Klebsiella oxytoca
atggctaagctaaaattcgatagtaatcatattactgcaatcaaacaagctatccgagaaggaggcgatatttggtataatgcctgccttaagccagttaaatcgcaaataaagtctcactatcgcggtgtaaaaaacagatgttgttattgtagaagacctttaagaggcgaatttaacttggtaatcgatattgaacacgtattgccacaatccctatataaaaaatatatgttctcaatgaaaaatttagggatcgcatgcaaaagatgcaacatgagaatcaaaggtaataacattgagtttttaaatttaccattcaaaaacaacaaacctttccataaagaaaattataaactcatacatccaaccttagatgagtactctaaaaacctcaagagaattgtgcttgaggaggatgacctaacatttataaaatatacggtagttaatgatagtaaaaaagggatgtatacatataatttctttaagctacatgagtttgaggaagatcagataaacaaagcacaggggatggaaattgtggagaagtatataagttaa

SEQ ID NO: 180491 - DNA, 1185 bp, Klebsiella oxytoca
gtgtctttgtctttattgaaacctaataaaattcatctccttataggtgagaatggtgtaggaaaaagtcttttactcggaaatctatcttcagagatagcttatcagcaccctaaagagagtataataaccattgctaacactcttcagaataaattcccactcttaaggattaaaaattacttcagattatcatctaacaaaatcagatttgcagaagaagcggtattacaagcatttattgcctacgcaaaaaaacgtgaggaccatcagataataaatttactgcggaacactcttagttatatagggtattccgaaaaaatgatcctttccttcaagataaaacggcaagttgattttaaacagctaatctattcgatggattacattaaatcagttgaagatggcgaggctgataaaatttacaaatttatttcaaaattaattgagaaaaatgatgggcgaggaaactatagaaatgactatgtgatggtgactcatgaaataaatttggtagactttatttatgatttaaattccgaagctattttaacattacttgagcataaatatcatctaaaaaaacacaaaattctttatgacataaaaatcactatatcaaaagatactgattggttgaacttgaatgatgccagttcgggtgaattggcgctactaaccactatggcacatatatcaacatatatcagtcataatgcattcattcttatcgatgaacctgaaaatagtttacatccaagatggcaaagagaatatgtcaatcatttgtacaatatgttttatcagttcgaaccaataataattttagcaacgcattcgcccattgttgtttcaggcgcatttgaatcagatttagcaccttcaatctacgaagttagaaatgcagatatacatcgctcctatgaggcaagcacaactaacgtggaagagattttactggaagtttttcaattactcacatcagaaaataggttcttcagttttaaagttaataaaattataaacgaatacatcagcggggagattagcgatgtggaagttaataagcagatcgataggctaagacagttatcctcggataaaaatcaaattaaaattattgattccatacctaatataataaaaaaaatagcaacaaaaaaaggtgaagttgatggctaa

SEQ ID NO: 180492 - DNA, 540 bp, Klebsiella oxytoca
atgaataccgcattatccccggtgtcaacgcagcctgaactctttccactgattatggccccgcatggttatttgctccctgcgaccgccggattaaccccctatgcccaacgcaccattcgccgcgctatcaatctactggataaatatctgcgtcagcccggcaaatcctttacctccagtactgctgctcgtgactggcttcggctacagctggccggacaggagcgggaagtgtttatagtgctctatctcgataaccagcaccgtttactggagagtgaaacactatttgccggttcgattaaccatgtccaggtccatccccgtgaggtggtgaagtcagcgcttcgcttcaatgctgcagctgtcgtactggcgcataaccatccatccggtgacccggagcccagccaatgcgaccgcaacattacgggcaggcttaaagaagcgctggcactggttgatgtgaacacgctcgatcatctggtcatcggttcagagggcatagtgtcgttcgcagagcgaggctggatatga

SEQ ID NO: 180493 - DNA, 342 bp, Klebsiella oxytoca
atgaaaactctacctgcaacaactccgcagacggcaacgctatgtctgtcgcccgtggctgtctggcaaatgctgcttgcacgcctgctggaacaacattatggactgacacttaacgacacaccattcagtgatgaaacggtaattcaggaacatatcgatgccggtatatctttggccgatgccgtgaattttctggtggaaaagtacgaactggttcgtattgatcgcaggggattcgactggcaagaacagtccccatatctgcgggcagtcgatattctgcgggcgcgacaggcaactggtttattgaaaagaaatcgtattagcgcggcacggtga

SEQ ID NO: 180494 - DNA, 1008 bp, Klebsiella oxytoca
atgggcaacagaatgtggatgatccgcggtgacggcggcaagctctatgacgattttcgcgataagcaaattgtaggcatcggttggtctcagctggctccattagtcaaacccggcctgtcccgagctcagttactcgccttataccaggaggcagatccattaacaaagctgggaactgcgcgttctggtgcatcgcaggtctggcgttttgtgaacgaaatccaaaagggtgattgggttattacctattcgccagccaaccgtacttatttgctaggcaaagttacttcagacttccagtatcatcctgaatggctggaagaggggatgggtatcgctcggcaggttaaatggaatactcaagaaatcgaccgcgatagactatctgttgctaccaaaaacacattgggttctacgctgacggttttccagcttccagaatatgcgctagaagagcttttgcaggataagaaacccactgcagatgtaattactcagaatccaattgcgatggatgaagatgaggttgtttctgatccgcttcgcgatatggaaatgctggcgtttgagggtatcaaagatcgcatcaattctcttgattgggacgagatgcaaaatcttgttgccggagttttacgcagtatgggctataaaacgcaggtttcacctgcgggagctgatcggggtaaagacatcatagcttcacctgatgggttcggttttgaaaatccgcgtattatcgttgaggtaaagcaccgcagggaacaaatgggaagccaacaaatccgtagctttatcggcggtcgccataaagacgatcgcgggctttatgtcagtacggggggctttacgaaagatgctcgctatgaagccgaccgttcgacgatacctctgacgctttggacgcttgatgatctcgtccgtgctcttattgagaactacgagcaagtcgatatcgagaccaaacttttggtgcctctgaagaaaacgttcctgcctgcctga

SEQ ID NO: 180495 - DNA, 1977 bp, Klebsiella oxytoca
atgaaattaacaccgattatgaaaagtctggctctggcaggaattatctcgactctccctgtgaccagctgggccgaaacgtcgccgaaagaagccgctgcggcgaccaaacaggcaaacgatgcgctgtataaacagctccccttctccgacaacaccgactttaccaacgcgcataaaggttttattgccgcgcttcctacggaagtgattaaaggtgaacagggcaacgttatctggaacccgcagcagtacgcctttatcaaagagggggaaaaggcgccggatacggtcaaccccagcctctggcgtcaatcccagctcatcaatatcagcggcctgtttgaagtgaccgaaggcgtgtaccagatccgcaacctcgatctctccaatatgaccatcattgaaggtaaagagggcatcacggttgtggatccgctggtatcagcggagaccgcaaaggtcggaatggatctgtattacaaaaatcgcggcaataagccggtcgttgcggtgatctacacccacagccacgttgaccattacggcggcgtgcgcggcgtggtcgatgaagccgatgtcaaatccggcaaagtcaaaatctacgcgccttccggttttatggaggccgccgttgctgaaaatattatggccggtaacgtgatgagccgtcgcgccagctatatgtacggcaacctgctcaaaccggatgccaccggccaggttggtgcaggtctcggcaccacaacctctgccggcaccgtcacgctgatcgctcccaccaatatcatcgagaaagatggccagaaagagaccatcgacggcctgacctacgattttatgctggcgccgggctcggaagcaccgtcggaaatgctgtggtatatcgaagagaagaagctcattgaatccgccgaagatgtcacccataccctgcataacacctactcgctgcgcggggcgaaaattcgtgaaccgctaccgtggtcgaaatatatcaacgccgccattgtgcgctggggcgacaaggctgaaatcatcatggcccagcaccactggccgacctggggtaatgagaacgtggttaacctgctgaagagccagcgcgacctgtatcggtacattaatgaccagactctgcgcatggccaacgagggcctgacccgcgatgagatcgccgccaaattcaagctgccggacagcctggccaatacctgggccaaccgcggctactacggctccgtcagccatgacgtgaaggccacctacgtcctctatctcggctggttcgacggcaacccggctacgctggacgagctgccgccggaagaagcggcgaagaagttcgttgattatatgggcggcgccgacgctatcctcaagaaagccaaagaagattacaaccagggcaactatcgctgggtagctcaggtagtcagcaaaattgtcttcgccgatcccggcaatctggaggcgcgcaatctggaagccgatgccctggagcagctgggctatcaggcggaatcaggaccgtggcgtaacttctacctgaccggcgcgcaggagctacgcaacggcgtcgtgaaagggccgacgccgaataccgccagcccggataccgtgcgggccatgaccccggaaatgtttttcgactatcttgcggtccatatcaacggcgaaaaagccggaaccgccaaagcggtgttcaatatcgaccttggtaacgatggcggtaaatataagctagagctggaaaacggcgtgctcaaccacaccgccgatgccgaagccaaagacgccgacgctaccatcgcgctggatcgcgccacgctgaacaaaatcatcctgaaagaggaaacgctaaaacaggcggaggataagggtgaagtcaaagtgaccggcgacggcgcgaagctggacgagatgctgggctatatggataaatttgagttctggttcaatatcgtgacgccgtaa

SEQ ID NO: 180496 - DNA, 1053 bp, Klebsiella oxytoca
atggatatcacttttttccgcgccgccctgttcggcgcctgcgtattactttcaggctgtgattcagccaccactccccagacgccaaaatccgccgccaccgtgctggaaggtaaaaccatgggcacattctggcgggttagcgtcatcaacgttgatgaggcgaaggccgaggcgctgcgccagaaagttcaggctcagctggatgccgacgaccgtctgctttccacctggaagaacgattcagcgttgatgcgctttaaccattcgccgggcacctcgccgtggccggtcagcgaggcgatggcggatatcgtgacgatgtcgctgcgcattggcgcaaaaacccatggcgccatggatatcaccgtcgggccgctggtcaatttatggggctttggcccggataaacagccggtcaaaacgccggatgcgcagcagatttccgcggcgaaagcgcgcagcggattacagcatctgacggtgatcaaccaggccggcaagcagtttctgcaaaaagatattccggatctgtttgtcgatctctctaccgtgggtgaaggctacgccgcggatcatctggcgcgcctgatggagcaggaggggatctcgcgctacctggtctcggtgggcggcgcgctggcgagccggggaatgaatgcggaagggcagccgtggcgggtggcgatccagaagccaaccgatcgcgaaaacgcggtacaggcgatcgttgatatcaacggccacggcatcagcacctccggcagctatcgcaactactatgagctggacggtaagcgcatctcgcacgttatcgatccgcaaagcgggcggcctatcgatcataaactggtttcggtgaccgttatcgccccaacggcgctggaagccgacggctgggataccgggctgatggtgctggggccggaaaaagcgcgggacgtggtacgcgaacaggggctggcggtctatatgattatcaaagagggggacgggtttaaaacctggatgtcgccgcagttccgcactttcctcgttggcgagaaaaattaa

SEQ ID NO: 180497 - DNA, 1095 bp, Klebsiella oxytoca
atgaaagttaaagtactgtccctcctggtaccggcactgctggtagcaggcgcagcgaatgcggctgaagtctataacaaagatggcaacaaattagatctgtacggtaaaatcgacggtctgcactatttctctgacgacaaatcttccgatggcgaccagacctacatgcgtctgggcatcaaaggcgaaactcagatcaacgaccagctgaccggttacggccagtgggaatacaacgttcaggcaaacaacaccgagagctccagcgatcaggcgtggactcgtctggcatttgctggtctgaaattcggcgacgcgggttctttcgactacggtcgtaactacggtgttgtctacgacgtaacttcctggactgacgttctgccggaattcggcggcgacacctacggttctgacaacttcctgcagtctcgtgctaacggcgtggcaacctaccgtaactctgacttcttcggtctggttgacggcctgaactttgctctgcagtatcagggtaaaaacggcagcgtaagcggtgaaggttcgactaacaacggtcgtggttggagcaaacagaacggcgacggttacggtaccgctttgacttatgatatctgggaaggtatcagcgctggtttcgcgtactctcactctaaacgtaccagcgatcagaacacagttcctgctctgggccgcggcgacaacgctgaaacctacaccggtggtctgaaatatgacgccaacaacatctacctggcgactcagtacacccagacctacaacgcaactcgcgctggcaaccagggttttgctaacaaagcgcagaactttgaagtagttgctcagtaccagttcgacttcggtctgcgtccgtccgtggcttacctgcagtccaaaggtaaggatctggaaggctacggcgaccaggatctgctgaaatatgttgatgtaggcgctacctactacttcaacaaaaacatgtccacctacgttgactacaaaatcaacctgctggacgacaacagcttcactcgtaacgccggtgtttctaccgacgacatcgttgctctgggcctggtttaccagttctaa

SEQ ID NO: 180498 - DNA, 651 bp, Klebsiella oxytoca
atgaacaatatgaacgtaattattgccgatgaccatccgatcgtactgttcggtattcgtaagtcacttgaacaaattgagtgggtgaacgttgttggcgagtttgaagactccaccgcattaatcaacaatctgcctaaactggacgcacacgtcctgattaccgatttatcgatgcccggtgataaatacggcgatggcattacgcttattaaatacatcaagcgtcatttcccggacctgtcaatcattgtactgacaatgaacaacaatccggcgatcctgagcgcggttctggatctggacatcgaagggatcgtcctgaaacagggtgcgccgaccgatctgcctaaggcgctcgccgcgctgcaaaaaggcaaaaaattcaccccggaaagcgtttcgcgcctgctggaaaaaatcagcgccggcggttacggtgacaaacgtttgtcgcccaaagagagtgaagtgctgcgtctgttcgccgaaggcttcctggtcaccgagatagccaaaaagctcaaccgcagtatcaaaaccatcagtagccagaaaaaatcggcgatgatgaagctcggcgtggaaaacgatatcgccctgctcaactacctctcttccgtttccctgagctcaacggacaaagactaa

SEQ ID NO: 180499 - DNA, 843 bp, Klebsiella oxytoca
atggagcagccgtcacgtgctgtcacaaatcacacaatggtccctatgagcgcatttgatccacaagccgaagataccccatcctccattggcaacactctgggccgccgtcctctggcgcgcaaaaagctgtctgaaatggtggaagaagagcttgagcagatgattcggcgccgggagtttgcggaaggagagcagctaccgtcggaacgtgagctcatgacgttttttaacgtgggacgtccatcggttcgtgaagcgctggcggcgctgaaacgcaaggggctggtgcagattaataacggcgagcgcgcccgcgtgtcgcggccttctgcagataccatcattggtgagctctccggcatggcgaaagattttttatcgcacccgggcggaatagcgcactttgaacagctgcgcctgttttttgagtcgagtctggtgcgctatgccgcagagcatgccagcgaaaagcagcttgaaaaactcgctcaggcgctaaaaattaacagccagtcgcttgatgacaatgccctgtttatccgttctgacgttgaatttcaccgggtgctggcggaaatccccggtaatccaatctttatggctattcatgtggcactgctggactggctaatcgcggcccggcctaaggtgccagaacgtgagctgcacgaacataacagcgtgagctatcaacagcatatcgctattgttgacgccattcgtcgtcgcgatcctgatgaagccgatcgcgccctacagacccatctcaacagcgtatccgctacctggcacgccttcggtcagaaagctcagccccgcaaacgatcccctcgctcatga

SEQ ID NO: 180500 - DNA, 894 bp, Klebsiella oxytoca
atggcagttaatttacgtggggttatggcggcgttgcttacgccattcgatagtcaacaaaaactggataaaaacagcctgcgtcggctggttcgttttaatctgagccagggagttgatgggctatatgtgggaggctcgaccggtgaagcctttgttcagagcggctcagagcgccaggaagtgctggagatcgtggcggaggaggcgaaaggtaaaatggctctcattgcccacgtcggctgtgtgagtaccctcgaaagccagcagctggctcgggctgctgcaggctatggcttcgatgccgtatccgccgtaacaccgttttattatccgtttagttttgaagaacactgtgcgcattatcgggccattattgagtctgctaatggtttaccgatggtggtgtacaacattccggcgctcagcggcgttaagctaactctcgaacaaattaatacgttagtgactttgcctggcgttggtgcgttaaagcagacttcgggagatctgttccagatggagcagatccgtcgagcgcatccggatctggtgctgtacaacggttacgatgagatatttgcctctggcctgttggcgggcgccgatggcggaattggtagtacttacaacattatgggctggcgttaccagggcattgtacaggcgttgaaagagggtgatgttagcaaagcgcagcagttgcaaagcggatgtaacaaggcaatcgatctgctgattaaaaccggcgtattccgtggattgaagagtgtgctgcactatatggatgttattgctgagccgctgtgccgtaagccttttggtccggtagatgaaaattatctgccggagctgaaagcgctggcgcagcagctaatgcaggaacgcggctga

SEQ ID NO: 180501 - DNA, 594 bp, Klebsiella oxytoca
atgagtgcaacgacccagaacatcccgtggtaccgccatctcagtcgtcctcagtggcgtgcgttctctgctgcctggctcggatatttgcttgatggttttgattttgtattaatcgccctggtacttaccgaagttcagggggatttcggcctgacaaccgttcaggctgccagcctcatctcagcggctttcatctctcgctggttcggcggcctgatgctcggcgcgatgggagatcgttatggtcgacgcctggctatggtcagcagcattatacttttttcccttggtactctggcctgcggttttgcgcctggctataccaccatgtttattgctcgtctggttatcggtatgggcatggcgggagagtatggttccagcgccacttatgtgattgagagctggccccgacatttacgtaataaggctagcggttttctcatctctgggttctctgtaggcgctgtgattgctgctcaggtttacagtctggtggtacccgtttggggttggcgagcgctgtttttttatcggcatcgtacctatcgtatttgctctctggctgcggaaaaacattccggaagctga

SEQ ID NO: 180502 - DNA, 852 bp, Klebsiella oxytoca
atggtcgatatcctttatcggggcaaacatcgggttattaatattctgatgaccatagtggcagcggttgcgctatggttctgctttgcgggcaacccgcaaaacgccggtatcgtgctactgctgggcgtgatgtgtgccgtgatatttatcagctttatggtgcagagcagcggcaagcgctggcctacgggcgtgatgctgatggtcgtggtacttttcgccttcctttattcatggcctatccaggcactgctgccgacttatctgaaaacagagctggcctatgatcccgcgactgtggcgaagattctgtttttcagcggctttggtgcggcggtcggctgctgcgtgggcgggtttctcggtgactggctgggaacgcgtaaggcctacgtttgtagtctgctggcttcacagctgttgattattccggtctttgctatcggcggcacaaacatatgggtccttgggctgctactgtttttccagcagatgttagggcaggggatctccgggatcttaccgaaactgatagggggttatttcgacaccgatcagcgtgcggccggtcttggttttacctacaacgtgggggcgctgggcggcgcgatcgcgccagtgctcggcgccctgatcgcccagcgtctcgatctgggcaccgcgctgggttcactctcttttggcctgacgttcgtcgtgatcctgttgattggtctggatatgccgtcccgcgtacagcgctggatccgtccggaagcgatacgaactcatgatgcaatcgatggtaaaccactgagcggtgcggcgccttttagcggtgacaaaagcggattagttaagaccagatag

SEQ ID NO: 180503 - DNA, 690 bp, Klebsiella oxytoca
atgtctttgcttaaagaactggatttacgcattagcgcaaacggcggtcttattgtttcctgccagccggtacccggtagcccattggataagccggagatcgtggctgcgatggcgctggcagcggagcaggccggcgcagtcgcgttgcgcattgaaggtgtagagaacctacgcgcgacccggtcgcgggtgagggggcctgttatcggcattattaaacgtgatttagatgattcaccggtacgcatcacgccatatctggaagatattgatgcgttggtgcaggccggcgccgatattatcgccgttgatggaaccgagcgtgagcgtcctgtgcccgtgtcaatgctagtggcgcgtattcatcagcacaatcgggtagcgatggccgactgttcttctctgaaggatggcctggcctgtcactctctcggcgtggaaatcataggcactacgttatcgggctataccacggcatatacgccggatgagccagacctggaactggtaaaagcgctgacggaaaccggctgccgggtaaatgcagaagggcgttataacacgccagctcaggcggctgaagctatgcgccgaggggcgtgggcggtgaccgtcggttcagcgattacccgtcttgaacatatttgccagtggtataacgcggcgttaaaagaggctcagccatga

SEQ ID NO: 180504 - DNA, 873 bp, Klebsiella oxytoca
atgactacgctggcgatagatattggcggtacaaagctcgctgcagcgctggtggctgatgacatgctgatccgcgaccgccgcgaactttccacccctgccagcaaaacgccggatgcgctacgcgctgcattagcaatgctggttgggcctttatacagtcgggcgaagcgcgttgcgatagcctcgacgggtattattcgtgacggtcatctgttcgcaattaatccgcagaatctgggtggacttatgcactttccgctggtgcaggcattagaggagctaacggacctgccgacgctggcggtgaacgatgcgcaggcggctgcctgggctgaataccgggctattgctggtaaggtcagcgatatggcgtttattatcgtctccaccggggttggcggcggcgtggtgagtaacggaaggttgcttaccggtgccggcggtttggctgggcatctgggccacacgctggccgaccctgacggaccgctttgcggctgcggtcgggtaggctgcgtggaggcgattgcttccgggcgagggatttcggcagctgcgcggggcgcgcttgccggctgtgatgcgaaagccatctttaccagcgcggctcgcggggatgcgcaggccctggggctgcttgaacgctctgcgcatgtcgtagcgcgactgatcgccgatataaaagcaataaccgactgtcagcatgtggtggtcggcggcagcgtcggcatggctgctggttatctggaacggatacggaagtacctggcctgggaaccatcggtgtatcacgtaacgctgagtacggcgcactatcgacatgatgccggattgctgggagcggcgttgttagccagaggagataaatga

SEQ ID NO: 180505 - DNA, 468 bp, Klebsiella oxytoca
atgctgatgggagatatcgggacgctggcggatacagggttgcatccggtgctggcggaagcgttaacgttggcattagccgccaggccgcaggacaaggcaccgggccgctatgaactgcgtagcgagaatctctttatgaacgttatggcgtttgtcccccttcctccgaaagggaaaaaagcggaactgcatcaacgatatattgatattcagctgctgctgacaggtgaggagcggattttttatgggacgattggctctgcgcggcaatgcgacgaatggcgcgcggaggatgattatcaactctgcgcggagatagctcatgagcagtctgtgacattgaagccagggatgtttttggtgtttatgccgggtgagccacacaagcctggatgcgtaataacagagtccgcagagattaaaaaagtggtgattaaagtgcgctctgatttgttaagcgcataa

SEQ ID NO: 180506 - DNA, 1056 bp, Klebsiella oxytoca
atgaaaaaattattcattttttttattttgctgatttgccttttttcatcatcatcctgggcaatcgactgttatcaaaataactacggtggagaccatctcgttaccacatcactgccgccatttactgtccccgcagacgcacctgttggaaaaaaaatatgggaaagcggcgatattactgtaaccgtttattgtgatgaagcctcacataacaataaagatcccaaatcgccttggtcagaaaacgtttatgcttatattctggatagcttccataacaccgataacctggttaccaataattcttatctggcatttggtgtaacctataatggtgtggattacgacataccgaacacaaaaatcaatacaggcgcatgccttgatcaaatgagtgactttgaccagtcatataagcataaggcatgtaatggccatacaatccagaaaaacacgacatttaccgttcgttttcgcttatacgttaagctaaaatcaattccaccttcacagatagagtataattttcctgcagtcaccgtattagcctttgatggttctggaggaataaaccggctggcgcatgctaaaaacttgcactatgatattgacgggctttcaaacattcattttttagattgtagcgtagatattaaaatttatcccgaatcacaaattgtcgacttcggtcaaatatctgatagtgttatattgaaagaaccagcaaagaaaccatttagcatatccactattaaaaatgaagctgcgggatgtaccgataaatttgatgtcaaaaccagtttttatactaatgatacgctatacgataatactcatctggatatgggaaatggtcttctgatgcgaattaacgacaaaacaattaacagcgatatcgtgtataaccaatatgcaaattttgcaagctatattccaggtagcgctgcaacggtaacccataactacattgctgagttgacgaagcatccaacaaaaagtcttgtggaagggcctttcagtaaagatttaatcataaaaataaactatcagtag

SEQ ID NO: 180507 - DNA, 1221 bp, Klebsiella oxytoca
atggagggtcaagatcacgatcaaggtaaacagcgcggctttagctatcgcgctaactatgccaaacgttttgaagaaacaaacagtcaggtaaccttcgcgggttaccgattctcagataaagaatacgtcacgatgagcgaatatatcagctcgcgcgatggttccgactccagttccaatgagaaagagagctatgtgctctcctttaaccagtacgttgcgccgctggagctaaatacctatctgagtatcacacgtaatacctactggaacagtcaaaccaatacgaactactcgttttctctgagccgtagctttgatattgacgcgtttaaaaatatttcagcttcattggcgatgagccgtgtgagctggaataataatgaagaaaatcaatattacctttcactctctctgccgctagaaaataatcgcaatattatgtatagcctgcagcgctatggcgacgacgcaacgacgcaaacggcaacctggtacgatggttcagatcgtaataacccgtggaatatgtccgtttcaggcacagataaagagtttggcgatggcgaagcggccatgcgcgggtactatcagcactattcaccctatggccggttgaatgtaaacggtagcgtgaagccgagcagctatcgctcgttcagcgctggctggaacggctcatttacggcaacccgttacggtgcggccttgcatgactacaacacaggcaacagttctcgcgtaatggtggatgcggatggaatagccggtgttgaggtgaacaataaccgtagtatgaccaatatgtttggtatttccgtggttccgtcagtgggtaactacacaactgcgacggtaatggtgaacaataacaacctgccggatggcgtggatgttaccaactccgttatccgcaccacgctgaccgaaggtgctattggctatatgcccctgagcgcgaccaaaggctatcagatcatcggcgttatccgcctggaagacggacgctatccaccgctgggcgtgaccgtaaccgacaaagcaaccggtcgcgatataggtttagtcgctgatgacggctttgtgtatctgagcggaatacaggaaaacagcatcctgacgctaaaatggaacgacaacgtgtgtgatatgacgccgcctaaccatagcaacatcaacggccaggccattattttaccatgtaaacccgcacattaa

SEQ ID NO: 180508 - DNA, 2658 bp, Klebsiella oxytoca
atggatgatctactgatctttggcgctgtgattttattctgcgggctggtggttgggccgctcgtggcgattgccgcgctcaggcgcagcgcggcggtccgtgtggaactggcggctttgcagcgtcgggttgaggagcttgagctgcgcggcgttgcgcaggcaccggtggcggagacaagtggcgtcgtgccgactgctccggaagtcgttgcttctgttgacgcaacagcgctggtagaacatgagccatcatcggcgcccgtggcggaagccgttgacccatggctttcgcagccgaagccaacgccgaagccggagcagatggcgaaatcggctcctgaaaccgaacaaccttccgcgtttggcgggatggtatcgtcattggttcgttggtttatgcagggtaacccgctggcgaagctcgggatcctgctgctgtttcttggcctctcctttctgctgcgctataccgtggaacacgctcttttccccctcgagttacgtctggtcgcggcatcgttgttcgccattgtcctgctggctgtcggatggcgattgcggcataagcaaccgatgtacgccctgatcttacagggtggggcaacgggggcgctctatctcaccgtttttggcgcctttcgcctgtggcagatgctgccgatgaccctggcgtttgcgctgctggtggtgatttgcgcggcgagcgtagggctggcgattgtgcaaaaagcgctcagcctggccatgctggcgagtcttggcggttatcttgcgccgctgctgctctctaccggcggcggcagtcatgtggcgttgttctcattctatcttctgctgtcggtgggcattcttaccatcagcatccgccagcactggcgggagcttaatctgcttggcctgctgtttacctttggcgtcggtggcctgtgggggctgaatgattatcggccagagtattacctgagctgccagctgttcttaatcgccaatacgattatttttggcgtgttgagcgtggcgctgtcgctgcgggcgcaggaaaagggtaagcagattattgacggcgttctgctgtttgcaccgccgctggtcggctttggtatgcagtacgctatcacccggcatatggaatatggtccggcgctcagcgcgctgggctacggtggcttctatctggctttagcctggctggcactgcgtcgctacccctctttagggaagccgctggtactggccgcgctggcgctcggcggcgcatttaccacccttgctattccccttgcgctttcggctcgctggaccgcgatggcctggtcgctggaggggctcgggatcctctggctgggcgtgcaacagcagcagcggcgtatgagctatagtgggactgcgctactctttttggcggttggcagcgcgctctgggcgcaggcaaataacgccacgccgctttctttgctgctgattttcgctgtactcagccttagctggctggtcgccgcctggctgtggcgaagcattgaggtgcacgccagtgggggactgcttttgggcgggctgttgttctgggtggtggcgcttgtcggcgcatcgcagctggcgttgagtaaagactcgcagattatatttggcgtgctggcgacgctggccgcgtcggtatggtgctggcgcgcggtcgctgcgcgtttagtctggcaagagctggatgccagcaaatggttgttgtggccaatgatgctgatagtgctgttttatcagctatcccaacagcagattttcgctgctggctggcaaaatctggcctggtgcgcggcgctgcccgcggcggcggcgctgctctggcgtgatgggccttcgctcccgccgcgcataaacaggctcgcccacctgtcgctgttctggatggtgttgctggcgctggcgatggagctgttttggtttacccgggatttgccgtggggcatgtcggcctgggcgagtggattaatgatggcggcaggcggggggctgatcttccttgtctctgaagccgttcatcggcaaatatggccattccgggtatggcctgggctgtatgcctctcaggccatgataccggtggcggttgcgctgggatgcctgctaacgctgacgaacgtgcaggatggtacggtctacggtcagacctatttgccgttgattaacccgctggaagagggcgccgcttttgcgctgcttgggctgacgatattttatcgcgtttcgcggcgttattttccgctgcagctatcggtatgccgcccctggcccgcgatcgcgctgctggcgctcggcttctggtggctgaatggcctgctgctgcgcgccctggcctggtacggcgaggtggcctggaatatagaggcgctgtggcattcgcgcttaattcagaccactttcgctctggtctggacgctggcggcgctggcggtcatgctgcgtgcgacgcggcgacactcccgccgcgaatggctgtgcggcgcggcgttgttaggcgttgtcattgtgaaactcatgctggtggacagcgcgcgcggcggcgggctggcgcgcgctgtcgcgtttatcggcgtggctattttggtgttgatcgtcgggtatttttccccgttaccgcccaaagcaggagaagaaaaatga

SEQ ID NO: 180509 - DNA, 1728 bp, Klebsiella oxytoca
atgaatacatggaaagccgcttatgatgcactagaagatttatatgattataatgataatgcattaggcttatttgctctcggattgcgttttggtttagatgacttatcaagtattggagttgatgcagttactgatggtgctgatgacaaaaaacttgatattgtatttattaacaaagaagaagaatacgcagttattggtcaatgttactactctgaaaaagaaagagagagtgctccttcaaataaagcaagtgatttaaataccggggtcgcctggttgctgcaacgtgcaataccagaggttcctgatagaataaaatctgctgcaattaaccttcgagaagccataaaggatggaactgtaaaaaatatttatatatggtttgttcacaaccttccagaatcgcaccatgttgagaatgaattagttactgtacaacatacaacgacttcaattcttaaaacggtatatcctggaataagtattgatgtttctaataaagaagtaggttcaaatactttacaagaatggtatgaagattgtagaactcctatattaataaataaaagtgtaacgttaaatacaataggtggctatgaaatttctgggaagggatggtcatcttactcaacagctatacaggctagagatctggccaaattatataaaaaacataaaactaaaattttttctgctaatattcgtgactatttaggatcgcgtaaatcagattcaaatataaatcatggcattaagcaaacagtggaaaatgatgcgccagatttttgggctttcaataatggattgaccgttctaactcattcgtactcggtaggggataaaacaattgtcattcaaggtttatcgatagttaatggtgctcagactactggggcgataggaaccctaaaaaaattacctgatgaaaaagcaatggtccaggctcgttttatagcagttgatagttcctctgaatatttaatagaaaatatcattcgttacaataatagccagaacaaagttgaagctgcagatttcagaagtacagataaaatacaaaaaaggttgaaggatgagttcaattcaattcctgaagcagaatatgagggcggtagacgaggtagtacaagtgatgtgattagaaggaggcccaatttacttggttcgtatacagtagggcaagcattggcggcatttcatggtgatccaattactgcttacaacaagaaagcaggtatttggattaataataagatttatgataaacttttcaatgataataccaaggctgctcatattgtatgttgctatggattagtgagggcgatagaagccaagaaaaaacagctacagttaaaagctaacttaactcgtgatgaagaaaaaaatctctttttcttacgtcagagaggggcaatattcttgacaacttatgcattatcttactgtcttgaaactattttagatcgttcagttccaaatttatttagaatatcttttggagttaaatgcactccaactaaagcaattgaaaattggaagccagtaattgatgcattgattccatttgtagaacatctgaatccagccatcaataatggattaaaaaatcaaagtgacatcgaacaagcagtaagcacattcaattcgctagcaaaatcaacgcgaacatttaattcagctgtttttgatattttcaaaaataagattgttgcgccataa

SEQ ID NO: 180510 - DNA, 903 bp, Klebsiella oxytoca
atgtttgaaaagttattcgaagtattttctagacgagaaaaagccagcagtattgttgaagttaaaccattaacaaaagaattcagaaatcgggtgttattgcttctgcgtgataaactccaatatgatttcactccatttcttagtgaacttcatcagcaagccgcttatctttatggcaagttcggtctatcaggatcaactgctcattcctcaccagcagatgatttggttaatttcttccttacttgtccagatgagaattgtttggatttgatagagctcattttccgttcaaatctccgtggaatctcttggcctgataatccactaatacccactattaatcagtttttcagtattgatgcacttccttatcacctgactaattattctatagaagaatatgaaaccatgttatatggttcaccggccacaggtgtgcgcattgttgagtatccacaaatcattcgtaaagatagtgaattagtgcatcaaaatgcgatggaacccgcgctccgtttgcttaaagcaccaatattcaaaaatgctaatgaagaatacctaaaggctttggaagatcataggaagggagattatagagactgcctaacaaaatgtggcagcgccttcgaaagtgtaatgaaagttctttgtgagaagaattctttaccgttcaagccgacagatacagcgtcaaccttgctaagaaccttgctagctaatgggcaattggatcagttttgggaacaaccattgatgttgattgcaactttaagaaatcgtttaagttcatcacatggtgctggaactcaagaaaagagaataccggaacatgtagctacgtacgcagtcaactccaccgcttccgccatgctactcttatgttccgcttttaaatga

SEQ ID NO: 180511 - DNA, 552 bp, Klebsiella oxytoca
atgcgccatccaattgctgcacagttagctgcgcctgaaacaaaggaattttgccaaaagattgttcctggcatccaacccgtattactgcacaacgatccttttccgggagcggaagagatggactgtttttttaatgtcgaacgggctattgagcagcatggcggcaaggccgtctacggttgggctatctggcagataacaggagtttatattgaggccgagttccactgcatctgggagaatgatgcaggagatatgctatatatcaccccatacccttataggatggacagcattctgtttctccctgattacacacgaatttacacaggtaagcaggtagataatatccgtcaagctctggttgatgaccccgacgtgatcaggtggttgtaccttgccagaaaacgatttgaaatcttaaatactggcgacctagcgaaccagcttggacgtattgaattgccatcaaaattagccaaagagtacagcaaagttatggatgagatagacaggctaaactctcgactaacacgcaggtattcatga

SEQ ID NO: 180512 - DNA, 267 bp, Klebsiella oxytoca
atgaaaaaatcacgattcaccgaagagcagattgtttttgccctgaagcaggctgaactggggacgtccgtgccggaggtctgccgtaagctgggtatttccgatgccacgttctatacatggcgcaagaaatacggcgggatttctccttcggagctgaaacacattcggcagcttgaggaagagaatctcaggttgaagaagctggttgccgatctgagcctcgacaaggccatgctgcaggatgtgctggcaaaaaagaactga

SEQ ID NO: 180513 - DNA, 642 bp, Klebsiella oxytoca
atgctcaggcgggagggctggcgggataatcataaacgcatttaccgactctacagcgagcaggggctgtccctgcatctcaaacgcccacgccggaataaatcggcacagcgccgacagccccagcctcaggggctgtatccgaatcatgtctggggcatgggctttgtctctgatgccttatttgacgggcgtcggttacgtctgctgacagtcattgatctctacacacgcgaatgtctggggatctgcgtgggccagaatctgcgctcaacggaggtcgcagagatgctgaacaccattgcgctcagacgtcccttaccacagttgctgaaaaccgataacggctctgaatttgcagggaaaatgctggacaagtgggtgtatgaacgggggatccgtatagacttttcccggccgggaacaccgacggacaatgccacagtggagtcgttcaatggcaggctgcgacaggaatgtctgaacgagaactggttcatgtctctggaggatgcacagtgcaaaatcgaggcctggcgcatacactataatcagaggcgtccccattctgcactgggctggatgacgccatccgaattcgctgagaagtctgccggttggcagaatatgcagccaacatga

SEQ ID NO: 180514 - DNA, 1263 bp, Klebsiella oxytoca
atgataaaggagaaatatataaatttcgtattacttttagcagtaatatcaaatagcattatcatccctgagcaattgcttggtcggaatatattttacatctattcctcagtagtaattattggctcttttttttattttaagaaattaagaatcacccgtcaggatttaatattaggtgcagccatcttccttattggagcatcacagctattatggtcctggaggtttccttcacatcttacggagatctatcgcgctgatactaattatcccaaaacgggtacttatctgatcatcggctctgtagtgatatcactgttcccggcgttcatgaggctatcaggaacaggccaacagaaaaaaacaacctactacctcttattcggttttattaccctgacattatatgcagtatattgcaaaatcattgctcccggtgagcgtcttcgtataaatacttcatctaccttaagcgctgcgctttatactatgtattcgctcttgacgctttattcgcttctgcgtatcagcataccttacagaaaagtgttggcttcattcattattttttcttcgctatatatattgatattaactgagactcgatcagctttaatcgtgtatcctgtaattctgctttacattttatttaataaatatgccgtagcaaaatggaaagcattatctatttgtgcactttcatttattttattttcactaatgattggtgtattctcgccaaatgtttataagagagcgagcgaggttataaccgatataattctttatcagcaaaataataacacatcaataggagcaagattaacgatgtggtattccgggataaacgaaatcataacccaccccggaggagtcagcgcaaaagagagatatcaaatcctggctgattttatcaataaaaaagaaaatggaaatccagaagccttacgcaatataccctatcatttacataatgatttgattgaaacgatgtcgcttcagggagctgccagcggcctgtttttattttttttctatataacgcttatctattacatgacaagaaagaaaccatcttatgccgctttatttctatgtttgccggtattattttttggtacggtagattctcttttcattcatgtaagattcgtcatcatgttaatcggctggttgattatttacaccggtttaactggagctttgctggttgaggataccccatctcctccccttaaaaaaggcaatgaagctgagtaa

SEQ ID NO: 180515 - DNA, 1032 bp, Klebsiella oxytoca
gtgtccgatattgattttgttgttttatgggtcgactccgatgataggtgttggcaggacgattttatacgttataaaactatctacagtgatacctataagttggcagtcacgccatcacgcttcagagatatggggttgtttaaatactggttcagggctgtcgaaaattacgcaccttgggttcgcaaagtccatctggtcacctgtggacaggttccttcatggctggataaaagctatcataaaataaatcttgtccgacatagcgacatcattgataaagaatatttacctacattcaattcacgagcaattgaagttaatattcataaaataaaaggattaagtgatcagtttgtatatttcaatgacgatatgttattaaactctcccatcactccagagttttactttaaaaaaaatttacctaatgattttttaatcgagaatgacattaaccctatatcaattgataataacatttcaaacctaatgttaacgaccaatgcctcagttattaatacatttttcaatcgcagagagtccatcaaaaaaaacataacaaaatattataacttgcaatatggtcgatatattaagaaaaatatatctaaaaagaaagcaagaaacttcactggttttttcggaaggcatttaccacaacccttcctaaaatctacttttgaggaagtttggtctcatggtgaaataagagaaatactggaaagaacctcaaaatccagattcagagacggctataatttaaatcaatatattttcagatattggcatttagcttcaggaaaatttaatccatgcaatcctaaaagattaggcagtcattttaatttaactggcgatcggcagcagcttgatcacgccattcaggccctgaaaagcgacgttccgcaaatctgcctgaatgatgatcttgagaataatacactttttgaatttgcatgtcagaaagtatcggacacgctaagttgtaagttaggaaaaacgtcaaagtttgagattgagatgtaa

SEQ ID NO: 180516 - DNA, 1674 bp, Klebsiella oxytoca
atgtgggagacgcgagcgttagaactgaataatcaggatatatggaactggtcatcggtatgcaatctggtcaggtatgcctctcagcatggctttaatactatcgtggtggggcaggcagatctcttcggtaagctggtgtccccgaagggatatacgccttttcactataacgatagcgtttccagccagcagagagcgcgctgtatctaccttaatcgtctcgccatgtattgccgcgagcaggggctgcgattttatttacaggcaaaagagctggatttcccaacggaattgctgttgtcgcataagtatctactggataaccagcaagggatcctttttgatgtggatttctggagccgctggctgacagacaaaattcgcggcgtttgtcagggaattccagctttaacagggctaattattgcgctttccagcaccgatggtttattgccgattacgcgccctaaatgggatataaacgccagggatgagcctgaaaatacccggcaaccgtcgcaaagctttgtgctctatcgccgttgttttcaagcgctcagccaggtggttaccgcacaaaataaacatctggttttgcgggttttccctgcaagtaatgatgatcttggtaccgttctcgatgctatcgagccgcttccgccaaccgtttcggtatcgatcaagttaacgccagaacgtttctggccagcatttccaaataatcccgcactgcttcaggtcactatgcgagacgtctgggttgatattgatttagcaggcgaagaggtgggctggggcgttatgcctttcttgcgcattgatgagttaaaaggccgactgctgtggtgccaaagcgcgaatcccagaatcaccggtgcgatatgcaaaaccagttgggagagcgttgataaccactgggtaccggaaacgttaagcgaatgcaatctgtttgcctgtagccagctgttaggtcatggtgcgggaaagacccaggagcagctgttggatctctggctggctgagcgttacggctggtgccccgatgttacagtcgcccgccgttttcagcagctacttgagcaggcaacggaggtgctttaccaggcgatttatgttcgcgatcacgtttttcaccgccatagtcagctaccggaaagctatggtcaggcagtatggagtttgtacagccagctggcgcgtaatcactggctgccggggtcggccaaggatatccacttcacgcgtgacgatccgcaaatatcgatggaaaacctcacgcgaattgcgcaagagaaggatgaggtagcggcagatgccctgaagctatgcgcgcaggcgctggagtttgccgagaatgccgcgtttcccacggcgctctatcggctctggcagaatgaatggcgggggctcgcactctactgtcagctgttcacgcatgcacagaaagctttttttacgctgcattttgctcgtgaggtggagaatagctggagtatgagagaaatctgccatatcaacgtgcaggcgttgtatcagggggcatccgaaatggagatgctttgccagcagatgaacgaagcatcgcctgggttttatatcatgttcgatgcgggtcgggttcgtagcctggctgatagcctgagtagcgaactatcggcactcaggcattag

SEQ ID NO: 180517 - DNA, 1098 bp, Klebsiella oxytoca
atgtcgcagaaaataagccatcctgaaatcatccgtcttatcgaaaaactgatcgatagcctcaccgcaattcaggatgacaatggtcaattcctgcagcgcctgcctgacgggcgcgtgattgatacaaaaggctgggctggatgggaatggacacatggtatcggcttgtttggtctctaccgctaccatgaacttaccggctcatctcgcgccaggcagattattgacgactggttcagcgcccgtttcgccgaaggaacgccggagaagaatattaataccgcgatcccttttttgacgcttgccagtcgctaccagcaggacgcgcgtcacgaatggcgcgcgtatctggaagtgtggggagatgcgctttatcgtcagattccgcgcactgatgaaggctgcatgcagcatgtcacctacgaaaacgcgcattatcagcaaatctgggatgacaccttgatgatggcggtcctgcctctggccaggattgggcttttattgcaaaaaccttactgggtagaagaagcaaaatttcaatttctacagcacattcactaccttacggatagaaaaagtggtttatggtttcacggctggaatttcgacggcaggcatcattttgccggtgcccgatgggctcgtggcaatagctggataacactggcgattcctgaactactggaaatgctcaatcttgatgagcatgacgccttctatcgccagctctgtaacatcctgcagggccaggtatccgccctcgcccgctgtcaatgtgaaaacgggctatggccgacgctattagatgatgcaacaagctacgctgaagcctcagcaacagggggattcgcagccggtatcctgaaagcgatacgtctcggctacctagacgacagctatctacccgttgccgaacgagcaatcgcaggcattattgagcatatctcgccggagggagaattaacccaggtttcatttggcacggcaatgggacacgaccttgaccattaccgacgaatccccctaactgcgatgccatatggccaggcgctggcgatgctcagcctggtcgaggctttataccgcacgcgttaa

SEQ ID NO: 180518 - DNA, 1515 bp, Klebsiella oxytoca
atgacgaggacaataacggcaccacgggaagtaaaaacacgcaatattctctgctgggggatgggcgatatcttcggcagcggggcaatgacgatcaccgggctttggctgctttatttttatattgaagtggcgggcctttctcccgccgccgccgcatccatctttgcgatcgccaaaatttgggatggcatcaccgacccgatcatgggttatatcaccgacaatattcgcacgcgctgggggcgacgccgaatattctttattatcggcgcgccgctctccttttgctttgccctgatgtgggtaagcggttttggctatgcctggtatcttggtacttatttgttattcagcaccgtttttaccctcttgatggtgccctacgatacgctgcctgcggagatgacatcgcgttacgatctgcgttcaaaaatgtctggcgcgcggatgctatttgcccaggcgacagcgtttttatctgcacttatcccaggacaaattttggcgcacgtcgccgataaatcgcaggcatttttatatatcggcctggtcttttccgtactcttcgccctaccgtggatcttcgtttggcggggaacctgggaacgggagaatctcccgccgccttcggctcagcgcgggatggggaaaacaattatctcgctgtatcgagaaatggcttcaactttccgtttacgtacttttcgcattcacatcatgatgtacgttggcggagccgtcgccctggatattttcggctcgctgtttatgcactatcttacatatgtacttcaggtcggcgcatccttagcttcccaggcaatgagcctgatgacgctatttcaattttttgccatccctttctttacctggctttgtattcgcatcggcaacggcaacgcctacaaactggcaattgcactgattatgtgcgctctactgtggttcagccagctttccgcctccattagccatttatcagggttcttattcggcggggccatcgtgatgggcatcgcacgcggcggaacctatcttatcccatggaacgtctacaactttttacctgatgtggatgaagcttataccggcgtcagacgtgaaggcatttacgcgggcgtcatgatgctaacgcgcaaattttcccaggccctggccctgtttattgttggactggcgctggaggcgtttggctttaccaaaggcgcagagtcgcaagatgccgccgcgctaaacggcatctggtgggtattccttatcggaccgggtttactcactctgctggcgatgtacggcgcgtttcgctttcgtctaagccaggagtgtcataagacgcttaccttcgagctagagcgtctgcggtctggcggtaaacccgaagatgcatcaacgcaggtacgacaaaccgtagagttacttaccgggcatccgcatatgaatacccactggcagcatacagctgaaacgacaacgcaagggaatctctatgtcgcagaaaataagccatcctga

SEQ ID NO: 180519 - DNA, 204 bp, Klebsiella oxytoca
atgtgtccgaaatcacagatgaactgcgggaaaaaaggacgttgtgagaacggcgacagattacttatgtcgatgctgttttgccctacggcgatcgataatgactgtgttcagatagcattcccatttcatctcaggaaatcctatgaacatttttctttcaaactggcgcccgcacgcagatggtattactcgcgacactga

SEQ ID NO: 180520 - DNA, 1359 bp, Klebsiella oxytoca
atgaacatttttctttcaaactggcgcccgcacgcagatggtattactcgcgacactgagatttttcaaaaagcgctggataccttatcgcaagcgggcggcggtacgctggtggtggaaagtggaaaatattaccttggcgggttacgcatggggtcaaacacctgcctgtggttgtcacccggtgcagaactcatcgtcagcgataattatgctgacttcacccaggcggtggccttaagccgtgcagagtgctcagaccgggctttcctctatgcccaggatgccgaaaatatctcgatttgtgggggcggtactatttacggtaatgccgatggttggttctcctcatcggttgatgatatgggctatcgcacgcccgccgaacagcggccgcgcatgattcttctggaaaattgccagcgggtcaggctggaaaatatctgtatacaccatgcgccgatgtggacaattcatcttgtttcatgttcacaggtggtgattgatggcattaccgtcgataacgatctgacaatggcaaatactgatgcgctggatatcgatagctgtcagcaggtacacgttgctaatagtttttttagtgcggcggacgatgcaatttgtctgaaaaccaccgataaaccggcggctatccaacgtcctttacgtcaggtgacgatcgtcaattgtaccctgcgctcaaaaagctgcgcttttaaaatcggcacggaaacctggcaagatattgaagatattgtggtcagcaactgcactatctatgattcgaatcgcggtatcggcctgatttcacgagatggcggccggctacgaagaatgctctttaccagcatgacttttgagtgtgtggcggcgccagcctgtcactggggggaggcggacccgattttcctctccgcgcgtcgcaggaatccgcagatcgagcccggtgagattacgcaaatccagtttcgtgggctttgcggagaatgtgaaggcgccatcaatatgcacagtgaaaccccttccatgatcaaccgaatacgactcgagagtattcagcttacccagcgactgcattgccacggttggcaggggaattatgatattcgtccgccgtgtaatcctctttcgccaacaggaatgggtgtcgataacgcctggtgcctcaacccagaaacgggaaaggcctggggagtcgaaccctatcccggagggctacccgtcctgtttgcgcagggggtttccgatttagtcatcagagaacttgattggcagcgtccagttcccctaccggcaggctggaatacgcaagcgctgtgtctggaaaaatgcgagcggtcatccgtgcgggaaacctga

SEQ ID NO: 180521 - DNA, 570 bp, Klebsiella oxytoca
atgctgaagtatttactgatgttggcgatgacggtgctggcgggctgtaccagcgcacccaatttgccctctaccgataccattgttaaggttaaacctattgagtcgggcatcattgccaattcaaacaaatacagctatcgattcttccgtaaaggggtgccgcaggagtaccagcgttataatactttctacgaacgcttcaataaggtcgcatccggcgtacgggtgaattttgtcgtgaaacagcatgaggttgttgcggaatatctggtggtgctcgacaagcgcaggctggatgccagtcagctaagtctgttaaccagccagtatcacgcgaccgcgctggacaacgaccatcttggcgtactgtttaaagcgaccggtttctggtcaaccgttgatcccaatgagctggatgacgcttatcggcttgccagacccgtcgtcgtgtcaattaacgataaaacgcagaccattagccctctgggagagatcgccctgatcccgctggtgccgctatttccgctggtgatgatgtacggttgcgcaacggggccgtgcgtgtaa

SEQ ID NO: 180522 - DNA, 999 bp, Klebsiella oxytoca
atgaataaagagcagggcgtgagccgggtgctgaatctcccggcgggctattttggtatggttctgggcattatcggcatgggcttcgcctggcgctacgccagcacgatctggccggtgagccggacaatcggcgacggtctggttatcgtggccaccctcgtctgggcgctgctggcgctggcgtttatcagccgggcggtccgtttcccgcacagcgtactgcaggagatgcgccatccggtggccagcagttttgtcagcctgtttccggcgacgaccatgctggtggccatcggctttgttccctggctgcggccgctctcgctggtgttattcgcgattggcgtagtgctgcagctaagctatgcggcctggcagagcgccgggctatggcgggggaagcatcccaatgaggcgaccaccccgggtctctatctgccgacggtggcgaataactttatcagcgccatggcctgcggcgcgctgggctttaccgacgccggactggtgtttctgggcgccggcttattctcctggcttagccttgaaccggtgattctgcagcgcctgcgcagcgacggcgaactgccgatggccatgcgcaccgccctcggcattcagctggcgccggcgctggtggcgtgcagcgcctggctgagcgtgaacggcggcgaggcggataccttcgctaagctgctgttcggctatggtctgctgcagctgctgttcatgctgcgcctgatgccgtggtacctgcgccagccgtttaacgcctcgttctggagcttctcgttcggcatctccgcgctggcgaccaccggcctgcatctcggtcatcagcatccggacggctttttccataccctcgcgctcccgctgtttctcttcaccaatctgatcgtcgggctgctgctgattcgtaccttcctgttgctgatgcgcggtaaactgctgattcgcgttgagcgcgacgcattattaaaaaataaggattaa

SEQ ID NO: 180523 - DNA, 1509 bp, Klebsiella oxytoca
atgcagaatccgtctaccccgctggtgaaaacccggcagggcaccctatccggcaccgctgaagagaacatgcatatctggcgcggtataccctatgccgcgccgcccgtcggcgatctccgctggcgcgcgccgcagcctgccgcccgctggcagggcgtgcgccgggcggagagtttctcggcctccagctggcaggatattgagtactgtcgtgagctcggcggcggcgatcccggccgcttttccgaggattgcctgtaccttaatgtctggtcacccgcttcgcgcgcgcagccgctgccggtgatggtctggctgcacggcggcggctataccatcggcgcgggaagcttaccgccctatgacggtaaagccttagcgtcccgtgacgtggtggtggtgacggttaactaccggctggggcatctgggcttttttgcccatccggcgctggaggaagaagagggggagcgcatctataatttcgcgctgctcgatcagatcgccgccctgcagtgggttcaggagaacattcacgccttcggcggcgatgcggccaacgtgacgctgttcggcgagtccgccggggcgcgcagcgtgctgtcgctcatggtttcgccaaaatcaagagggctgttccataaggcgattattcagagcggctataccttgccggatctgccgcgggaaaaggcgctggccaaagggcagctcatcgcggagcacttctctttaccgcaggccagcgccgaacagctgcgggcgattccggcggacgcgttctggtcgctgaccgcaccgcttaccatcggcccggcgcccattgttggcgatgccgtactgccgcagccgatgctggagactttttttagcgggcgtcagcacccgctgccggtgatgattggctcgaacagcgatgaggccagcgtcatggcggtgtttggcgtcgatatcgccgggcagatccagaagcttcgccgcgaacgccgttttggtctcggtttgattaagctgctctatcccggcgtcaaggacgatgaggcattagggcgtgaagtctgccgcgatatggcctttaccaccctgggttacgtggtgatgcaggcgcagcagcgggtagggcaaccgtgctggcgctactggtttgactacgttgccgaggcggaacaccaaacctatccgcacggcgcgtggcacggtaatgaagtggcgtacgtttttgacaatctcgaccttgccgagccggtgcgacagtatgcgaacgatcgcgaccggacctttgccgcccgggttgccgactattgggctagctttgcccgtgtagcgggtaacggctgccacgagctctccgggccggtgcgctggcccgccagcgtgcgcggacgagaccgtctgttgcgtatcggtttgcacaagcgggccggttttaaagtggaaaaccgctttatgcgcgcgcgtctggcgctgtttcggcgggtgatgaagcaccatgtgacgctggattaa

SEQ ID NO: 180524 - DNA, 813 bp, Klebsiella oxytoca
atgaatataccaacaccttttagtttgataggtatgatgctgaagtgggtttggaataagattactattttttggttgtttaaaacttataaaaaatcccatgaatacaaactaaaagatctaaggctgggttcacgttgggaaaagttaggtgatgatctcgagtattcaataagattggctaatgcagccgatcacgaatcgcttaaatcaaaagtggcttttcgtgctgcgaaaggaatgcttaaaaatgtgacactattctttgaagcttcaggaagtggtattcgttacctgcaaaaaattgagttaataaacttagatcaagatttagtaattgttcatttagatcaaattcctaggcaggatttgattgaggcatccgaggcaggtatattttttactataaataagatacgtttcatccagtgtatagtaacccacatagacggatacctgtgtccgccttttgattcaataccagtacatctttcgcagaattggttactgaacgataagtgggaacagcgttggggtattttatggaattgcaatgcaatagaacaagcaaaatatgaaatttcagggtattggagattcaggcttggggagtatcgtcattttttaatttatcaagctgagcatgaaaaactctctatgcaatctcagcttcgaaaattagtttgcagatttttaattcatccttacatgttaactttacagttttggttagcgattcattctgggtgttttagcttagtagatgggaagttaatttataagaatcaacaagagacaagtgtgattgattag

SEQ ID NO: 180525 - DNA, 570 bp, Klebsiella oxytoca
atggctgattcaggacacgataaacctgctgcgttgtcattaaatatcggcaataaaataagacgactgcggcagtcacgggggatttcgttaaacgacctgtctaaattgtcaggggtttcaaagggggcattatccaaactggagtcaggattttccagcccccgtgtcgatacgttggacgctatcgccactgcattacgtttaccggttggcgatttactgagcggcggcagcaggatatatccctgttttgataagcatcgtcccgcaccgggcgaatattcacaaatgatgaaattccgcatcggccccggcaatacctccgagatatggttgctgcaaatggagccgcaggtcaccatccacagtcccgggcattcagacgggtcgcatgaacatattctggttcacagcggcaccctgcatctgcgctttagtcagtacgaagtcatcacattagaacccggggatttttacgctttctccgcgcaggttgcgcacacatacagctcaaaagagacggcgattagcgcaacggtggtgatgactcacctcgagccaggttaa

SEQ ID NO: 180526 - DNA, 363 bp, Klebsiella oxytoca
gtgcataaagttaatttaaaagaaagttttactctgttcagcgaatgctggaaccccaaaattgtcggcgaaattaataacgagtatgtcaaactggctaaattagccggaaagtttgactggcatcatcatgagcatgaggacgagctttttcttgttatcagcggccgcttgcgaatggggttaagaacgggcgatatcgtgcttgaagcgggtgagtttatcattgtgccgaaaggaaccgagcattgtcctgaagcgttaactgaagagtgctgcgtcgttttacttgagccaaaaacgacgctgaatacgggcaatatcgtcaatgaacgtactgtacataagctggatagactatag

SEQ ID NO: 180527 - DNA, 234 bp, Klebsiella oxytoca
atggagtgtctcccgctctgggggcacgccattatccacggacatatcacccgaatgcttcagaggatggattgtggcaagcgcaaagggatcgcccaggaattgctaaaaaccggaggtaaacgcaaggcgcttatcctcgtgtgccggcatttcatttatctcttcgtatgctctacctgtggcgcaaaatccgccacgaacaaagatacgattcacgaatgcatcaggtaa

SEQ ID NO: 180528 - DNA, 1725 bp, Klebsiella oxytoca
atggcggtggaaaaactgattgtcgaccatatcgacacctggaccacggcgctgcaaacccgctccacggcggggcgcggcagctcgggtaagatcgacctgtacggcattaagaagctgcgcgagctgattctggagctggcggtgcgcggcaagctggtaccgcaggatccgaacgacgaaccggcgtcggaactgctgaaacgtattgcggcggaaaaggccgagctggtgaagctggggaaaattaaaaagcccaagccgctgccggagattagcgaggaagagaaaccgtttgagctgccggtggggtgggagtgggcaaggtttggtgatgctacatacaaccgagatgcagagcgaattcctttatcttcagatgagcgaatgaatagatctggaactttcgattattatggtgcatccggtatcattgataaaattgatgattatatttttgataaaccattattactaataggtgaggatggtgctaatctaatcaatagaagcaccccaattgcctttatggctcatggtcaattttgggtaaataatcatgcccatgtcatagacggaatatcagaagaataccttaattatttatgtatttatatcaatgccattagtttagaaaactacataactggcactgctcaacctaaaatgaatcaagctaaaatgaataccattttaattggcttaccacctgagcatgaacagctaaaaataaagaataaagttactgagttattgtccctctgcgaccaactggaacagcactccttgaccagtctggacgcccatcaacagctggttgaaaccctgctaaccacgctaaccgacagccagaacgccgatgaactggccgaaaactgggcgcgtatcagcgaacatttcgacacgctgtttaccaccgaagccagcattgacgccttaaaacagaccattttgcaactggcggtaatgggcaaacttgtgccgcaggatccgaacgacgaaccggcttctgaactacttaaacgtattgcgcaggaaaaagcgcaactggtaaaagacgggaaaattaaaaagcaaaaaccattgccaccgattagtgatgaggaaaaaccgtttgaactgcctgaggggtgggagtggtgtctatttgaaaacgtcgttgatattcaaagcggtataactaaaggaagaaatttagccaaccgaaagctgatttcaatcccttatctacgtgtggctaacgttcagcgtggttatcttgacctgtcagaagttaaagaaattgaaattcctgaggaagagaaggataaataccatgttattaagggcgatcttttaataacagaaggtggtgactgggatactgttggtagaacaactgtgtggtgccatgattggtatatagcaaatcaaaatcatgttttcaaaggaagaattataggacaagacattgatccttactggcttgagacatacatgaatagtccttattcaagagattattttgctagtgcaagcaaacaaacaaccaacttagcatccatcaataagactcagttaagaggttgccctgtagcaatccctccaagtagtgaagcagaaaaaatcatgctcaaattgaatgattttaatgaattatgtgaaaaacttaaattacaaatccaatccgcccaacaaacccagctccacttggccgacgctctcaccaacgccgccatcaattaa

SEQ ID NO: 180529 - DNA, 1545 bp, Klebsiella oxytoca
atggcttccgtcaaagaggaaaactgcgccaacggactgaaaaaagcatacgacgtcatcgtggtcggtagaggttcggcgggtgcggtactcgccgcacgtctgagtgagaaccccgattgccaggtagcgctgctggaaggtggccccgttttcgcccctgatgcctggccggacgagctggcgcacagccactctgttggtggcggcgattacgtctgggagcgcggggtagcaacgggaaccgatcacacggccggtcatctgcgggcaaaagtacttggcggcgggtcaacgatcaatgccggcgcgtttgttcgcgcccccaaatctgattttgaccgttgggtcaagcgcggcctgagcgactggtcgttcgataaggttttaccctggttcaaacggcttgaaaacgccgactatggcgacgatcgctggcatggtcgccacggcccggttccggtgcggttaccggcgctggaaacgctcagcccggcaagccaggcgttttatcatgcttgccgcgctcacggcttcgccgccgttgacgatatcaacggcgcgcagcagcacggcgtcgcggtctacccggtcaatgttgtcaacggcatccggcaaaataccgccatggtctacctgacggcagacgttcgcgcgcgcaagaatctgtcgattgtcggcatgacggtcgtggataaagcgttgattgaaggttcgcgcgtgaacggcgtacagctggcggacggaacacagatcgctaccgacaacgtattcctgtgcgccggcgcggccggtacgccagcgattctgttgcgctccggcattggccctgcggacgatttacgccatctggagatcacggtgaaacaggatctccccgttgggcgcaacttgcaggaacaacccgtgaacgggatcatgctggcaacgtccgctgagcatgccagttatccccctataggcacaacgctctggacgcaatcttcgctggcggcagccaacgaactggatctctatatcagcaataaccacttcgtcgatcctgaactatttccacatggtgcgggtttccagctctttttcaccgtggcgcgcccctttgcccgcgggcgtctgactttggcgagccgcaacccgctgctcggcccccgtatcgatctcaatttactgggcgacgagcgcgacgtcacgcgaatggtcgaagcggtgaaattatcccgggcgctggtgcaggaaggtccgctacaggcgctggtgattggcgaagtcccgatggtaaaaggcggtacactggcagaaacagaccagcagatagcagaagaacagcgtaagacggtgaaaagtaacctgcacctcagcgcgactgcgccaatggggaacgaaagcgatcccatcgccgtcgtggacgcctgcgggaaagttttcggtattgccgggctgtttgtcgtcgatgcctcgctgttcccggacgttccctctcaggcgaccaatccggatgcaatcatggcggcagaatatctcgccagccgtttttctggcgcatag

SEQ ID NO: 180530 - DNA, 957 bp, Klebsiella oxytoca
gtgaacaagttcgtggaaatgagcacgtttgtttcggttgttgagtctctgagctttgtcggcgcggcggcaaaattggggacatcaaaatcggtagtcagccagcgcgtcaagatgctggagaaacggcttggcgccagcttactggagcgcgggccacggcttagcctcacggaggcgggcctgctattttatcaggagtgcgtgcggctgcttgacgaagtcacgctggcagaagaggcggtggccccgtcacgcagcgagcttcggggcgtgctgcggattgccacctcgcatacgtttatgaccactcatctatcgacaattctggccggttttatccgcgaccatccggggttgtctctcgatatcgcgacggaggaccggcagatcaatatgcaccagcccgactttgatatcgccatccgcctcggcctcgtcccggactcaacgctcatcgcccgaacgctggcgcgcaacctgacctggctctgcgccagcccggactatctgtcgcaacggggcacgcctttgcatcctgttgaactggagcagcatgacgggctgctatatacccatcgcgcgccggggggctgctggcagttgctgcataacgggcagcgccagacctggcgggtcaaaaatcgtctgcgttcggataacgccttcagcctgctggaggccgccagaatggggcttgggattgtggtcatgccgatatttttaggcgctaaagcgatcgtgcggggggagctaaaaattattttacccgactggcagccggagggtggcaacattgtggcgctgtatcgccagacgcgtcgcgcctcgccagtgattcaggcgctggtcaacgaggttgcggaaaagctggggccagagccagagtgggaaaaacagctacgactggccgggctgctgcccctctgcaacaggggcgcaagcgcccctgattaa

SEQ ID NO: 180531 - DNA, 225 bp, Klebsiella oxytoca
atgagaagggacggaaaatgcaccaggaggagcggaattcaggacaaaaaaaacctgcgcatccgcgcaggtcggtgcaagataatcagtacgaaaagcgtacttaaaaaactcaccaatcaatacctctgggatcctgattgtctcgttttccccgccgccggcgccagccataaaacgcaagggaatgagcctaagtgcaaccagttattacttttttcgtga

SEQ ID NO: 180532 - DNA, 480 bp, Klebsiella oxytoca
atgattattcaccccctctacgctgcgccgcagcacgcttcatgcgtaacggagtggctctggcgagcgtttggcgctgacgcgctgccgcgggcgttcttcgccagcattgtcgaacatagccagacgccgggagcgctgcccattacctttgtggccgtggagggcgagaggctgctgggcaccgtcggcctgtggcgctgcgatttaatcagccgtcaggatctctatccgtggatggcggcgctctacgtggcgcctgaggcgcgcgggcagggactggcgggaaaactacagcagcacgtcatcggatatgccagagcgcagggctataccgagctatttctctactccgcctgccgcgatttttatgagcattttggctggcagtatatcggcgaaggcctggattatccggccagcgccgtcagtttataccgctacgatttatcgctgtcgaggggcgcaatcaccgagtga

SEQ ID NO: 180533 - DNA, 1338 bp, Klebsiella oxytoca
atggcattgcaggacaaactgatcgactcactggggagtttcgccacgaaattcaacagctaccgctacatcatggcgataaaatccgcttttattaccctgatgccggtgatcatcgtcggcgccttttcggtgctgatctccaatatggtgctggatccgaaaaacggactcgccagctttcaggcgctctcttttctggcggcgctgaaacccattaccagcgcgatcaactacgccacccttaactttctcaatattggcgcggtctttcttatcggcatcgagctggggcggattaacggcatcaagagcctgttccccggtctgctggcggtgatctgctttatctgcgtgacgccgaccaccgtcgaaatgatggtcgacgggcaaatgcatgaagtgaaagatgtgctgctgcgccagttttccgatacccgtagcctgttcctcggtatgtttatcgccattctgtcggtggagatttactgctggctggagggccgcaaggggctgaagatcaagatgccggataccgtaccgcccaacgtatcggcgtcgttctccgccctgatcccggccattatcaccaccacggtgattgccacctttggctttattttccatcaggccaccggcatgtacctgtatgacgcggtctatcaggtggtgcagcagccgctggagcgggtggtgcaaagcctgccggggatcctgctgctgatgtttgtcgcgcagctgttctgggttatcggcatccacggcaaccagatgatcaaaccgatccgcgaaccgctgctgctgggagccatcaccgtcaatatgagcgcctttgagcagggcaaagaggtgccgaatatcatcaccatgccgttctgggacgtttatatgagcatcggcggatcggggctgacgattggcctgctgatcgcggtcatgatcgccaccaaacgcaaagagatgaaagagatcgccaagctgtcgattgggccgggtctgttcaatattaacgaaccggtgattttcggcatgccgatcatgctcaatccgatccttgcgatcccttttatcatcacgccgctggtgaccggcagcatcggctacttcgcgaccgccgccggctttgccgataaagcggtggtgatggtgccgtggaccaccccgccgctgatcaacgcctggctctctacggcgggttcgatgggggcggtggtgacgcagcttatctgcatcctgaccgcggtgctgatctatctgccgttcgtcaaaatagcctcccgccgcgcggaaaacgctcagcgccaggcggagaacgagcaggccagccaacagatatga

SEQ ID NO: 180534 - DNA, 708 bp, Klebsiella oxytoca
atgaagataaagttaaatgcgtacgctatttttctggcaggtatggctcctttatgtcacgcaaacatgtctgtgtatccaatgtctgtcgatatgaacgatcagggtgaaagcagcgtacgcgttatttctcgctccagcgacgtgcaatatattaagacctcgattctccatattactggtatcggcacgaatcaagaaaaagaaactgaaattaaaaccggttcgcctaccgctattgtggtcatgccgccgaaattcgcgctgcccgctggcgccactaaaacggtgcgtatggtcgcgatggaaccggtacaggaagagaccacttatcgcgtgaagtttgaagcggtgccgcagctggacgatccgcttgaaggcacaaaaaacacgaaatcacagttaactattaatcttatttggggcgtcctggtcagcgtcccacctgaaaatccacagctaaaaataaatttacttcccgatgggaaaataacaaacgctggcaaccaacgttttaaaatattgaaaattggattgtgtaaaaaatcacaacctgacaaagagtgcatctggcaggaagtggatagaaacatttatccacgcgccagctatgcaccgaagagtatattgggttacgaccgggtcgttgttcaatattggaactggattgacaagtcaaagcattctcaagacttcccaattcattaa

SEQ ID NO: 180535 - DNA, 2697 bp, Klebsiella oxytoca
atgaaaaaatcaattcctggactattaatcttttccatactcaatgcagccaacgcgcgaacggataccatcccccccggctttgaagccattgtcctcggccagcaagaatacgtcgatgtctatctggcagggagaaatttgggcagattttatgccaccgttaatctcgatacggttaagtttgagcaaccacagaagatcgttgcggcaatgggaataggtaacgaccagaaccgcatcaaggccattgcagcaaaactcagtcagcctcttgaacgtcacggcgagctggcctgttcagcgattaacaatagtaccggctgtggttatctcaccaccgatgacgtcgcgctgatttataacgacgaacagaacgctatctccctctttctgaataaagcgtggtatcccgacagcgctcagcgcgatctctatctgcaagcaagccaggacgagaatatcgtcaacgccttcatccaccagcaggatatcaacgtcgccattcaggacgattttaaatcggcttacctgcaggggaccggcgcattaggcgtcacggataacagctatattggcggttactggagcctgaacggtaacgaaagcgacggtaacaccgagactgacgctgatgtcaacgaactctactatcgttacgatctcctgagccgcttttacgtgcagggcgggcgtatggacagccgcagcctgtttaatctggacggcggtaactttagcttcactttcctgccgcttgatgcctttgacggaattcgcgcagggtcaacgctgagctacctcaaccgcgaacaggcgggccagggaacgccggtcaacgtcctgctttcccgcagttcgcgcgtcgatgcctatcgcgataatcaacttctcggctcgttttatctgaacggcggcaatcagtcgcttgatacctcatcgttcccttcgggaagctacaccctgcagcttaagatttacgagagcaaccaactcgcccgcaccgacgtggttccctttactaaaacggggagcatgacggatgggcatattcagtggtttattcaggcaggaaagctggcggatgggtcaaactcgtcaacccataaccgagacgacggtgcaacctcggcgcaggccggcgtgcgcatccccgtcaccgcgcaggctgagttaatgcttggtgccgcttctgtcgacaacaacgtctcggcggaaattaacggtcatatcaccccgacgctgggcgcgtttggcgatatggatctgcaaaacgggtttttctataacgaccaggggggacgcggcaatatgcagcagctgagctggcgcgtcgagaatttgccctcactgaacgtttaccgcaaagatacccgcggaggagagtgttccggcgataacaatgccgaagataccgatctcaactgttttgaaagtatcagcgccgggatgtcgcaaaacgtatttaactggagcctgtcgctaaactggaaccgtacccgtaaccacgctaattatcatacccgctgggataaccgcgacgattttagcagcaactatttcagccaggccgatgccaactccacatcggatagcgtgcagctcagcgcatcgcgcagtttcagcctgaatagctggattctgaatgccaacttcggcgtattcacccgtcaggattccggcagcagcgctaatgataacggcggctatctgacctttaccttcagtgaaacgccgcgtccggataacaatacgcgcagccgcacgacaaccgtaggggttgactatcggacaagcaagagcagaagtgaccagacatcctggaacctggggcgaacctggtatgacgataacgtcaatcataaagaggtgggcgtcagcctgggcggtatgaataccgataccctcgacagcggcattaacggccgtattgatagcctctacggaaacgtcagcgcctatctgaccgacagttacgatacgcaagaccatgagcacagcaccgcctttaccggcagctacagctctacgcttgccgtcagccgtcacggaatacagattggccgtacgggtaacggcgacccgtcggcagccgtcctggtcgcggtgagaaaactggatgacgactccgccgatgaaatatcagtggatgccaacacaaacggtaataaagccagcctgagcggtgatgaatcagtcctgtttccttacaccggctatgaagtgggctatgtggaagtgaacgacagcgcgcgaaaacatcagaccggaaccactaacttgatcgccggttcgggtaaacagagcctaatgctgctgccgggtaaactgcgctatcgcgaagtctccgccacgtttaactacaactacattgggcgactccggctaccggaagcgctgaaacaatacccggtgattggcttaaacagcgcgatgctgatgatggcggatgacggtgggttcactctggaaatgcagggctcatcgcgcgatctctacgtacttgccggacagtcgttcctgaagtgcccgctgaaggtgctgaaaaagcgcgccagcattcgctataccggggaaatcgtatgtactgccatagattacgagcggctgccggcgcaaattcaggtgcaggcgcagttgaaacagtcgcagcgtagtcaggcgctggaaaccgcacagagggagagcgtgcagtga

SEQ ID NO: 180536 - DNA, 1125 bp, Klebsiella oxytoca
gtgagattaataaaatttttaattctatattgcctgataggaagcgggggtgcgcaggcattagtggttaatggaccaacccctacggtcagcaccacacaagactatgaaattcccttaggtgctcctgccgatgtctatttatgggaggatgattatcccggtacaacacctggctatgatgccgggtttgggagttatatctgttcttactccgacatccgacagacctgttcaagccaaagcacaggctcaaccatcaccatgatcttaaaagaaaaaagaaatggtatggagcatccattacaattgcaggcgtacctacaaaatatttattatgacgaaagcgatccctctaaatcagtgatgtgcggacacccgttctcattgacgacatacaatagggtaaatggttgtagaggcaaagatggtatagccaataataccaaaatgatgactgtttggatcccgcaaagtgaaatgaataatcttccaattggtggcgtatggaaagggcagcttaagataggctggagccagggaggtggtggctcattcacctacaccgccaatatcaccctcaaaggcaaagccgccggtaagcaggatatttacttcccggaatttaacggcgcgaatccactggtacaactcgatctgcaccctaccggttccgtcaccggcaacagctacgtagaagatatcacgacgctggatatgtgcctctatgatggctataactccaacagcgacagcatgacgctgtcctttaaagacgagggcaaagcggctgcggggcgaaaaacgaactatttttccatctataataccgcctccgggggaacggataatacggaacgtatcgactatcgcgtcgaaatgttcgatccccatagcaaagggtggataacggtgaagaataacgacagctttacgttgtcggcagggataaacggaacggataaaatacgcccggtcaggctgccatccattccctatccggtgctttgcgcccccaccccgctgcggctaattgtggataaatttcgcgttacggacaaatctgccggctactatagaggcacactgaccgttgaattcagtcccagcctgaatagtatctga

SEQ ID NO: 180537 - DNA, 552 bp, Klebsiella oxytoca
atgtccagaagacgttaccttagtgagtctgaaatcaaagaattactggctatgaccgaatcgacaaagaacgcatgtcgggataagtgcatgttaatgatgtgctttatccatggcttaagagtctctgagctcattaatctcaaattgtcggatattgataatgaaacggcaagaattcagatagccagacttaaaggagggttctcgacagtacacccgcttcaggaacaagaactcgctgcgcttttggcatggctaaaagtgcgtagtggttatcttggtgctgaatcgccatggctctttttgtcattgcatggaaatcgtatttcacgtcagcaggtatttaatattatgcgggggtatgggtataaggccggccttcccgttattgtacacccgcatatgtttcggcatgcttgcggctatgctctcgctgaaaagggaattgatacacgtctgattcaggattatctggggcacaggaatatacaacacactgtcctgtatacggccagtaatgcggcccggtttgaaaaaatcattttttga

SEQ ID NO: 180538 - DNA, 912 bp, Klebsiella oxytoca
atgagcaaactaaactataactttattagaatatttattagtattgttgagcataaaaacatggcacgggcagcagagcagctggatatgttacccggttcagtgagctatgctgttgcccagctaagaaaacactataatgatccgctctttgtgaggagtaaaagtggtattgaacccacagctttggctcagcaaatttatcatctttttaaagaagccgaaataaatattgagcatggtttcaattgtttaaaaaatcaaaaagggaatataaatattatagtcaatgcgcctcaagccgcagagttgttcattatgaaaaaactaattgatttagattattttagtgacaacaccatgctaacattccctacatttatatcatcctcgcatctacgtttacagcaattacgttcatataaaattgatctggatattggacctgctttacaagatgatattttcataaacaaaataaaattaaaaaaagcggattatgtattagttacaaataaaaataacaagttaatttttaatgaaaaaacaacattgcagaataccccctccccctatgatcacattttttatataaactggctaaactcagtgactatgggcgaacatagctatcttacacaaattggaaaatcactggcacttgaaaaacctttgatttatcgaaccgaatcctatctaaatataataatattactatcaataacaaacttaacttatgcaatccctcgatatatttatgattttctttcggaattcatgcctgtaaaatcaatgccattcccgcacatggcaaaggatgaatacagtatttatgcccacttccatcgtaataataaaaaagaagagtccatccgctcaattattgatgcatttaaaccatttgaaatatag

SEQ ID NO: 180539 - DNA, 564 bp, Klebsiella oxytoca
atgccagatacccaaaaacgaaaacacttaacacgagaagaagtcaaaaggcttcttctggccgctcgtcaaggcccgaatcccgaaagagactgctgtctgatttggatgtgctttatacatggatgtcgggtcagcgaaataatcacatggagaatgtctgatattgatatcaaaggaaaaagcatttatatcaaacgtcttaaaaatggtttttcaactactcacccgatttaccagagtgaaatagatatgctggactcatggcttaaggtcagagcacactatgataatgcagattcagaatggctttttctttcgagaaagggacagagaatatcccgacagcggatatatcaatttatgaggcaatacggtcatcaggctgggctaatgattaagcctcatcctcatatgcttcgccatgcctgtggctatgctctcgcagaaaaaggagtggacacacgtcttatccaggactatctggggcacaggaatatacaacacactgtcctgtatacagccagcaatgaacagcgtttcaaagaagtgtggtcaaattaa

SEQ ID NO: 180540 - DNA, 516 bp, Klebsiella oxytoca
atgaaaaaactcttaattgttactttaatcgctggtttctctactggtgtttttgcagacgatggaaaaattaattttgaaggagaggtgaccgatcaggcctgtacggttgtaaacgatcttgccaatcctctgaaagtaactctgggtactgttagtaaagcatctcttgatggacaaaaaggaaaaactgctgctgcaacagcctttaatatcaagcttgataattgtccggcaactgtaaattctgcttcagtaaaatttgatggacaatcggcaaacaatgataacaccgcactgaagttgactcaggaaactgatgttgcaaaaggcgttgggattcaacttagcgatcatacgaatgccgtcgtacctttatatacagaatcagcggcttacagcttaactacgggcagcaatagtattccatttgtcgcgcgctatatcgcactgcaagataccgttgatgcaggtcatgccaatagcaccgccaacttcaccgttgtctataactaa

SEQ ID NO: 180541 - DNA, 693 bp, Klebsiella oxytoca
atgtgtaatctgttatcaaaatttataaaatttttatttttggcgttgtgctttaatggttcattacttgctgcagagtccggtgggataaccattggaggtactcgccttatatataaagaagcaaaaaaagaagtatcgcttagcgtagctaattctgactctgcaccatatcttattcaatcctgggcagagacccatgctggaggttcagataaagccccttttatcgttacccctccactattcagactggaggccaaccagcaaagtttgttacgaattgtcaaaacgggtagttcattaccagaaaataaagaatctcttttttggttaaatgttaaatccataccatctggaaaagccataagcggtgttaacactttacaaattgctataaagaccagaataaaattaatttatcgaccgacatcagtaaaaggctcgcctggtgatgaagcagaaaaactcatatggagaattaatggaaataaactaacggtcgacaataaaacaccattcataatgaatttccagatggtgaaagttggtacaaatgatgttaaagatgcaacttacgtactacctatgagtactgcaacttattccatccccaaaggttcctcaggaaaagtaagctggaaactaattaatgattatggcggaacaagcaagatttattcacaggaataa

SEQ ID NO: 180542 - DNA, 2580 bp, Klebsiella oxytoca
atggaaaagcagacaaaaaaattctttagaaagaaaataatttatgccgtcattgcaccattatttcttccagtaagtatgatggaagaagcaaacgcacgagatgaattcgattctgcgcttcttgaacttggcagctcagagctatcaaaccttgacctgtccatgtttgaggttgaaaatggccaacttccaggaaactatcgtgtagatatttatctcaacaatgagttaatggaaactcgcaatatcgattttttaaaagccaaaaataatctcggtgaagatatcttacaaccctgcctctcgcttgaagaattatccgggtacggtattataattaataaatttccggaattaaagacatcaaaagatcagtgtgcaaatatctcagcgattccacaagcacgagcagattatttattcaacaaacagcaacttttgttatcttttcctcaaacagctgtcaacaacgcagccaggggatgggttgatccggcgctatgggataatggtattacagcattaatgctgaattataatttctcaggttcggttaacaaagcagataataacttaagcaatgacagtgataaccaataccttagcattcaaccaggactaaatgttggggcatggcgtttacgtaactacagtacctggaatcgatcgtctaataaaggtgagtacgcctcaacacaaagtaaatgggacacggtttatacttatttacaacgcgatataactttactgaaaagtcaactaaccttcggtgatagttctaccccctctgatatctttgatagcgttcctttccgcggggttcaacttgcatcggatgaagaaatgctaccagaaagtctccgcggttatgccccggtggttcggggaattgccagaactaatgcacaggtcattattcggcagaatggttatactatttatgagacctatgtatccccaggcgcatttgagataacagatatgtatcctacgggcagttcaggagatttaaatgttacgatcaaagagtccgatggcagtgagcaaaatcttgtagtgccttatgcttctttacctgtgttacagcgagaaggccaattcaagtttgcattgacatcagcgacatatcgcccaaataacagtagcgtcaccgacaccccctttactcagggaacaataatttatgggtttcccgccagtataacaggctacacaggaggacaattttcaagtaaatatcagtctctggcactagggatggggaaaaatatgggtatgtttggtgccgtatcttttgatatgactcacgcatggtcaaaaatgaaagatagccagcgagacgatggacgttcattaagggcacgctttagtaaaaactttgttgacagtggaactaattttgctattgcgggttatcgatacgcgacgaaaggttatcgggatatggctgaagtcatggatagctattcagatggatttgatcgctcgtggaatttagaaagacgtaaaaatcgtggtgaaattaccataaatcagagcttgtgggatagttttggtaacctggcgataaatgcagtaagagaagattattgggggactaaccgccggatggagtcctatggagttagttacaataattcttataatggcattacttacggcctaaattatacttttaacaaaaacacaatagatgataacagcgctgaaaaccgttcaaaaaaatatgatacggaccatattttttcgctaagtttaaatatcccattatcatccttgtttggcgaacatccgacatacgcaacttatatggttaataccagtaaaaatggaaatacaaccaaccagattacattaagcggttccgcattagaatctaataatctgaactggagtgccatggaaggatacggtagccaggggcaaggaaacacggcgggtattacggccgactggagaacggggacaggagaagttaatggcggttataattttgatcgttacggcaagcgcataaattacggtttacgaggtggtatagttgctcatgaggaaggaaccaccttcggtcaatccatgggagaaacaagcgtaattgtctcagctccaggtgcgggtaatgttggcgttcagggacaaagcggcgttaccacagattttcgggggtatacaattgtaccttatgccagcccatatcgtaaaaataacattaccctcgacactgaaacctttgatgagggtgttgatattgcgatcacaaccgcaaccgtagtaccaacacgaggcgccattgtcaaagcaagctataaagcaagcgttggctatcgcgtgctgttaagtctgactcggcgcaacggcaaacccgttcctttcggagcaacggtttcggttgccgatgcaaaagacacggatcaatctattgttggagataacggacaggtttacctgaccggccttccagagaaaagcaagctattagtacagtggagtaaggaagcttcagataagtgccaggtaaatttaaatatccctgcagataacaaaggggttttagttctggatagtctgtgtcactaa

SEQ ID NO: 180543 - DNA, 1005 bp, Klebsiella oxytoca
atgatcagttcaattagcaattatattaatgcgatacctaaaaaatctactttcacactgatgagtatcctgcttgcagtctcaaatagtgtatttgcggcggattgcaaaacgagtatgagctatgtgaaggtagtatcagatatacctcccacactcaaaattaaccctaacgttccgatagggggcgtcatggcatcaggtacttacagaaccggctcgggtcctttgcctaacggttgtaccatgtatgggccaacaacaggatatctaactggcgtaggaacccccaacggcaacgtctatccaacaaatttaccgtatgtcggttataaaataatggcacttggcggtaactacatatccagtaagttctataacaaatactggccgataactgtaagtacacctgaaccttatttagttattggtacagttcaaagtttcaattttaaatttgagctgataaaacttgggaccattactgctgataccccccttgttcttcctgtactggggcatcaccgagttacgaatagatacggctcttttaactttatggagttcacgaataaaacttcgtttcagcttatcccagaaagctctacctgtaccgtgctacaatcagcaatttcagtaacgcttaatgacgttaatcaaaatgatttaaatgtgatgggcaaaacggctaaagatactaattttcagattcccgtcaactgtaaagaggccactaatatttcgctgtcgttttccggtgatgtagctgattcagtcaatggtgtcttcagaaatagtaacgctgaaaatgccgagaacgttggtgtgcaaatcctggataatgtcggcaacccggttccaaccgccctgggctcttataaagttataggcactgtgaatggcacactaaattatcctatgactgctcgctactacgcattaacaaataatgtttcagccggaaaagttaatgcgatagcgaatgttacaattttgtataattaa

SEQ ID NO: 180544 - DNA, 516 bp, Klebsiella oxytoca
atgagaaaatacattcttaatattgttgctttatctctgggatcgatgctcagcgtcggcgtctatgctattgatacaacaattacgattaatggaaaagtaaccgcggccccctgcacgatcggcaatgggggaacgcagacagtaactatgcctgatgtatctgctgcaaatatggtgacagcaggccaaacgggcaactggcaaacctttgaggtaaaattaacggactgccctgcaggcgtcaattcagtcacggcaacgttctccggaacccccgctgataatgataagtacgccaacgccatcggcgacaattacgcggataatgttgccgtccaggttcaaagccgttctgactcaacagaaaatcttggtaatggtaaaaccatgactgtagtagtaaatggtagccgtgaagcatcattcgctctgcaggctcgcccatatagtttagggaatacgactgtcggtgatattagaaccattatgatgatggattttacctataactaa

SEQ ID NO: 180545 - DNA, 531 bp, Klebsiella oxytoca
atgtctaaattttctgtcactctattatttatagcaggtatactttgttctgcagacaatgctatatctgcaacgacaaatattaatcttgatggaaaaataaccacagcagcctgtactgttgaaacaaagctggcaaacggtttgaatataaatttggggaaaacgctctataccagtatgcaaaatagcggggatgggggagtatggaatgatttttcccttaacttaacctcctgccccaaagggacaaataagagcacaatgacattgactggtattgttgataatgatgatagttctctttttatcaatactgccaccggtgaatctgcggccactcatgttgcggttcaactggcaaatcaactaaatcgcagtcaggtattgtctaataacagtcagcttactgttacaatcattaacaatcaggcttcattccccctttctgccagaatatataccccatccggaggagtgacgcctggcttagtaaaaagcacagtgttggtaaatttcacctatcagtag

SEQ ID NO: 180546 - DNA, 642 bp, Klebsiella oxytoca
atgattagaatcgccatggatattaaagataacttttacaaatttggtttggaatcaatactagatgacattctcaccaacgaattcaataaacaggtgagttactcatatggactttttttctcaaatataaactctgccgacataattatattatccctttgcaacggcgaggttcaattatgccagccatttttggccaatttaaaccatggattattgatcgccttaatcgacactcacaccccaaaaataaacaacctgccgctatgctgtcgcaatgtcacatacattaataccagtcactcagttgatgaagtaaaaaatatcataaaaaataaaatagaatattatttaaaaaacggtaaagagaaaaatttttgcatttcaaaatcctgtaacttttggtatataaaccatcggcaaaaaaatttcctcaataaccttatcgctcatgaaaaacctttaagtatagcgaaagagctaaccatccctccccgagtaatatatgcaagaaaaaggtctttaatgaacagatttggaataaaaacggactgcgagctggtcagcctaatgaaaagattcacattctggatgaatatttatcaggaaaaatctcaccattgctgttggcatagataa

SEQ ID NO: 180547 - DNA, 510 bp, Klebsiella oxytoca
ttgcacagcgcctgcgctggccccgcaggggcgaggcccagggacgggccgagtaacggcgagcgcagcgagtcaatccccccctcaccgccatattttaagaagagctcgtacgcaagtacgggcttttttttcgcctgttgcgctccgtccggtagcccggacagatgcgcagcatcgcctccgggaaattctgctactccatgctcttctcccggggacggcgcacagcgtgtgtccgggctacagtaccgcagattgccgatagcccgtagcccgggtaaggcgtttacgccgcaacccggggaatatgccgtgacgtggtattgctgtggcttcttcccggcttgcgctgcgcttagccgggctaccgggccgcagatcgccggtaatccgagcccggacaggcgcatcgcgccgccgccgggattgtggcaaatgctaatcctcttccatccgctgatactcttcgctgaggaaatccaccagcgccctgaccgaggggagtaa

SEQ ID NO: 180548 - DNA, 1077 bp, Klebsiella oxytoca
atgaccaacgaaaatgctcgtttacgaagcccgaccgtcgccgatgtcgcccgcgccgccaatgtttccaaggctcaggcggcacgtgccttgggcggatatggttcagtaagtagtgacgtgcagacacgggtgaatcaggcagctgaagtcctgggatacaggccgaacgaattggctcgcagcatgaacaccggccgctctaatactattggggtgattgtcggtgatattgaaaacccacactttggtctcgcgctgcgcggaatggcagacgtcgcccggcaggcgggattccacttgttacttagtaacagtgatgaaacgctggaggaagagcgggaagcggtacgtgtgatgctggataagcgcgtcgacggtatcatcgtcgcaccctgcagttcgttatttaaagacaacgaacatctccggcaagtactggcggaagggcgttcattaatcatgttcgaccgggcagtgcaggggatggaggttgagaccatccaggccaactttgtctcagtggctaaacaggctacagagctattactgacggccggacatcagcgtattgcttatatttccagtatgcacagcgatgaaccttattcatcagtaatatcgctgggcccaacgccggtcgcacaacgtgtcagcggaatgattgacgcctaccgtgccgccggaaaagaactggatccggtgatgattcagcttaatgcgctaaatgaggcctctatcgaacagattctgactgggttactggcgcttcccgagccacccagtgcgctgattgcctcagataatcttattgcggtgggaattctgcgtgctcttgccaaacgcggtctgcgcgtaccagatgatatctctttcgtgatgtatgacgattttccctggaccgagttgatgtcacccccgttgaccgtggtcgcccagccggtatatgaaatggggcgcgaagcggcgcggcggttgatttgccacatccgtcagcaatctgctggccgtttgcccgagtttaacagttgggtagttgtgcggaactcggtgcgggaaaatcctcacgttacataa

SEQ ID NO: 180549 - DNA, 822 bp, Klebsiella oxytoca
atgacatcgcacaaacgcttcaatcacctgaccgctgctctgttcagctcggctatgctggcttcagccagctggagtgcttacgctgccaacgacagcaattcctggggtttgatcgaaccgggtcatctacgtgtagccagtctgggagacgcgaagccctacaccttcaccgacaaaaacggcaattttactggctttgacgtcgaattcttcaaaaatgtggcacatcgcatgggaattgaacaggtcgactttatcggccaggatttttccgccattctgccggctgtggcaaatggccagtatgatgccggtgtcgccgccattggaatcacgccgctgcgtgaaaaaacagtcgacttctctaccggctatctcgcgggatatctaactgtgctgacccgcagtgattcaggcgtgaagaacgttgaaaccctggcgcataaacgactgggggtgattcagggtacgctgcaggagaactatgcgctgcagcatttcaaacagtccgatctggtgcgtttccccgataacaacgcagcggtgtccgcgctaaacaacggcacgctcgatgccatgttcctcgactacgaagcggccaaagattatgcgacccgcttcaggctggtcacggcggcgaatatcccttctttcgacgcgccagcgggcgtcgccatcgccaaaggcaagcccgagttcaaagctgcgctggataaagccatcaaagcggcgatgcaggatgggacctggaaacagctataccagaagtggttcccgggctcgccaatgccgcaacagtatctgcccggcggccaataa

SEQ ID NO: 180550 - DNA, 807 bp, Klebsiella oxytoca
atggatctgatcactattctttcccgtacgttctttgatattccatcgatgatggacgtcctgcctcaattgctggcaaccggactggttaacaccatcattatctccgtggcggccaccgtgctgggcacgctattcggcctgatactggcgctgatgggcatctcaccctcgcgctggctgcgcgtgcccgcgcggctgtacaccgatctgtttcgcggcttgccatccatactcaccatattgttgattggtcagggcctggcgcgtttcagctatcagctgtttggccctaccccttatccgctgggcatttttgccttgagcctgattgccagcgcttacatgggcgaaattttccgctccggtattcagagcgtggaacagggacagatggaagcgtgccgggcactgggaatgagctatggccgggcgatgcgcctggtgatcattccgcaaggcatccgccgcgtgttacctgcgattgtcaatcagttcatcgccatcatcaaagactcgtcgctggtttatctgctgggtctgatgaccggtcagcgtgagctgttccgcgtcggtcaggatgccgccgtgctgagcggcaacctgtctccactgatgctggccggactgttctatctggcgatcaccgtgccgctcacccacgccgtgaactatatcgacgtccgctaccgtaccggacgtcgccgcgccactgcgccacaaagcggcctgaaggaactcgatgaagtgcagcaaaagcgcaacgtggttacgacggtctcccttaccagcgagcaaggacactaa

SEQ ID NO: 180551 - DNA, 747 bp, Klebsiella oxytoca
atggccataccttctgcgtttcacggcgcgagcctcgagctgcgtaatctgaccctggcgtacggcccgattgaggtgctgcggaatgtgtcgctgagcatcgaaccgggcaccaccacctgcatcatcggtccctcgggatcgggaaaatccaccttactgcgcggcatcaatcgcctgcatgaaccgaagaacggcgatgtattactgggcgggcgttccgtcctgaaggataagcccgatgcgctgcgactgagaattggcatggtgtttcagcatttcaacctgtttcccgatcatagcgcactggaaaacgtggcgttggctccgtggaaagtgaaaggtcgcccgaaggccgaagcgctggagattgcccgccagcggttggctgaggtcggccttgctcagcgagccgatcaccgtccgcgcgatctctctggtggccagcagcagcgtgtagcgatagcgcgcgcactggcgatggagccggaagtgatgctgttcgatgaagcaacctcggctctcgatcctgagctggtgaaaggtgttctgacacttatggctgatttgtgccagcgcggcatgaccatggttgtagtgacgcatgagatgggtttcgcccggcgcgtggccgaccaggtggtgtttatggatgaaggtgagatcgtggaagctggcacaccggaacaaatctttgatcgcccgcaatctgcgcgcctgcagcgttttctgtcggaggtgctgtga

SEQ ID NO: 180552 - DNA, 240 bp, Klebsiella oxytoca
atgacacatcaagaggatagccagtacggcgtcgcgccggtagaaaatttcgccagggccagcacggtcggggcaaccacaatggtgtccattgaacgtggccactaccccactttctatcagttgttagcccacgcgctgttacacggcgggtcaccaccggttgatgcacgtgaagcgctcaacgttttacagcttatcgagcaactccatcggcagcatcgtgtacgcattgcctga

SEQ ID NO: 180553 - DNA, 1119 bp, Klebsiella oxytoca
atgtctgacaaaaccgtagcaaaaaccgtcattgtgctgggtggcggcatcctcggcgtctcaaccgcctggcagctggcgcaggcgggcgcgcaagtcacgctggtgacggaagcggcgctctgttccggtgccactggccgctcactctcctggctcaactccgctggcgaacgttcgcagccttatcatgcgctgcggatagcgggcattgaccgctatcgcacgctgtttgcccgccatccgcaactcgactggctgcgtttcgacggcgctatttactgggccgcagacgatgacgctggcaccaaagctcgtcatcactatgaaaaggcgcagggctatgactcaaagctgatcaatcgcgccacggtcggtgatgtcgatgcgcaggtgaatccggccagcctgggtcaggtcgcgattgccaatccaggtgaaggctgggtcagcttgcctcatctggttgatcatctgtttcaggcgtttcgcgcgctgggcggggaaatcattgagaacaccggtaaagccagcgtgataaccaaagacggccgggcctgcggtattcgcagcgaaaaacacggtgcattgctggcggatcaggtactggtggcgtgtggcccgtggacgccggaggtggttgccccactcggcgtgcagatccccaatggttctccggtctcaatgctggtgaccagccagccctgcgatctcgcgccgcaggtggtattgaatacgccgcgcgctgctgtccgacctaatcccggcaatactatcgccgtcgatcatgactggtatgaagagcacatcgtcgcgcagggcgacggtcagtacaggattgatacgtctgtcattaaccagttgatggcggaagctggtaacctgataggtgacggcgcaccgttaacagccaacagctgcaaaattggcctgaagcctattcctggcgatggcgaaccggtggtcggcgagttgcagaaagttcccggctgttttgtggtcttcacgcattccggggccacgctggcgttaatccttggcgagatgcttacgcaggagatgctcactggcgtgaaacacccgatgctggcgaccttccgcccggaaagattcagctaa

SEQ ID NO: 180554 - DNA, 816 bp, Klebsiella oxytoca
atgagccatattcaacgggaaacatcttgctcgaggccgcgattaaattcaaatctggatgctgatctatatgggtatagatgggctcgcgataatgtcgggcgatcaggtgcgacaatctatcgattgtatgggaagcccgatgcgccagagttgtttctgaaacatggcaaaggtagcgttgccaatgatgttacagatgagatggtcagactaaactggctgacggcatttatgcctcttccgaccatcaagcattttatccgtactcctgatgatgcgtggttactcaccactgcgatccccgggaaaacagcattccaggcattagaagaataccctgattcacgtgaaaatattgttgatgctctggcagcgttcctgcgccggttgcattcgattcctctttgtaattgtccttttaacagcgatcgcgtatttcgtctcgctcaggcgcaatcacgaatgaataacggtttggttgatgcgagtgattttgatgacgagcgtaatggttgtcctgttgaacaagtctggaaagaaatgcataagcttttgccattctcaccggattcagtcgtcactcatggtgatttctcacttgataaccttatttttgacgaggggaaattaataggttgtattgatgttggacgagtcggaatcgcagaccgataccaggatcttgccatcctatggaactgcctcggtgaattttcaccttcattacaaaaacggctttttcataaatatggcattgataatcctgatatgaataaattgcagtttcatttgatgctcgatgagtttttctaa

SEQ ID NO: 180555 - DNA, 1056 bp, Klebsiella oxytoca
gtgaataagataccgcaacccaaagtcgccctggtcgccggcgccagcggcattattggcagagagctggtgaaaacgctgttacgcaatcgctgggaggttatcggcctcagccgccatgcatcgtcccacccggaaaacattcccttcattcacgtcgatttactggatgcgcagcacagcgcgcaaaaactgcattcgctcaacggcgtcacccacattttttacagcgcatgggccaacgccgggaactgggcggaaatggttgaaccgaacgtcaccatgctgcgcaacctggtcagcaacatcgagcaaaccgcaccgctacggacggtaagcctgatgcagggatacaaagtgtacggcgcgcatcttggtccgttcaaaaccccggcgcgtgaaagcgatcccggcgtacccggggccgaatttaacgccgctcagctcacctggctcagccatttccagcgcggaaaaacgtggcgctggaacgcgatcaggccgggcgtggtcggcagtacggtgcccggcaacgccatgaatctcgcactcagcatcgcgatctatgcttcgctatgtaaagcgcaggatctaccgctgcgtttccccggttcggaaaaaacctggcacagcatcgtcgatcatacggacgccgggttgctggctgatgccacgctgtgggccgcaacctcgccaacggtgcaaaaccaggcgttcaacgtcaataacggcgacatctggcgctggtgcgagctgtggccgcgcatcgcgagctggtttgaactggcatccgccccgccggtcagactgtcatttcaccagctgtttgtggattaccgcgcgtactggcgcgaactggccgggcagagtctggtggaagcggacatcttaaggctcagcgacggtaaatttgctgatttcgtctttggctggaactacgacatgtttggcgatggcagcaaactgcgccgggcgggctacactgaaatgcaggccaccgacgacatgtttttccgcctgttcgcacagctgagagccgctcgcattatcccctga

SEQ ID NO: 180556 - DNA, 1917 bp, Klebsiella oxytoca
atgacgacaccgacccacataggataccgcgacccaggtgatggttcatataacccagggctacaaacaaatattgcgccagtcacgcgtgacaatgcattatacaacgatttcatgatcggcatcacagccaccaatacgctcggcagcggtagcgaaaaataccaacaggatctatttggccgctcaccactcagcgccctgattggattctggaataccagtagcgaagtgactgtcacggtgatgagccccgataaacctcaagcgccagaaattagtcatacctacaccaacctggccgttaaccaggccatcacccttcccgtgctgggatttctggctcgtgaagaggtcaatacgctcaaccaggttaccgtcactgatagcagcggcaacagctttcagacaacagtagatattgctcaactgccctttaccgatcctgagggaaacgtgagcaacggtttccccaaagtagatgtcatcaccacagcggaacaatctgtagtgggtgacgatctttattttgtcatcctttcagaacgtcgggcgaatattgcatgggaccgccaggccaatgttcgatggtatgttctggcaggaagcgaaactgacgatccggcgctctggttgcccgtatttaataccacacgattgtccgatggtacgtttatcggatccgatgaccacctcagttattactatacccccgcagatatgggggaaaatgaacctgtcgggcaacgcgaactatggcgcttcgatgcaacagggcgcgtattcggtatttactttattcgcgatcgtgcgcatcactcgcttttagaactacctggagaaaacgctctgctatacggctccgattatatcagccagcgtgaaaacaatgctggtccaaatccgaatccggatggcccgaaccaaggcccgtcagcagaagactgtattgctattttagatttagccaccggttttgagaaagtctattatgacttccgtcaaattatgaatttctggcgaacaccagtaccgacagacctgtcggttcctaatatttacgattgggttcatatcaaccaaatttatcttgatagtgatagcaatatgttgatcgcctcatgccgacatcaatgcgctattgtgggaatcgacagagaaacgggagcgctgcagtttatttccggtaatcacgacgactggcaggcgacggaatctggcgagccgactactgactggtctgcactattactcgcaccgattaatcctgaaacggacgaagcttatgaccttagcgatccgctgcagaaagccgaggccgaccggacattctggacttggggacaacacaatgtgcaggagatcattaaatccgagtctaaccccgacattattgaattctccatattcaataatggcaactaccgcacccgaaataccgcagccggggtagtggcctccgaaaatgcttcccgttgttcacgttatcaagtcgatttagtcaacagggaagtgagaaaactatttgaatatggcgaaacggaagtgggtgccgacggctatagctcctacgtttcgaccgccacattctttaatcatgataatgataccagccagccgcgactactcgccaatttcggtggaagtatttttcaggagaatgggagcggcgtcgataccggtttggctttgactttaaaacctgatgaatccgaccgccaggatccattagaacaagttgatggtaactatcaggggcgcactatccttcaggagatcgacctgaatacgaacttgcccgtctttgagctccgtttaacatcgggttcatataaaactaccgcaactggcgatacgctgcgccgtgcggagctgtacgccttcagggcctataaaatgccgctctatccggcatga

SEQ ID NO: 180557 - DNA, 852 bp, Klebsiella oxytoca
atgggtattcttttatctaaaaaaatgaaatattttatggttacgatggagagacgcaatttcagccttgccgccgacgaactctgtataacacgttcgccattgagtaaggtcatcactgaaattgaaaactggcttggtgggaaattatttatcagacgccacaatgatctcgaaccaacctcgttagcctgggatttttatcataaatgcaaacccctatattataaaaccttatccctggagtctgagtggagcagtaagaaaacacaatcactcctcacctttcattttgatatcagcataccagaactcctatttcgtcaactcgttatgattgctcaggttgaaaaaattaatgccaaatttatcagagaaactatcgaatttaacgatgaaaaacagttaaaataccaaagtaattatatcatgatcgccactcactccttgcgttgcaactatcatacagaatataactcatgggaaggatgccccttagtggtactgaaaagcaaatatattccacaatcaaatcaacagaatatatttatctggaaagataaatatattgattatatgaaagaacattactctcatattttgagtaaatctaaaatctcaccatcctttattgaacatgacttcgacatctctactttactctatgctgtgcgttcgggtaaaggctcattattaatgagccaaaaaatggcccaactgtacaaaattgatggcgtagagtatcaaactctatccggatatcatccgcgaatttatttatatacaaacattgataagaccaaacaaaaactatttattaaatttaaagaaattctatcaacatttatttga

SEQ ID NO: 180558 - DNA, 339 bp, Klebsiella oxytoca
atgtatgaaacagggtgttcaccaggaattattcttggcgctttttccgggagtgtgattttcgttatttcggcaacagagttcacgccatgggcaaagattgtgctttttttctgctcaatcaacgtagggattttttccgcaaaatgtgtagctacattaataaacctggggctaatagcctatgccgatttacatataccgattcctgaagcattaggtgcggctatttcagctacaggggctgtacgctttttgatgtatctggccactttacctgtgcaaaaaggagagttgctaaataaattaaaaagagggagtaaaaatgacattgagtga

SEQ ID NO: 180559 - DNA, 282 bp, Klebsiella oxytoca
atgacattgagtgacttgccttcttatataaacagctttctatgctggttgattattttacggataatatgttggaaaagaaatgggaggcgttataaaccgataatttcgttgattgcatgggttctggttatttcctgtagtggtattactgtttttttattttttggccattaccggcttgcggactgggatgaactgtttattcatggattattatgtctcattgtttaccgtaccgctggaaatgtcgctactttgttaaagatacgtaaccattaa

SEQ ID NO: 180560 - DNA, 1416 bp, Klebsiella oxytoca
atgaactacaacatggtgggggatgccatcgttaagcactgtggcggactcgctaattttattcatgtcaccaactgtatgacccgggtacgaatgaccatcgccgatacctccctggtggatatgaccgcattgaaagcgattgatggggtattgggcgttgttgaagacgatactttgcaggtgatagtcggtccgggaaaatcgacaaaagtggctggggttatcaatgagcgtctaaaaggccagccaagccgtagggaggcgttaagcgacgttgagcaaaaagcgcaaacagcacgtgaaaaagccaaaaaacagacccggaccaaagtgatactcaaacacattgcgaatatttttgttccgattctacccgcgctgattgcggctggaattttgatgggactaaacaatgtgatattcaactcagcggcatcctgggcgttaactcatcatgttgtttcagtgggcgatctctcgccggctcaggtggtattggatcagcgccaccttctgggcataagccagtttctcgatgtggtctcgaaagcgctgtttggttttttagctatctatgcgggagtaacgtcggcacgagagtttgaaggaaatctgattctgggtggtctgctcggagcaataacgatcatgccgcaggtgactaccctcggcctgattgcagggcagggtgggcttatcggcgtgattttcgccgtctggttaatgtgcctgctggagaaacaggtacgcagatttgtacctgatattgtcgatgttgtcgtcacgccaacgctcgttttgttgatcatggcggcagcactgcttttcgtgatcatgccggcggccggcgtcgtttctaatgggatattaagcggcctgaacggattactggaacatggtggtatcgtcgccggcttcgtgctttcggctttgttcccattcctgatttcgttaggtttgcatcatggcctgttcccgatccacctcgagatgattaattccactgggcatgctcccctgtttgctattcaaatcatgtctaatgctgggatggttggcgcggcgacggctgtgctcttgctgacgcgcgatccggtgatgaagaaaattgccaggggggccattccaacctctattctggcggttggcgaaccgactatttttggcgtcaatattcccgcgggtttcgcgtttatcaccggttcaattggcgctggtttcggtggggtgatggtggtgctgcttggcgtatctacaaacggggtcggcgcagcagggctgtcagcactcccgttgattgctgacgggaaatatcttcaatacatcctggcgtggctggttggctgtgcagcggcttttgcattgacttatatcgtcggcaaagtccgcggttacgataaagaaacggtgtga

SEQ ID NO: 180561 - DNA, 1746 bp, Klebsiella oxytoca
atgaaagcaattatgttgatgtttgattcgcttaacaaacgtctgttgtcagcttatggaagcgatcgtgctctcacgccgaatttcctgcgcttaaaagagcgtacggtacgctttgataatttttatgttggcagtatgccctgtatgccggcgcgcagagaattacataccggtcgctacaactttctccatcgtggctggtcgccgctggagccgtttgatgattcagtaccagagatactgaagaagaatgggatccacacccacctggtgaccgatcacaaacactattggcgtgatggtggtgccacctaccactctcgctacagtacttatgagtttattcgcgggcaggaaggggatgcctggaaaggtgtcgttgataaacctgaatattgttatgtgtcaggagagccggaggagattaaacagcgtcgtatcaccagccgggtccagcaccagattaacgtacagtttatgcagaatgaggaagatcatcatctggcgcgaacaatcaataaaggcctggagtttattgataccaaccatgccagtgataactggttcctgcagttagagtgttttgaccctcacgagcctttcttcgtgccggaaaaatatctgcggatgtacggtattgagaatccctcgcagttcgacggttggcctccctactatttcgttacagaaagcccggagcggaaaagtgtcatccagaaatactatatggcgctgctaacgatggtggatgcctacgtgggaaaagtgctggactatatggaccgttacgatctgtggcaggatacgatgctcatcgtgaacacggatcatggtttcctgctcggcgagcatgagtggtggggaaaaaatatcatgccgctgtataacgaagtagccaatacaccctgttttatctggcatccacactatggctgcgcgggagagtcacggcaggcgctggcccagacgattgatattccggcgacgttgctagatagctttgggttgcctaaaccaaaagatatgcagggggtgtctttattaccggtgcttcgtaatgacacgccggtccgcgattacgcgctgtttggctaccatggctgccatatcaatattaccgacggccgctatgtctatatgcgcgcgccggtacagcagggtgtaagcggtttgtacgaatacaccttgatgcccacccgcattaatcgacgctttacgccgagtgaatttcagggcatgacgctgcatccaccattcagttttaccaagggatgccagctgctgaagattcctgctgagtcagtgatgacgcgtggggccgatcgatttggtcatcgtctttacgacctgcacgacgatccgctgcagcaaacgcaaagccgtgatactgctgcagcagaacgtctctgcagcagcatgaaagcgatgatggcgcagagcgacgcgccatcggagctgtatccacgctatggccttgaggatgttggagggccattgctagggttggatccgcatttattgcctgagctggccgcctttgcgccagttgtccgttacggtctctttgcactattgcaacatctggaagggagtggccagacagaacttatggcgcagctccagtccaccagccaaccagtctggacgacagaaaatttgtgggccttcgtccagaacgaggttccaaaggagcagcatcaaagcgtgtactataaaatggccttagaaatgcgacttgattga

SEQ ID NO: 180562 - DNA, 726 bp, Klebsiella oxytoca
atgaaagaagaactggattattcgccaggtgctaaaccgctctatgcccagttgcacgacatattgctggaaaaactgaaaaccggggaatacaaaaagaacgatgtgttgcccacagaggctgaatttgaagagatctttggcgtcagccgcataacagcgcgtcgcgcgctcgccgagctggccgccaaggggctggtaaagcgacaggctggcattggcaccatggtgataagcacctcagagaagcaggaggtgaaggctcggattcggctggttgatgggcaacagcagcatcccatcgagcgtaacaacctcaagctggaacagcttgtaccgccggagggagtggctcaggcgtttgaattaaatgacaacagcccgctgtggttgttaacccgcaccatctaccggcaaaacgagctgcctgcacaagtgaactacatctggctaacgacgcgtttgcaaaatcttacgctcgatgcgttaagcggtggtctctacagcatgctggaaagtaataatgaaaatattgagagtttccaggatgttattaccgcagagctgcccacggaggacgattgccacatcttgcatattgattctcgcgagccgttgctggtgaaaacccgtaagagctacaacgatcgtggggaactggtggaattcagcatcgcgaagcatattgcgagttgctatcaatatattgttgagaatagtcgatga

SEQ ID NO: 180563 - DNA, 345 bp, Klebsiella oxytoca
atgagctgggtgactcagggaaaggagcctgactatcgtttctctctggcgaatgaacgaacgtttctggcatggattcgcacagcactggcctttatggccgccgcgataggcattgatcaattagcggaaaatctggcgccctcaatggtcaaggagttgctggtgtgcgtattaggcataacggcggcgattcttgcttggtacgcctatttacgctggtccggtaatgaacgagcgatgcgagatgacgcggcactggcctatcctcgcttattgatttggctaagtgcaggtttagcggcggtgatggtgatgacattaggagtgatgcttttgctatga

SEQ ID NO: 180564 - DNA, 378 bp, Klebsiella oxytoca
atgccagataacctgcgaatcgaactggatattagcgccggcagcgaggctggacatttcccgcgccagattctcatcggcagtcttcatcacctgagtcaggctctcgatactagcctcaatcccctgcgttgccgccagcagttcatcagcggcctgtgccgccttcgcgttaacatcggcgatacgatccgcggtctcctgcttcactgcattggtcagcgtggtgttaacctgagacagcgactgcttcaggccattttcggcagtctttatctgcgcattcaatgcggcatcgccgtcggccagcgttttgctgaccctggcaatctccaggtcgatggtggcgttgatttctgcagccgtatcagtgactga

SEQ ID NO: 180565 - DNA, 405 bp, Klebsiella oxytoca
atggggcagatcaatacgatggctccgctcataaccggaggtggttttacccgtgacagcggtttccagcaccgtctgccaggcgccgccgtcggtctgcaggtcaatagcatacttgacggtattgcccaccacgtcgccgtcatcttcctgtttcatcagggacggccatttcagacgaacacgaacggcagaaagctgggtattagtaaaggtatgggtccaggctgtcttgctggaaacttccgttcctacactgatttcattttcagtaccgggaataccctgaatataagtctgagcctgcgtgccggggcgaaattcccaggacacgccactgaagttttgcgaaccatcagcattttcaagcggggtgccatcaagataaatatctttcccggttaa

SEQ ID NO: 180566 - DNA, 612 bp, Klebsiella oxytoca
atgattacagttcaggagtcaatggttaatattgagctgagcggtgaattaggaaagcgatttggtaaaaaacataagcgcctagtagccactacaaatgaagctattcaggcgctttgctgtacgatcagtggctttgaaatgttcatgaataaagcgaaagaacgaggattgacttttgcgatattcaagaacgggaaaaatatagggctaaatgatttttcttatcctgttaatgatgaaactataaaaatagtccctgttgttattggtagtaaaaaagcaggggtattgcagactatccttggcgcagtaatcatagctgctgccgttatgcttggacctgccggcgccggtgctttagccgcaggcactgcgtggaatgtcgggttggctggcggcgccatgatgctcggcggcgtcgttcagatgctctccccacagccagctggcctggcacgaaaagaatccgctgacaataaagcgtcctacgcctttgggggcgtgacgaacactgcctctcagggatacccggtccctttgctttatggcaaacggcgaattggcggcgccattatatctgccggtatttacgtagaagaccagcaataa

SEQ ID NO: 180567 - DNA, 351 bp, Klebsiella oxytoca
gtgaaaattattttagcattgccgattattatcggggcattcattcttactggttgtaagtcaccgtcggaagtccgtcagagtggtccggaagaaatatttcattcgaataagaatgtgaatgatgtttctgagtgcattttatcaggctggcaggaaaaaagttttctaacaggacctgtcccggtatatattcagccttataaaaacggtaagactgtctatatagacgtatatacttgggttgcagatgtgattcctgaccaagatgggaaaagtaaagttatttacttctctcaaaatgccagaagaagcgctgaaatgaaatcggtgatcaaatcatgcatataa

SEQ ID NO: 180568 - DNA, 711 bp, Klebsiella oxytoca
atgcgtcagaaaacgattaaggccatccaggaacatgcggccgcagaatatccgcgcgaggcctgcggcctcgtcgcccagaggggccgagcggagcgttatttcccctgccggaacctggccacagagtcgaaagataattttgtgctggcgccggaggattatgcggaggttgaggaatggggagcgatcaccggtattgttcacagccatcctgatgccaccacccagccgagcgaactggataaagcgcaatgcgacgcgacccttctcccctggcatattatcagctggccagaaggcgatctccgtaccatccacccgcgtggtgagttgccgctcctcgagcgaccattcgtgctgggccactacgattgctggggcctggtgatgagctatttccggcaaacccacggcatcgagctgcacgattaccgcgtcgattatccgtggtgggaaaaggagtatccggacaatttttatcaggactgctggtatgaatgcgggttccgtgagtttgatggtccaccgcaaccgggtgatatggtgatcatgcaggtgcaggcggataagtggaaccacgccgggattctgctggaagggaacctgctgctgcatcacttgtatggccatctcagcaagcgcgtgccgtatggtgggtactggatggaaaggacgatgaaggtcgttcggtataagtctctatgttaa

SEQ ID NO: 180569 - DNA, 756 bp, Klebsiella oxytoca
atgagccttaacgcgaattatcagaagttagagccaggcgatgaggttcgtctcctggagatcgatggccaggcgtttggcctggacgaggttttgtatttccacggctataacgtcccccatactgcagccgaaatcctcgccgctgacggcgacctggataagctgcctgcgaaaagcatctggtggcaggggcgggagtataaagcctggccatgtgtaatcgaagggatcgagtcatccaccactggcagcgacgcgcagccaacgctgcgggtagggaacatcgacgggaaaatatccgcgctctgtcttcattacgacgatctggctctggcgcgggttgtcatccacgacacgcaaaaacagtatctcgatgcgaagaactttccggacgggaatgcctcagctgatccgacgcaggagaaacggcgccttttcttcattgacgtaaagcattatgaagacgatgagaaggtggaatttactctctccagcccgtttgccctgcaggggatgatgatccccactcgccagctgcatgcgatttgcacctggtgtatccgcaatcaataccgcagcggtaacgggtgcgactatgccggcacccggtattttgacaggaacaatcagccagttgatgacccgtcgcaggatgtctgcaacggaacgctcacggcctgcaaattacgtcatggtgagaatagcgaactgccgtttggcgggttccccggcacttcattaatcaggagctga

SEQ ID NO: 180570 - DNA, 339 bp, Klebsiella oxytoca
atggctattgagatattcacctggagtccgcgggttaatccccagcagaccgttaactttcgtgtccggaaggcgcagttcggtgacgggtatgcgcaggtatccggcgatggtattaacacccgatcacaggactgggagctgagttttgtcggtacggaggactatatccgtccgattaagcagttcttcgaccgtcatgccggcacccgcgcgtttcagtggaccccgcctctggaagaggtggggctttaccgctgcgaacaatataaaccggtgccgctgggcggcggaaattactcactttcagccacttttattcaggcatttaaaccatga

SEQ ID NO: 180571 - DNA, 3381 bp, Klebsiella oxytoca
atggcagacgtcgcatctttagcggtcgggctgcacctgaacgcagccagttttaaatcccagctgctgggagcgtatggcgatgcggagaaccagtcacgacggtttaaccgtaatgcccaggcggacgcgaaaaagacggaggacgcctataagaaggtcggtctgtcgatatccgggatggccagccggctggcggggctggcaggagccggcctttccatcggcacgatcgtcaccacgtccagacaatatggacaggcattatcagacctgcaggccatcaccggtgcgactgcagctgaaatgaaagcgctggatctggctgcgcaggaaatggggcgcacgacagagtacagcgccagccaggccgccgaagcgttaaagctgatggcgtcggctaaaccggagcttttaaaaacgtccgatggactgcagaaggctacgaacagcgcgcttatcctggcgcaggccgccggcacaacgctgcccgatgcgaccagaacgctggcgctctccttaaaccagtacggggcgagcgcgcaggaagcggatcgttatatcaacgtgctggccgccggcgcgaagtacgggtcgtcggagattgtggatacagcggccgccattaaaaatggtggcgttgcagccgcacaggccggcgttggttttgagcagctgaatgccgcgattcaggtgctggcagagcgtgaaattaaaggcggtgaagccggcacggcgctgcgtaacgtcatcctgaacctggaaaagggcacagacaagagcctcaagccgtccgtggttggtctcagccaggcgctgactaacctatctggtaaaaatctgtctacggctcaggcagtcaagctgtttggggtggagaacctgaatgcggcgtctatcctggtccagaaccgttcaaagcttgatgagctgaccgcttccctgaccggtaccaaaacagcgcatgagcaggcatccatcagggttaacaacctgaacggcgaccttatgggtttgaccagtgcatttgaggggatgatcactaaggtcggaaaaagcagcgatggcgcgttgcgtggcggtattaatggggcgacagaggccattaacggactggctgataatttcagtgtcgtttcagatatcgcgctgtacacgttgatcccgattttatcctcaaaactaacatctgcactgtcggcatcaaccgctggtttacgtgaaaatgtaagcctctggaatcagaaccggatcgctataaagtcaaaggctcagtctgatgccgagaatgcccggcgaacactggaatcaacagccgccactttaaaacgaaatgatgcagaatttggttactaccgtcagatggagcggacagccaaactgcatgggctgaacgtcagttaccagagcgaatttatccggcttatccgacaggaaaccgagcaaacgaacctggccagccaggcgaagctgaagctggcatcagcaaaccgccagctcgctatctctactcgtgcaatgtccattgccgcgggcctggggcggggggcgctttctctccttggggggcctctgggggttgcaactctggctgccacggccatttacgagtttaaccagagcaacaaggtggcaaggcaatcggcgctggatctgaaggacgcagttgtacagacaacagcagaactgctgcgaatgtctcaggccaaaatcgccgtcaaagttgacgattatcaggagcaactggagggaattaacaaagagcgggagaaggtcaaaaatgagttaacccgttacagtgacacgcgcctcaacctggcaaaaagcagagaagatggagccctcagttttctgtttccatcggcgaacagccttcagaaagaaaaaaatcagttgctcggtcagctggaagacctgaattcggcagcggaaaggactcagcaaaaccttattaatgcccggattgccgcgacgggtaaaaccttcgccatcgatacatttttaccacctgagcagccgggtaatactggcccaactggagatgataataacaataatccgtggaccggtgatggtggggaggggaaaaagaacaaggaaaaggttgaccagttcaagcaactgaggcagcaaattgaagaggcgcatgcgtccagtctgggtcgtatcaatcttcaggaggtggaaagtaatcgccagttgcaggatgcggcgaaaaagtacggtgccagtgatgctgacctgcagagggtactgttactgaatgcggagaactaccagaagcagagactggatctggcggcgcagtattcgccggtgaaggaaaccctcctgaaagagcaggaaggcagccgggaactggagtcgatttttaaggctcgcctgctgacggaacaagagtaccagactgcccgaatcactctggccagggatacagccaaagagctgctgcaggcgcaggctgacgaaatagctgctcctaaactggatatcgccggtgaagtcgatcccctcgtctccctgcgcaatcagctggcgcaacgtcagtcgttgctgcaggcgtattacaccggtaatgccatcagcaaggatcagtacgaaatgctgatgcagaaggcgacgaaagagtcggcagatgcgcagtatcagacttcgctggagttgtaccggtcacagggggagatgcagagccttgccgtcggacttcttgagacgacgcaggagcgctccacaaatatgttgaccggactgctgacgagaacacagagcttcagggacggcatgatcggactgttttcctcgttgacgcaggccgtcatcaaaaatcttgttgatatggccgctcaggcgctggtcaccagtaccattatgcaaaccatcatgggtgtggtgggagctggagtgagtattgcaggtggtgtttctggagcggctgatgtcggcgcaggaactgcgattcagaatgcgggtaataactttaactttcaaataccgggttatgccaaaggcggtgtcttcgattctccttcattaagtgcctacagcaaccaggtctacgactctccgcagttcttcgctttcgcaaaaggggccggcgtatttggcgaggccgggccggaggccatcatgccgctgacgcgtgccggtgatggttcgctgggtgtacgcgcggtgggtggtggtcagaacgccggcgcgtcggaagggccaaaagtctatatcacgattgaaggcggaaacacctcaacgcaggcgccgtctggttttgagcagtttggccagcagattggctcgtttgtggagaaaaaatacagggagctgatggcgcaggatatgcgccctggcgggatggtctggaatgcagttaaagggcaacgttga

SEQ ID NO: 180572 - DNA, 366 bp, Klebsiella oxytoca
gtgaaagataaagattacctgtccacgctgaaatccgcgttgcttaaatcggagccaaccgtcattaaaaccgagttatttggcgccaccgtattcatccgccgcctgaccggggattacctcatcagctacgaagagaaaatggctgaaaccgcaaaagctggcgcagcgcgcgaggcatcggagcaagtcattcagatcgtcatcgatgcactggttcagccggatggaacggccattccggatgaatttaaacccacggcagccgagctgctgaaggcccatgaaaaccccgaactgctggccgctgtggaaaaagtgaagcaacacgcaatcggcaagctggaggaagcggaaaaaaactga

SEQ ID NO: 180573 - DNA, 462 bp, Klebsiella oxytoca
atggctgataaaacttcgcctgaatatgcgatgttgccggcgggcaccattgtgaaatacggggagcctggcgctgccacgtcagcgctgaaaccgctgattaactgtaaagcgctgggtgcaatggggcagacggggggctttgtcgactgcaccacgttactggataagcagaaacagtccatcagtgatctgcctgatgggcctgaaaagtcgctgggcttcattgatgatccgggcaataccgattttgccgcgctgctgaacgcagcagaggcccgcaagaccatccagttatacgtcgaattacccaacaagcgaacagcgacgatgctcctggcgctgtccgggtggcagatgaatgaaatcgccgctccggcgaatgaggtcatccagatcactgttcagggtaaacagaacaagatcacctggggaaccgtcgctgtctccggcggcgcctga

SEQ ID NO: 180574 - DNA, 402 bp, Klebsiella oxytoca
gtgatccgaatggaagttaaagggctggatgagctggagcggcagttaatggccctgggcgaaaaagtggcgacgaaggtattgcgggatgccgggcgcgaagcgctaaaggtcgtcgaggaagatatgaagcagcatgccggctttgacgaaacgtccgccgggccgcacatgcgggattcaatcaaaatccgctcttccacccgcaagggtaaagggaacgcggttgtaacgctccgtgtcggccccagcaagcagcaccatatgaaggcacttgcgcaggagtttggcacggttaaacaggttgcagacccctttatccgacccgccctggattacaacctccagaccgttttgcgcgtgttaaccgtggaaatccgaaacggcattgaaaacaggtag

SEQ ID NO: 180575 - DNA, 390 bp, Klebsiella oxytoca
atgatagagctggcgattaagggtgcgctggagcgcatcaccggcatgaatgcgtatccgcttttactgccggacacggtccaggaaggtgcgacctttcagcgtatctctgacccggaaatggtctcgggaatgttgcgaacggggatcgtctctgcccgtatccaggtgaatctgtaccgtctcgatgattacacctcactgctgcagctggataaaaaaatctggacggaactgaagtccgtcgttcatggccagctggagggtatcccggttcagtatgtggagcgaggcggtatccatcaggataaaaaccagctgacgaatcgtcgcattcagtatcgcctgacccgcgatttcatcattcactacgtggaggactcctcgtga

SEQ ID NO: 180576 - DNA, 339 bp, Klebsiella oxytoca
atgagcctgaaaccgggtgatatgaactgtcgcattgcaattagctacgttcagtccggtcgtgggccgctgggcgaaccgctaccggaaaagcaggttgaatcgggaaaagcgtgggcaaaacgggagctggtatcggggcgaaaagtccgcacgctggatcagcagcaggtggtggaaacctgcctgttcacggtctatccgggcgtgctggttgatattgactggaaaatcacgacgaaaaatctggtttataccgtccggaatatcgaccgcaaaacggaccggatcattatcacgggggaggctgacgggcggcatgatagagctggcgattaa

SEQ ID NO: 180577 - DNA, 318 bp, Klebsiella oxytoca
ttgatactgacattggatgatgtgaaaacccagctacgcctggaactggatttcacggagcatgacgccatgctcacgcaaatggtgaacgccgcgcagcggagcatcgagcgtgattactactgcaagctggtcaccagtgatgaagagctgcaggcgctcccggagaccgtccgcggatttatcgcggatgaagatatccggctggctattcagtttctggtcagcgatgcgtatctgaatggccataccggacagtggctggaaaccgctgcggtgaggcatcttcttttccccctgcaggagcatacgctatga

SEQ ID NO: 180578 - DNA, 396 bp, Klebsiella oxytoca
atggctgcgaaaaataaagcagtggagccggaagaaacggtcgtacaggacaaccatgcgaccgagaccgcacaggacaaccatgcgactgagaccgcacaggacaaccatgcgactgagaccgcacaggataaccatgcgactgagaccgcacaggataaccgtgcgactgagactgcacaggataaccgtgcgaccgtggtcgcacaggcagaacgcaaatccgttgtgttcctcggtccgcatagccgttattcccgtggagatatcgcgtggtttgaaggatcgcacgccgaagagctggttaagcgccgtatcgcggtatggccgaaggatgccgaacgcgcgctgaaaccgaagccgggagacagcgattttgatactgacattggatga

SEQ ID NO: 180579 - DNA, 1287 bp, Klebsiella oxytoca
atgccacagattgaagaattgcgtcgtcagcgtgcgggtatcaacgaacaggttcaggccctggcaaccattgaagccggcggcggcacgctgactgcggagcagctgacggagtttgcgaacctgcagcagcagttcactgatatcagcgccaaaatggaacgcctggaagccgccgaacgtgctgcggcgctggtcgcaaagcccgtgaaagcgactcagcaggcccccggcattattattaagcaggagccgaaacagtacaccggtgctggcatgacccgactggtgatgtctgtcgccgcaggcgcaggtaatctgcaggacgcggcaaaattcgcttcagaagagctgaatgaccagtccgtatcgatggccatttccaccgctgcgggttccggtggggcgctcatcccggagaacatgcaaaacgaagtcatcgagctgctgagcgaccgtaccattgtccgtaagctgggtgcccgctccgttccgctgcctaacggcaatctgacgttaccgcgctcggctggcggtgcaacggccagctacaccggcgaaggaaaggatgccaagacgtctgaatcaaaattcgacgacgtaaaactgagtgccaaaaccatgatcgccctggtcccgatgtcgaaccagctgattggtcgcgccggttttaacgttgagcagctggtcctgcaggatattctgaccgccatcgctgttcgtgaggataaagcgtttatgcgcgatgacggtaccggcgatacaccgattggtatgaagtcgcgtgcgacgcagtggaaccgcctgctgccgtgggaagcgggttccgcgatcaacctgaacacggttgatgagtacctggacaagattattctgatggcgatggatggcaacagcctgatgatccgttgcggctggggtatgtcgaaccgtacctatatgaagctgtttggcctgcgtgacggcaacggcaacaaagtctacccggaaatggcgcaggggatgctcaagggctatccgattcagtataccagcgcgatcccggttaacctgggcgaaagtggtaaggaaacggaaatttatttcgccgacttcaatgatgttgtcatcggtgaagatggttccatgaaggtcgatttctccagagaagccacctatctcgatgcagaaggtaacccagtttccgcgttctcgcgtaaccagtcgctgatccgcgttgtcctcgaacacgatatcggcttccgtcatccggaaggcctggtgctgggtaccggcgtcctgttctaa

SEQ ID NO: 180580 - DNA, 921 bp, Klebsiella oxytoca
atgacaacgaaattaattaacctgccgcacctggcagatatggtctttggtgtgccgcattacgtgacgcggcaaacaatggactccgtgaaagcggtgctcatcccccgtattcaggggatcaccgaagatgccgtcattcagatggcgctgaatccgggtaaatcacctgcagctgagcaggtccagcccaccggcggggtggcggtgatccccgttcacggcattcttgttccacgccgggggcagattacggcgatgtgctccgagctgaccagctacgagcggattcgcgggcagctgcaggcggcattaaacgacccctcaatcagcgaaatcgttctggatattaactccggcggcggcgcagcggtggggtgcaaggagctggccgattacatttatcagtctcgcgacacgaaacccatcacggcgattgtgaactacagcgcgtattccgccgcgtatttcatcgcatcggcctgcagcaaaatcatcgtcagccagaccagtggcgtggggtcgattggtgtgatcatggagcacctcgatacgtcgaagatggaagaaaaaatggggctgacgttcaccaccatttaccggggagataacaaaaataacggcacccaacatgaaccactgagtgaagagtcgctgggtatgttccagggcatgatcgacgaaatgtacgagacgtttacggggtcggtggccgaatatcgcggcctgaatcagcaggccgtcattgatacgcaggcggggctgtattttggccctggcgcggtgtctgccggcctggcggatgaagtctctgacccccaggcggcgatcaatgctatcgcggcaaagtatcagcaaccccgtcaaaaaacctccattcagatgcaggcagccgcgatggacctgcaaaccaaaatgtaa

SEQ ID NO: 180581 - DNA, 1260 bp, Klebsiella oxytoca
atgtttatcccccaaatgttcagagggcgccagcagtcgagggatggcctctgggaagccatgctgggcggggttcgttcaagccagagcaaaactggcatcataatcacgccggaaaccgctctgggactttcagcggtccgggcctgtgtcactctcctggctgagtccgtcgcgcagctgccgtgcgaactttaccggcgggataaaaatggcgggcgccagcgtgcgacggaccacccggtttatgacctgattcactcccagcccaacaggaaagacacctcattcgagtatttcgagcagcagcaggggttgctggggcttgagggaaattgctactcgatcatcgaacgggacggaaaaggctacccgaaagagctgatccccattaacccgaaaaaggtcattgtgctgaaagggccggacggtatgccgtattaccaactcccggaagtcggcgaaattctgccgatgcgcatgatgcaccatgtgaaggtcttttctctggatggctatatcggcagctcccccattcagacgaacgccgatgttcttggactgaatttggccgttgaggagcatgcggcagcgacatttcggcgcgggacaacgatgagcggggtgatagagcgtccgaaagaggctgcgaccattaaaagccaggatgctattgatcgcctgctggcgaaatggaccgagcgccattccggtattcacaatatgttctctgtggcattgctgcaggagggcatgagctacaaacaactgtcgcaggataacgaaaaggcgcagctgctacagtcgcggcagtggggcgtggaagaggtctgccggctctataaaatcccgccacatatggtgcagatgctggcgaaagcgaccaacaacaacattgaacaccagggcctgcagttcgtgatgtacacgctgctggcatggctgaaacgccatgagggtgcgttgcagcgcgatctgctcctgcccagcgaacgccgcgatttgtacatcgagttcaacgtttccgggctgctgcgaggcgatcagaaatcacgctatgaatcttatgcgctgggccgccagtggggatggctatccactaacgatatccggcgtatggagaatctgccgccaattgctggcggggacaaatacctgacgccgctcaatatggtcgacagcgcgaagatccttcctggcgataagtcgccgacagcaaaacagctggccgaaattgaaacccttctggccagagcctga

SEQ ID NO: 180582 - DNA, 1710 bp, Klebsiella oxytoca
atggccgcatatccaaacgtcaatgtggcgaacaaatatgcgcgggatatcatagacgggaaaatagtcgcctgcagagctattcggctggcatgtcagcgccattttgacgatttaaaaaaatcactcgataacaattacccttaccggttcgacagagatttagctgagcgggcctgccggtttgttcagaaattaccgcactccagtggcgatttggcggggcagaaattaaaactggaaccttggcaaagttttattttttgttcgatttttggctgggtcacgaaaaaggataaaaaacgccgatttcgcgaagcgtatatccgggtagccaggaaaaacgggaaatcgttttttgctgccgggattggcacctacatgttttgcgctgatggcgaaaacagcgcagaagtgtattgcggtgcgacaactatggcgcaggcgaaaaaggtcttcaccccagccaggcagatggccagccgcctgccggcacttcgctccagatttgatatttcggtatggaccgacagcctgacacgcccggatggttccgttttcgcacctatggcggggaaacccggcgatggtgacagcccacattgcgcgatcattgacgagtatcacgaacacgatacggatcatatgtacgaggccatgacaatggggatgggcgcccgttcgcagccgttaacgctcattatcacgacagccggctcgtcactggagtccccttgctatgacaaggacaaggaagtcaaagaggttatcgaaggtataacccgtaatgatcgcctgtttggcatgatttacgaactggatgctggcgatgactggaccgacccaaaaaacttaatcaaagctaacccaaatctggacgtttcggttaagtacagcgacctggttgagcttctggaagtagcgaaacaggttcctcgcaaggttaacgccttcaaaaccaaacgcctcaatatttgggtatccggtaaatccgcgttctacaacatggagcagtggaaggctgctgaagaccccgaccttgagctggctgattttgcgaatgacagctgcaacatcggtctcgatctcgccaaaaagctggatatgaacgccgggatacgactatttacgcgggaaattgaaggtaaacggcattattactgcatcaaacctaaattttgggtcccggaagacactatccatacaaccgatccaaaactgctgaaaactgctgacaggtatcagaagttttatgaaatgggcgtgctggaagcgacggatggcgcagaggcagactatcgcgagattctggccagtattatcgatatgcaggacgaaaaccgcattgacgagattgatatcgaccctgcaggcgcaacagcacttcgtcaccagttggaggacaacggatttaccgtagtcgatatccggcaggattacaccaatatgtcaccggcgatgaaagagcttgaagcggctctggccggtggtcgattccaccatgatggcaatcccattctgacctggtgtatcagcaacgttatcgggaaatttatacccggtagcgatgatctcgttcgcccgacaaagggagacaatcaaagcaaaatcgatggagctacagcgttatttaacgccatgactcgcgcaatgctgcacgaaagcagcggcggcacatcggtatatgatgaggaagacatagcgtgttaa

SEQ ID NO: 180583 - DNA, 423 bp, Klebsiella oxytoca
atgcgatcacctggtggcggacgcaaatcgaataacactggaaatcaggttagttctttaaccagagcggtttctccgccggatgaattactgggcgatatggctatcgatgcctggaaacggacgtgcaaaattcttattaaccgtggcacgttcgaaatggaagattgttatttgctgatggaatactgcaacaccgtgcagctgctgtacgacgccaaccaggaaattaaaagcgatggccttggtgatgataccgctgccggcggccagaaacttggtgcggcagtgaaggcgcgtagccgttatatcagcgaattaattcgactctccgttgtgttaaagctggaccccaatagccgcatcctgaagaaacagcccggagataatgacaaatccagcggtgagttcgacgagttttaa

SEQ ID NO: 180584 - DNA, 432 bp, Klebsiella oxytoca
atgatgtatcaacgcacggatctgacgctctccatgttctatgcatccagcgctgatgcagacgggaacaaagtggctacgttgacgatgcaggtaattgcggcagaggttggcgccgtccagaccagtcaactgctatgcatcaccgatagcgcgaagaaaaaaacgtataccgtgagcgagcaatctatcagtaatggttccgatccgttgctggtcgcgattgagaattactggcgccagagtacggatgttgtggttaaaggactgatcgccgaggtgaccgatttcatcgcagggaatatcaactcagtgagcacctggatcggccagtttgggatgaaggtatttgagaaccagccattagctgagcggctgccagaaagcgtgctacaggcagatggtagctccgctacagcgacagggtcctga

SEQ ID NO: 180585 - DNA, 285 bp, Klebsiella oxytoca
atgaataatttcaaaattgaatacgttgatggcgctttgaccgttctggagacggatggccagtcacggatgaatgaagccgtacatggcatccattttgagcatgtccagggcggacgccccctgctgaaactgacgattgcgcatgatattgccccggcctcgaccccggccccggctgctgcgtcggctcaggaacctttagagggtgagctggtacaggagcaacaatccccgctgcctggcggtcgccgttcccgccatcgccgtggaggtaagcaatga

SEQ ID NO: 180586 - DNA, 1077 bp, Klebsiella oxytoca
atgcctgatcgctcaagtaatccgcccaatgcatatcaacaactcaataatcctggcgcagcaatcactcagctgaccagagacattgctgagaacaatgcaaacgcgacccagaagagtatttccagcattggtaccctggcctcaggacccgtattagagctttctgatagtgctcaggatgtgctgtatgctctttttttccgaggtgcactcgtatctggtgatattccttcaaaagccggcgcctccgcactgcgttctctgggatttgccgagaccggccatacagccacgccatacaaaggggaagactatttcacctggctgactcctgcggggtatgcgttcgctattgggtatctggttaaaactcgcttcggcaaacagcctgcaaatgcaaaatcttccgggcagccctcggttcatccggaaggattaagcattaacaaagccattattaaagggaagatcagtagcgcagcctatgtttgcggcaataccatcgaggaggaaacgctgtcgaaggttctggccaattcactgcataacgttccccatgagaaagctggcgatgttgctgaactactggccagggccgttaagtctgcgtttagtgcgctggggcatgcatccggtgaacaggaaaaggaacggcctaaagaatcggacttatccgtcggtactttcaaagtttatagcgagggagaggtgaaggtggcttcaggctctcccttagctgctgaaatagaagccgggcgtgaagatcgcaaaacagcagggaccattaatttaaaactggagctggatacctctgatgccatcgaaagcattaatgggctgagcaaagaaatttcagatcttgttgatactgcaattgccaactcgctcaaaccgggtggacgtctgtacaacgtcgtgcgggaatcttcgtttaacagctcgaatactaccgcccttaactcccgtgtgactgatcttgaatcttgtctcaacagcgcatgtgttttgattagtgatttgtcttgccgtatttcagaacgtatcactggtgacgtacatgccagcccggtctaa

SEQ ID NO: 180587 - DNA, 300 bp, Klebsiella oxytoca
atgaaaatttatattgctggcccgatgaccgggcgcgagaactttaaccgtgaggcatttaacaaagaagccgaacgactgacccgacacgggcacaccgttttaaacccggcaagcctgcctgatgggctggagcaacgcgaatacatggatatttgttttgccatgctccgttgcgctgatgcgatcctgatgctccccagctggcagacctcctccggcgctacggcggaatatcactatgcctacaaaatggcgcttccggtttataccacggttcactatccgccggtcgcatag

SEQ ID NO: 180588 - DNA, 219 bp, Klebsiella oxytoca
atgcgcgtaataacccagctgattatctgcgtcgctttggccgggtgcgtgaaatcaacgccaatgacaccaacactgaatccggctccgtgcgcagcggaaaagccggtgattgatgtggttcacgtcgatgggcatttcgttatcgctgatgacgatatgggtaaactgaccggctacattgccgcactggaagcgggctgcaccgcaccaaaatag

SEQ ID NO: 180589 - DNA, 477 bp, Klebsiella oxytoca
atgaacagtttaaaacgtatggctaaagcctggttgctgatgaatggtgccttcgtccttcttgtgatggcgacgcaaccagcgatggcaaatgagagccagaatcttggtttggatctggattcaattctgagcgctcttcctgcaggctgggccagcggcgtaactgccgtatttatcgtgctgtatgcggtggcgcagctgcgcgccgtactccccccgtcagtgaccaaaaggattcccacggtggtcatgaaaattctcgacctcgttgccgcgaactatgcccacgcccggaacgctgatgcgatcagcaaagttgcgcgggatgccgggaaagccaaaggcccatcagatgttgattatcgtgtgatggtggaaacggccaaaaacaatggagagcttcgtggaagccggattgagagtgctggcgattatcctggagatgatcgcccaggcagtaaaagcccgcaatga

SEQ ID NO: 180590 - DNA, 492 bp, Klebsiella oxytoca
atgaattatggactggtgagcaagcaagacgcgcgcctgtatgccgaagccgtttgcgatgtgatcgggcatggcaaggcgaatgcagctgttttgctgtgtgtcgaaacggccgcagccgagacattgctcggcgattacaaagacccgacgccgaccagcgccggaaccggattaacccaggttgatctcggtaccttcgaatggctccgcgataagtacaaaaacagccgttatgccccggtactgctgaatcagtttggtatcgacctgagccgaacagtttatgcggaactgaggacctcgccgctgatggcgatgctgttttgccgcctgcgctatctggcggtttcagagtcgattccggcgactcgcgaggcccgcgcagcgtactggaaaaaatattacaacacctcggcaggcaaaggcacgccgcaggattacattgataaatgccagcgcgctggcgttgatgcgctattcacgcagtga

SEQ ID NO: 180591 - DNA, 312 bp, Klebsiella oxytoca
atgaacacagctatcgaatatggaaatcctgatctctggctggtcttgctcatgctggccgccggggtggtatcaagcgccctgctttccgaaacccctatcaacccgcgccgcctcatcggagacgttctgagaggcgtaatcgtggccatcatcctctgggcttacggcgctatgggcaacatctcaattttgaaagtaatcactctcgccggtttatcggctgtggcatggccacacaccgtcaacgaaatcaccggctttgcaaaacgaactatcagccgaattttcggcgggagaaaagaacgatga

SEQ ID NO: 180592 - DNA, 1059 bp, Klebsiella oxytoca
atgaaaaacactgtgaaaataaacagtgccgaacttgtgcatgcagattcacttgagtacatcaaaaccctgccggacaacagcttagacgccatcatcaccgacccaccgtattaccgcgtaaaggcaaatgcctgggataaccaatggcccagcgtaacggattatttggcctggctggatgagtttttcgccgagttctggcgagtgcttaagccagcagggtcgttatatgtgttctgcgggccgaaattatcatcggacaccgagttgttgttacgtgaccgtttcaacgtgctgaaccatatcgtttgggccaaacccagcgggcgctggaatggcgcgcgtaaagaaggtttccgatcttattttccggccagtgagcatattttcttcgcagagcattacggcgcggaaggctttgctaaaggccaggctgggtatgcgacaaagtgccaggagttgaaaggccaggtcttcgaaccgcttatcgcttatttccaggatgctcgccagcgacttggtatttccgctgccgaaatcaacgcggcaaccggcacgaaaatgtgtagccactggtttagcgccagccagtggcaattgcccaatgaacggcagtacctggcgctgcaggcgctgtttaaccgtaaggccgcagagcagggaatatcgggattgtcagagccgcatgcggcgctgcaggaggaatacggcactttaacggcgctatattccgaactggttatgcagtattccgaactgcgacagcagtatgagaatttgcggcgccctttccatgtgacaaaagatgttccacacaccaacgtgtggacgtatccaccggttccgtactatccgggcaaacacccatgcgaaaaaccgctgcagatgatgctcgacatcatttcggcttgtacgcgccctggcgatgtgatcgccgacttttttatggggtcgggtgcaacgataaaagccgcgctgcagttaggacgcggagccatcggcgtagagctggaagaggagcgatttttacagacggtctccgagatagaaaaataa

SEQ ID NO: 180593 - DNA, 231 bp, Klebsiella oxytoca
atgatgaacgtgaaacagatccgcgagaatatgaccgaagcggccttgagcgttgagagtgtaatgcggggacacccccgcatcaccctgcaggaattaagcaccgcctgcagcattagcctgccagcggtagagtttattatcgagcagatgctttgtatgagggtggcgcagcggggcgcttttgggcggtactcccttaccccggaataccaaaatggtagcttttaa

SEQ ID NO: 180594 - DNA, 222 bp, Klebsiella oxytoca
gtgaactatcaaggcaacgaaaaaatgagacaggacgcggctgagatttctaacgagctgtatgaactctggcaaaaagtgaagcgtttccagcgtgagtacagcttcaacagcgagaacattacagacagactggcgggccgactgattggaacaatggaacccaaactggccgaccttaacagctttatggccgatgtcgattaccagtttgaagattaa

SEQ ID NO: 180595 - DNA, 309 bp, Klebsiella oxytoca
atgtttaacgtgataacccacccggcagcgctggaagagttacaggaactaccggacgagttacgaggtcgcatgacccgactgattgaaagactggaaagtgaaggaaaactaaaaatgcctcatagccgcgtaattggcgccgggctttttgagttaagggttggagacaaaaacatagcaagaacgttatacgcttacgcagtcggccacgaaatctacctactgcatgcgtttgttaagaagacacaaaaaaccccggcaggggccatagagatagcgagaaagcgcctgaaggagatgagctaa

SEQ ID NO: 180596 - DNA, 288 bp, Klebsiella oxytoca
atgaaagtaaaaggcatcccatttaaccaggtcaaagaaagtctgctcaacaccccggaggcaatccggggttaccaggaagcagataaagagctggcactggtcgaaatgctgtacgagatgcgtgaaaaggctgggttaagcaaatctgccctggcggaacggatggggatcacgccatctgctattagtcgcctcgaggggaaccccctgggggccagcatgaagacactgagcaaatacgcgcaagcgtgcggcgctgaaattaacatccaggccgtatactga

SEQ ID NO: 180597 - DNA, 204 bp, Klebsiella oxytoca
atggaagatacggtcctctcaaattgtgaaaggctggacgctgagctgagtgatatcgatgccgtattagatatggtatcggtagcgatggcatccccggaggccagtttgcatgtggctcaaactatgcgcctcatttgtatgtcacgtcggatgctgcagcggtgccgggatctcaacaaggttgaaggaagaagccactag

SEQ ID NO: 180598 - DNA, 228 bp, Klebsiella oxytoca
atggataaatcggcattgcttttggagaaactccgtcaacgaacgcaaagtagcctggccagcggtggcgacggctttgtctttgcatcgatgctggtctttgacgtgggcttgaatgcccggactattcggcaaatgttggacgttgcagtaaggaacgggacccttgaaaaaagggaaagaggcataggccgcgcgcataagtatcggacaaatctgcaaatttga

SEQ ID NO: 180599 - DNA, 327 bp, Klebsiella oxytoca
gtggctaaaactcctgcagaacggcaacggcagcgccgtgaacgtttaaagcagtccggcaccaccagacgcgattgggtacttgagccggaggaactgcgcatgctgggcgaaatttgcatccagcgtcgcccaggcagaacgccgtattcagaaaatgaagtaatcggcctgttgatccgaaagaattacaaagagcttcagaagagcctggcgaacacatgccagcgatgtggccaggcgctgccggtgtcggaatgcatcttcgacggcgaaaattcatgcttactgacgactgccagactaaagctggccattaaggcgtga

SEQ ID NO: 180600 - DNA, 246 bp, Klebsiella oxytoca
atgagactgcaaatgcgcactcccgatggttctgtgattgtcgagagcaacctggtatctcagttttaccccgattacgaaagcggtggtgagctaacaacaatcgaaactgtttcttctgacggtgaagcctcctttgtgaaagttaagcactcgtttcatcaagtaacccatgctctggctactgcatggagcgtagatgaaaaagaagcgatgcacactcaacgggaggaatgccgtggctaa

SEQ ID NO: 180601 - DNA, 507 bp, Klebsiella oxytoca
atgacagatatcacccgactgattaacagcattaagcgctgcacgtcctcagcaagagagcttggctacgatgtcctgttcgtggcacttgatgatttggatgtcctggctgattcgctggagacggcgctgcgcgcaaacgccgcccaggccgctcacatcgagcagctgcaggacacgtttaacaaacttgcagcggagaatgtggcgctgaagaatgcttttggccccggcgattcagtgctgaattttctcactatcgcattacgccacacaacgtatgacaggattgaccttgatgacgtcacgctggctttcaaaatgtcactgccggaaacccccgcaaccgatcgcatcgtagccgggattaaggctgatggggtggaggagttcgcggcaaaacttcgaattcctggttatgaccagttttttgacgctttagcaaaaggggtagcacttgctgctgacgacttcgccaagcagctgcgcgaaggagggaaagtatga

SEQ ID NO: 180602 - DNA, 135 bp, Klebsiella oxytoca
atgaactctgaactattcaactacagcctgaaaacgctacaggtgctgaacgttgtcgcagatttggttttatcagtggcgttgtttggctttgggtacggccttcttaacttgcttgagtggtggcttgcatga

SEQ ID NO: 180603 - DNA, 609 bp, Klebsiella oxytoca
atgcttacctaccatcaatcaatttttaaaatgattatggcaaattggctgaacagcgatcatgtcatcatcgatactgagaccaccgggcttatggcttctgatgaaattatcgagatcacgataattaatatgcgtggtgagattctgttaaacaccctggtgaagccgagccgccctattccaccagaagttaccaaaattaataacatcaccaacgaaatggtcgctgatgcgccagcatggcgcgaggttttcccggctgcgctgaaaattattcgtaagcataaatggctggcatggaactccagttttgatgcccgcctgatggtgcagacctgcctgcagaccggattttttgatgacctaaagcctcacctcatcacctccatcatcatggccattgagacgcgccacattgacgccaaagcggtttatgaccagtggtatggggagttcgacgagaagcgcaaaaacttcaaaaggcagagcctggctacagcagctgcgcgccacggcatttcaaccgctggcgcccatcgcgcgcttgccgattgcctgatgatcctcggcgtgctgaaacaggtttgccagccggaggtcgcatga

SEQ ID NO: 180604 - DNA, 738 bp, Klebsiella oxytoca
atggaacttgaacgaatccgcgcttgtgtggccacggccctttcagatctgcattacctccagcgcggaattttagaagttcagcttgagcagttacgtcttgccaactccggcaggtttactgataagccaacccgggtcattcaaatgggcgagaataataaatacgagatctcggtcgcggctgagcaggttcgttaccatgttgggaaaacgtttaagcaatcctcaatgctgctgactgaacttgattttcagacggctagttggcgcagagctattgagcagttaaatcgtgaggaaattgcctggctgcattattgctatggctgtaagcccaattttgaaaatgatgaagttatatgccagtggctatggctggattttcttgtcgctcattcaaagcctgatttcaaaaaaatgaaagaggcgacaaagaaaaagatgcgcaatttaacttattacgccatccagcaggttaaggcttcaatattacgcggagaggatgtggacccgctgcgtgaggatgagcatataagtcttttgcttaatatcaccgtcgatagctggcgtaaggattataaaaaacgctggctattaatgaaatcacgatgcctgcatctgaatagcatcgcgttatttaacgcagcggagaagcgcagtgaaatcatcaaccgccattgtacaggaagtgccaacgtgcctgtgccagcaaattatgcacaggaagcccggtaa

SEQ ID NO: 180605 - DNA, 609 bp, Klebsiella oxytoca
atgattgatcgtatgaaaacacgaggcgaacgactgaaagcacgccgtttagaattgaagatgacactgaagcaagtcgcgcaaagtgtcggtatctctcttcctggcgtccaaaacttagaacgtggcgacgttatgccgtcgctggagatcgggcttgccctggcgaaatgcctgcgcaaacctgtgcaatggatactttttggtactgaatctgatcctgaccgcgttcctgttattggcacaacagagagtggtccggatagcgactggcagccaggagaacctgccaacacagaacgattcctgccatttgttagccaacgggaaaccgtttatgcgctcactgtcgggaaccaggttcagcacagctatcagccgggtgacgtcgtcctggttgactcagctctcacgccagttccgggtgaggatgtgttagtttgtgataaagacgggaaaatctcgatacagcggttagcgcgcttcgacgatgagcgctactacttagatggcgttaactctcaacgagttatccatgagaaaagtgatcttcaatttgtgcaccaaatagtcggtacgatcaaatcgttcatgatagagggtagatga

SEQ ID NO: 180606 - DNA, 4005 bp, Klebsiella oxytoca
atgaccttacaagaattctatgcggctcgcttcggtagcgatccgtattcattgcttgaagcagcgcgggatgagctgtcagagctggccacaatggctggcattaactgggcagcatgcgctgataacattcagttgaacccgcgcggcggggaagaacgttattcaaaatataacggtggcgcccccgaagctctggaaaagagcctcaaagggcgtgtggaaatctactcccgcaaggaacaacacaaaagcggtatcagctacccattcgtcaactttgtccagaaagggcatgacgaaggttcctggagcggcttctccttcctgttcgccgaataccgccgtgaacaacaaagaaatcatgcgaccgtggtcgcacaacctgctgaagaactggcgcgtattgaacgccaggcagaagcccgcaagcgccgcgccgaacagcaacggataaatgaacttaaaaacaatcagttagagcaagaacggttgctcggatggttggcgttccacagtgcatgggaacatgcgccagctgaggacgggtcgtggccttacgcagtgaaaaaaggcattcgtgacgtattcagcgcttgcgatattcgtcgcgtgaccagtcacgacaacgcaaaatggagccgtggaccgactacatacatggcaattccgctggcccacctggacggacgcaaagacggacaaattgtcggctggcagcgtatcgaccagcgcggcggtaaattccagaccagcgcgatcaccagcggtgatttcgtcggggcgtgctttgttatcggcaacctgaacggcgcgcaaaatattgcagtggtggaaggtttcgccaccggcgcgtccgtatggctggctacccgtaaggacccgaaaaaaagctttgatgctgtcgtggtcgctgtggccgcaaacaacatgatccatgttgttgagcagctggtgaacatgtacccggcagcaaaaattacctgcgccctggataacgaccgcaaatcatcggctgaaggtaaaggcaacaccggcttacgtaccggcttcgacattctcgcaaaatttagcggcatcaaatgcgtttatcccacctttgaagacgatccccagctggagtgcagcgacttcaacgacctgcacagattacgtggactccgcgagacctgtcgccagctattcgccaaagggaaccgcctgagtaacagcactgatttgctgtctctgacgctaaacaagctgaaaacggctaaacgtgacaaccgcaggacgtttgctaaagaactgctgaacgcggtggatattggcatgctgacctgcccggtaccgaatagcccggcggatctgtttaacatgttctgcatcgtgctgcgtgatatgggactggaaagcgtctatcgcgccacggttaaagaccacatcgcacgccgcctgaaccgcaaatgccgtactgcccaggcaccccgttcctttagcgagcggatcaccgacccgaacaagcgtccccagcacatcacgtataaacgctttgaaacatccgtgatgacggatgaaattctgcaatacgtgcagcagctgcagggcatcgttattgttcgcgccggtatgggatcgggtaagtcgacaggcctgctgcgcccactgatgcataacgctgatcgcggcgtttccgttgcgcaccgcgtaagcctcatcggtggcctgtgggaaatgatgacagagcagaaagggaccaaggccgatattctgcattaccaggaccccggctatcaggaaatggcgccatacgcgaataagctgaccatttgcatcaactccatcgtcaaaggctgctggcagccgctgatgcgccagcatgactatttcggctttgatgaggcaacgcagggacttcgcgccatcctttctggccgcgcaatggagaacccggtcgccgttttcaatacgctgatcgacgcgctggccagaactgaattgcaccccataatggtagacgcagatgctaacgatctgctggtcgacctggcagaactggcgatgaagcgccgcgaagaaatgggcctgccggcatggctgcaaattcacgttatcgaattgccggtcgacgttcgcaaccgcgaaacgggcgaacctatccgcgtattctacaccgagaaagatcgcatcatgaccgaggtgattaaagcggtggaactcggtgaaaaaatcatgctggcgaccgatagctcaactttcgcagaagacgttaccgccacgctgcgccagcgttacccggagaaaaaattcctctgcgtaaaccagaagagcaagccggaacccgaggttgaagaattcaccaataaaccgaagaagatggtgaagaagtacgacggcctgatttacagcccgtcgatatcctccggcgtctccatcgagcaaaagcatttcgaccgccatttcggcatgttttgcggcgaagtggtccccagcgatgctatccagatgctgcgccgcgaccgcacagccaaagagttcattattggctttgacaaggttcgcgcacgacgcgaaaccgatccgcaaaaaattgagcgtgcgtttgtccaggcattgctggccactgccggcatgaacggcgaactaaccgacgttgttttcgacggcgaccgcatttctatgggtgtggccaacaccgattttacccggatgaaaatcaaggcagcagcgattgaggcctccgcacgtaatgactacgccagcaatatgatctgcataatgcacagcgacggctacaaggttgcccccctggcatccgacgagctggctaactgcgtcggcaaggagctgcgcaaggaagcccgcgaaattgtctgggaacaaacgctggatctccacctgaatatcgaaacgccgaacgaatctgaacgggaagccattctgaagaaacgcgccctgaccctggaagagcaggcgaagctggtccgctgggacatcgagcatgagctgaaactgccggtcaacgaggacaacctgaaattctacttcgacggcgcccgcgataaggttcgccgttatgaaaccatgctgctcgatgagatcaccgcgcggcgtttcgaccgcgaggaatccgcgatcaacttcacctacgctttcaggcaggcgggccaatggcaatactttaccgccaccgcgatgacccgcgagcaggctgatgaagcattccaggcgaaacaccctggcatcaccgagtacaaagtcaaatctacacccgcggtcgaggtcggtatgcgcggcttctacggcctcaaatctacggtgctacgccagtacttcattgactgcggcatcgacccggaaaccatgaccggagaagccacccaggcgcgcctggcatacgccagggataaactcatgaccgccgaacggcgagacctgttaaacaacgtcctgcgcattggtggctttatgacgcccaaaggcaagccgaaggtccccgaggcactgtttaaaaccatctgcgagtcgctcggcctgaaaaccgacaagcgccgcgccagggacggagacaagcgcccgaccatacgctttgtggatcagcagtcggcggcgttcatgatggaaattctggagaaccgtaaagacgacggcctgtctctgcagttgcgtaaagccgagaaagccaccaccgaagtggatcacggtttagatctcaatatatatatggatcataaaacgcgatccacaaacgagcaggatttggacgcccctcattcagtaataactgaggcgctggccgagctgccggtgccggtgccggaggcctgggcgatgaccgcgctgtctgatgatgagctggccacaatgacctcctggtcgccagccagcatagcgatgaccttcgcgtccctgtacctcacagagttcatggaccgcctctccagcaacgaactgcgccggctgcgtgaatacatcaccggtacggttacgggcggctacgacgcgcaggaggcgttctatggctaa

SEQ ID NO: 180607 - DNA, 297 bp, Klebsiella oxytoca
atggctaaagatatcgatgcacttctggaacagcaggtggatcaggtgaccgccgttttaaaaagccatgcggcgcatattgaaagcatgctggcgcagcatcgctttcaggtcgcgcagctggcattgcacaacagcccggaaccgttcgttcgtgaggtatttaaccatctgcgtgatcgcctggtacaagtcactatcaatgaagctggccttgctgatgctgatgatgcgcggtacctgctgcgaatacttgatcgcatggaattgtcagcattagaggggaaaccattatga

SEQ ID NO: 180608 - DNA, 351 bp, Klebsiella oxytoca
atgatttaccgcaagggatgggtgccggttttgtttcggcatgagcttgagcgtaagttaaaagagcagggtttcgaaaactggaaagagatatgtaattttctttgcggtgaaggggatgactacgccgaatcagccaaaatgccagagcaatacgattaccaggtggtcgacaataccaaatggatggcaagccgtgacgcgacgttctggcagcgtcttaaccgcctgtggttcgtgccgctgtatttgttgaccatcccattccagtggcttatccgtgggcgtgtgggattcgctacaacgtcaaaaacagcagcattcttcagccggttaaccgggctgaaataa

SEQ ID NO: 180609 - DNA, 168 bp, Klebsiella oxytoca
atgggtgaagcaacaataatgcagacattgagataccaggcgcttcaaagagctattggtgaattgatggcagcgcgcgagactatgcgattagaagaaaatggcgagtatgaccctctcgataaagtaatccaggactgcatcacaatgctgaaagacaacatgtga

SEQ ID NO: 180610 - DNA, 165 bp, Klebsiella oxytoca
atgttcaaattcaagttcgcggcgatctgccgtaccgataaaaaatcccatattcatcatctgtccaccatcgcctcatccgagcgtgaagcccgtcgtcagttcgccagccgttttgttctcgttctgtcagcccgtatccgggttagcggggtggccgcatga

SEQ ID NO: 180611 - DNA, 231 bp, Klebsiella oxytoca
atgaatcaggtgcagctaaacacccagggcctgcttgagtcgattgaggagcgcctggcgcagatagaagcgctggtttcctctgcccaccggacgatctccagctatgaggcctcactgtatatgcaggaggcggcagaattactccaggttgcccgtgagctggttcaagaagccagaaactgttcttcttctctatcagcgcagctgaccgccagggaggccaaatga

SEQ ID NO: 180612 - DNA, 792 bp, Klebsiella oxytoca
atgaatgcactctctgttttctcatttcaggaagaacatcctgttagggtggttatggttgatggtgagccgtggttcgttgctatggatatctgctcagccctccacatcgccaacccttctgatgctttaaagaaattggaccatgatgaaaaattgaccctcggtttaaccgaggctcaaaaattagatcgtatggcaagggaagttaatgtggtttctgaatctggactctatacgctcatcctccgctgccgcgacgcggtgaagcagggaacgacagcctggcggttccgcaagtgggtcaccaatgaggttctaccagctattcggaaaagcggtgagtacagctacgtcgaacccgcgccaaaaatcgccggtgaaccattggactggcggcaaaaggaagagttacgcggcctgataaacgatatagcccaaagttttcagtacaggaacgcgtggatcagtggcgtctggctggcgcttcgtcgcgcctgcaggaacccttcacctaacccaattacggtcgacgatctgccggctatcattgccgaattacgccgaatattaacggcggcagaaactgccctaggtaatatgcgagtttacgaacgggagctgctgcgcgaggtagttcgtggcgggcgccagagtatgtcgtgtgaagaattgcctatcactgatatcaatacggaaatggagaaggtgctgccagcgcatttcgagctggccatcaataaactggaggccttatccacaaaattagaggctcctgccgtctcttcctga

SEQ ID NO: 180613 - DNA, 1923 bp, Klebsiella oxytoca
atgcgtaaggtgaagattggtgagctaatcaattcgcttgtgaacgaggttgaggctatcgacgcctcggatcgtccacaaggcgaaaaaacaaagaaaattaaagccgcagctataaaatataagaatgcattatttaatgataaaagaaagtttcgcggaaaaagcttagaaaaaagaatttcggctaatactttcaatgcctatatgagccgggcaaggaaaagatttgatgataaattacatcataactttgaaaaaaacgtaataaaattatccgaaaagtatccattatacaatgaggaattatcctcatggctttctatgcctgcggcatcaattcgacaaaatatgtcagctctgcaagccaagctaaaagaaataatgccattggcagaagatttatcaaatataaaaatcggtgcgaaaaacagcgatgcaaaattagccaaacttgccaataaatatccagaatggcaatttgctattagtgatttaaacagtgatgattggaaagaaaagcgagattatctttataaactcttccagcaaggctcttcgcttctggaagatttaaacaatttgaaagtaaaccatgaggtcctctatcacttgcagcttagctctgcagagcgaacctccatccagcagcgctgggccaacatactcagcgagaaaaagcgcaacgtggttgtgattgactatccgcgctatatgcaggctatctacgatataatcaataaacctatatcttcgtttgatttaaccacccgtcgaggtatggcccctctggcgttcgcgcttgcggcgctatctggtcgacgaatgattgaaatcatgcttcagggtgaattttccgtcgcaggtaaatatacagtaacattcttagggcaagctaaaaaacgctcagaagataaaggtgtatcaagaaaaatatatactctttgcgacgctgatttatttgtgagtctggttaaccaacttcgctcctgccctgctgctgcggattttgatgaagtggttaaagggtatggggaaaatgatactcgctctgaaaatggtcgtattaacgctattctagcgacagcgtttaatccgtgggtaaaaaaattcttaggcgatgaccgccgcgtttataaagatagccgcgctatttacgcccgcattgcctatgaaatgtttttccgcgttgacccacggtggaagaatgtcgatgaggacgttttcttcatggagattctcggtcatgacgatgaaaacacccagctgcactataagcagtttaaactggcaaacttctccagaacctggcgtccacatgttggcgaggaaaatacccggctggcagcgctgcaaaagctggatagcatgatgccagatttcgccaaaggcgacgccggggttcgtattcatgaaaccgtgaagcagctggtggagcaggacccatcgataaagatcacaaacagtaccctgcgaccatttaacttcagtaccaggctgattcctcgctacctggagtttgccgccgatgcattgggccagttcgtcggtgaaaatgggcagtggcaactgaaggacgaggcgcctgcaatagtcctgcctgatgaagaaattcttgagcccatcgacgacgccgatctcgatgacggagaccaggaagatgaaacgctggatgacgatgagatcgaagtagacgaaagcgaaggagaggaactggaggaagtggacgacgctgaagaggccgaggaggctgagcagggagagaaacatcctgccaagccaaactttaaagcgccgagggataatggcgatggtacctacatggtggagtttgaattcgatggccgtcattacgcctggtctggtgccgccggtaatcgggtagaggcaatgcaatctgcctggagtgcctacttcaagtga

SEQ ID NO: 180614 - DNA, 1923 bp, Klebsiella oxytoca; identical to SEQ ID NO: 180613

SEQ ID NO: 180615 - DNA, 792 bp, Klebsiella oxytoca; identical to SEQ ID NO: 180612

SEQ ID NO: 180616 - DNA, 231 bp, Klebsiella oxytoca; identical to SEQ ID NO: 180611

SEQ ID NO: 180617 - DNA, 165 bp, Klebsiella oxytoca; identical to SEQ ID NO: 180610

SEQ ID NO: 180618 - DNA, 168 bp, Klebsiella oxytoca; identical to SEQ ID NO: 180609

SEQ ID NO: 180619 - DNA, 351 bp, Klebsiella oxytoca; identical to SEQ ID NO: 180608

SEQ ID NO: 180620 - DNA, 297 bp, Klebsiella oxytoca; identical to SEQ ID NO: 180607

SEQ ID NO: 180621 - DNA, 4005 bp, Klebsiella oxytoca; identical to SEQ ID NO: 180606

SEQ ID NO: 180622 - DNA, 609 bp, Klebsiella oxytoca; identical to SEQ ID NO: 180605

SEQ ID NO: 180623 - DNA, 738 bp, Klebsiella oxytoca; identical to SEQ ID NO: 180604

SEQ ID NO: 180624 - DNA, 609 bp, Klebsiella oxytoca; identical to SEQ ID NO: 180603

SEQ ID NO: 180625 - DNA, 135 bp, Klebsiella oxytoca; identical to SEQ ID NO: 180602

SEQ ID NO: 180626 - DNA, 507 bp, Klebsiella oxytoca; identical to SEQ ID NO: 180601

SEQ ID NO: 180627 - DNA, 246 bp, Klebsiella oxytoca; identical to SEQ ID NO: 180600

SEQ ID NO: 180628 - DNA, 327 bp, Klebsiella oxytoca; identical to SEQ ID NO: 180599

SEQ ID NO: 180629 - DNA, 228 bp, Klebsiella oxytoca; identical to SEQ ID NO: 180598

SEQ ID NO: 180630 - DNA, 204 bp, Klebsiella oxytoca; identical to SEQ ID NO: 180597

SEQ ID NO: 180631 - DNA, 288 bp, Klebsiella oxytoca; identical to SEQ ID NO: 180596

SEQ ID NO: 180632 - DNA, 309 bp, Klebsiella oxytoca; identical to SEQ ID NO: 180595

SEQ ID NO: 180633 - DNA, 222 bp, Klebsiella oxytoca; identical to SEQ ID NO: 180594

SEQ ID NO: 180634 - DNA, 231 bp, Klebsiella oxytoca; identical to SEQ ID NO: 180593

SEQ ID NO: 180635 - DNA, 1059 bp, Klebsiella oxytoca; identical to SEQ ID NO: 180592

SEQ ID NO: 180636 - DNA, 312 bp, Klebsiella oxytoca; identical to SEQ ID NO: 180591

SEQ ID NO: 180637 - DNA, 492 bp, Klebsiella oxytoca; identical to SEQ ID NO: 180590

SEQ ID NO: 180638 - DNA, 477 bp, Klebsiella oxytoca; identical to SEQ ID NO: 180589

SEQ ID NO: 180639 - DNA, 219 bp, Klebsiella oxytoca; identical to SEQ ID NO: 180588

SEQ ID NO: 180640 - DNA, 300 bp, Klebsiella oxytoca; identical to SEQ ID NO: 180587

SEQ ID NO: 180641 - DNA, 1077 bp, Klebsiella oxytoca; identical to SEQ ID NO: 180586

SEQ ID NO: 180642 - DNA, 285 bp, Klebsiella oxytoca; identical to SEQ ID NO: 180585

SEQ ID NO: 180643 - DNA, 432 bp, Klebsiella oxytoca; identical to SEQ ID NO: 180584

SEQ ID NO: 180644 - DNA, 423 bp, Klebsiella oxytoca; identical to SEQ ID NO: 180583

SEQ ID NO: 180645 - DNA, 1710 bp, Klebsiella oxytoca; identical to SEQ ID NO: 180582

SEQ ID NO: 180646 - DNA, 1260 bp, Klebsiella oxytoca; identical to SEQ ID NO: 180581

SEQ ID NO: 180647 - DNA, 921 bp, Klebsiella oxytoca; identical to SEQ ID NO: 180580

SEQ ID NO: 180648 - DNA, 1287 bp, Klebsiella oxytoca; identical to SEQ ID NO: 180579

SEQ ID NO: 180649 - DNA, 396 bp, Klebsiella oxytoca; identical to SEQ ID NO: 180578

SEQ ID NO: 180650 - DNA, 318 bp, Klebsiella oxytoca; identical to SEQ ID NO: 180577

SEQ ID NO: 180651 - DNA, 339 bp, Klebsiella oxytoca; identical to SEQ ID NO: 180576

SEQ ID NO: 180652 - DNA, 390 bp, Klebsiella oxytoca; identical to SEQ ID NO: 180575

SEQ ID NO: 180653 - DNA, 402 bp, Klebsiella oxytoca; identical to SEQ ID NO: 180574

SEQ ID NO: 180654 - DNA, 462 bp, Klebsiella oxytoca; identical to SEQ ID NO: 180573

SEQ ID NO: 180655 - DNA, 366 bp, Klebsiella oxytoca; identical to SEQ ID NO: 180572

SEQ ID NO: 180656 - DNA, 3381 bp, Klebsiella oxytoca; identical to SEQ ID NO: 180571

SEQ ID NO: 180657 - DNA, 339 bp, Klebsiella oxytoca; identical to SEQ ID NO: 180570

SEQ ID NO: 180658 - DNA, 756 bp, Klebsiella oxytoca; identical to SEQ ID NO: 180569

SEQ ID NO: 180659 - DNA, 711 bp, Klebsiella oxytoca; identical to SEQ ID NO: 180568

SEQ ID NO: 180660 - DNA, 351 bp, Klebsiella oxytoca; identical to SEQ ID NO: 180567

SEQ ID NO: 180661 - DNA, 612 bp, Klebsiella oxytoca; identical to SEQ ID NO: 180566

SEQ ID NO: 180662 - DNA, 12192 bp, Klebsiella oxytoca
atggcaaataacataattaaagggcgcaagggtggcggctcaaagcagcgtacaccgacggaacagccggatgatttgcagtccgttgcgaaagccaaaattctgctcgcattaggtgagggtgaatttgcaggtggtttaaccgggaaagatatttatcttgatggcaccccgcttgaaaatgctgatggttcgcaaaacttcagtggcgtgtcctgggaatttcgccccggcacgcaggctcagacttatattcagggtattcccggtactgaaaatgaaatcagtgtaggaacggaagtttccagcaagacagcctggacccatacctttactaatacccagctttctgccgttcgtgttcgtctgaaatggccgtccctgatgaaacaggaagatgacggcgacgtggtgggcaataccgtcaagtatgctattgacctgcagaccgacggcggcgcctggcagacggtgctggaaaccgctgtcacgggtaaaaccacctccggttatgagcggagccatcgtattgatctgccccatgccggcagtacctggacgctacgcctgcgtaaaatctctccggatgcaaacagtgtcaaaactggcgacgtgatgacgctgcagagctataccgaagtgattgacgcgaagctgcgttatcccaacaccgcgctgctttatatcgagttcgactccagccagtttaatggctccattccgcaaatttcctgtgagccgcgtgggcgcgtgattcgtgtgccggataactacaatccggaaacccgcgaatataccggggtctggaccggcgggtttaaatgggcctggacggataacccggcctggatctattacgacattgttacagctgaccgttttggtctcggtaatcgtctgagcagcgccaatatttcgaaatggacgctgtaccagattgcacagtactgcgatcagctggttcctgacgggcgtggtggtgacggcatggagccgcgctatacctgtaacgtctatgttcaggaacgcaacgatgcttacaccgtgctgcgagactttgccgccattttccggggcatgacctgctggaacggtgagcagattgttgtgcaggctgatatgccgcgtgatgtcgattttacctatacgcgcgccaatattgtcggcaaaccccgttattcgagcagcagcagccaggttcggtacaccaacgccctggtttcctggtctgatccggataatgcttatgctgatgcgatggagccggcgtttatcccggaactggtttcccgctacagttttaaccagctcgaattgaccgcgattggctgtacgcgccagagcgaagcccaccgtaaggggctgtggggcatactgaccaacaacaaagaccgggtcgttgagtttgatgtggggctggacggtcgcattcctcaacccggttatatcattgccctggcggatgagttgctggccggacgggtcaacggcgggcgaatcagcgcggtgaatggccgggtgattactctggatcgtgatgtggatgccaaacctggcgaccgtctccagctaaacctgccatccggtatctcacagagccggaccattcaggctgttaacggacgccggcagattacggtcacaacggcgtacagtgagacaccagaacgggaatgcgtctgggccgttgaatccgatgacctcttcctgcagcagtaccgggttacaggggtaaaagagaacagcgatgccaccctcacgatcaccggcgtggcacatgacccggataaattcgcccgcatcgataccggcgctattatcgaccagcgcccggttagcgtattgccggcgggcaaccagtcacctcctgacgatattgtcatcacatcccgctcggtcgtgaatcaggggatcagcgtcgaaacgatgcaggttaactggtcagctgtcagcggcgctattgcctacgaggcacagtggcgccgtaacgacgggaactggattaatgtgccgcgcagctcgaccacctcgtttgaggtcagcggcatttatgccggtcgttatctggttcgcgtccgcgcgataaatgcggcggagatctcgagcggctgggcgtattccgaagagaaaaccctgaccggcaaggtcggcgagccgctggcaccgctggcgctggcaacccgttcgctggttcatggagtccaggttagctgggagtttccgaccggctccggggatacgctgcgcacggaactgcagtacagcaaaaaccaggacggcagtgcgccaatgccgttatcagacgtggcctatccggggaaaagctatcagcagatgggcctcagtatgggcgcagaattctggtatcgggcgcgccttgtggatcgtcttggcaatgaaagcccgtggaccggctgggtccaggggatggccagcgataactttgatgactactacgaaaacctgaccgacgcgatcaaggatacggctgcctgggaggaaacgcagcgcaccattagcgaaacacaggaaggtatccgcaatacgcagcaggaactggagcagaccgctgaagctctgcgtaaggaagccgaagaccaggcgaagcaggtcagccaggatattgatgcatcggcgaaaagcatcacggctgatgttgacgggaagatctccgccgtgaataaaactatcacggatgagatcacctcggtcaatgaagctctcgattctggtctggctcaggcaaacaaaggcgttcaggaggcaaaatccgccgtcgcagatgcgaacaagcagatcgcaactgtgaacaagtcgctgaccgacagcatcacccaggtcagacagtcagtcactgatacggctgcagaaatcaacgccaccatcgacctggagattgccagggtcagcaaaacgctggccgacggcgatgccgcattgaatgcgcagataaagactgccgaaaatggcctgaagcagtcgctgtctcaggttaacaccacgctgaccaatgcagtgaagcaggagaccgcggatcgtatcgccgatgttaacgcgaaggcggcacaggccgctgatgaactgctggcggcaacgcaggggattgaggctagtatcgagagcctgactcaggtgatgaagactgccgatgagaatctggcgcgggaaatgtccagcctcgctgccggcgctaatatccagttcgattcgcaggttatctggcatttcaacaatcagacgaccgagggctggaccggcagcgccggcgtaccgggtgtgtcccaggatggctggttacgcccggcggacagtgccaccgatccgtacattacctctcctggcggactggctgtcgatggtgcggcgtaccgcttcatcatgctgcgctttcgtaaaaccggtaaaccagtctgggcgggtgagatccgctgggtgtctgccggcgaaaacttcaataacacgaagcgatacattgttgctgagccggaatatgccgatggggtggcaaccctgacggtgcgtgatattccgtggacagggaacattgatcgtattcgcctggacctgacgaaccagcaggatgccagcaactttatcgaattcgactggatcgccgttggccggccagcacccggcgccagtacggcggctctgcaggatgtgcgcagtacgctgagtaacgcgctgaccgccgaagcacaggcacgcagcacgctggcggcgcagatgcgtggctcctatgatgggagcgatctggagaaagtcacctccgggctgctgtaccaggaaaaaaccgcacgcgttaccgccatctcggcggaagttaaggccagagagtccctgcagacgcagtttaacgacaacaaagctgctgtttctggtgaactgagttctctgacgacagagcagcgcgcgcaggcgagccgtatcggtggcctggaaaccagcctcgggaaaaaagccgatgcagccgcgctgacgtccctgacgcagaaagttgagcaacagggtgccacgctgacatcgcagggcgccgcgttaacatcactcactaaccgggtgggccagacggaaacgggcctggctggtacgaatgaggcgttgagcgggctggagtctacggttacccagcagggcgacaggataaccagccagggtcagtccatcacgaaactgacgagcgatttgggcacgacaaatgccgcgctggcgaagaaagccgaagcggctgcggtcactgccttaacgcagcaggtagagcaaaacggccaggatattcgaagcaatactgacagcatcaccagtctgtcgaatcagctggtcaatggccagccgaatagctggtcccgtcggatctatcctgtgcagctggctaatgccgggacagtcccgtcattcagcgatattcgcgccgtggcgcccgtggtcgtggatgaggtgtccgacgcggccaaactggactttacatccgctggcagctatctgatcgcgctgtattcctgccaggtgaaagtggccgccgataccaccatcacaatggcgcccggtaacaggatttttgatgataccggcgccatatttgtgaatggcgttcaggttgcctgggggaatgccagctggactaccggcagttttgaactgaaagttggctggaataccgttgagtttctggtgaatcagtggaccggccaggcgtatatcaacctgggcctgaagctgtcagacaaggttgctgagatgtactccggtctcggtgtttccgcgctggcaaacgcagccggcgtactcagctcgaatgtcagccagattggcaatgatgtggtcagcaattcgcagagcatcacccagctccggaatgcgctgacgcagacagacgcgaatgtggccagcaaagcggatcagacggcgatgaactcgctaaccggacgcgtggagaagactgagtccggtctgacggcggcgaacagcaacattacgtcgctcagcagctctctgagccagcaatccaaacgcggcgctaatctgcttcctgatggcacttttgaaagctacgcggttggccacaatctggcgaataaccgtgccatcgtgaccactgacgactcgcatggcggcaataaatgcattcgtgtgacgcgtccgaatgactacactaattatatagataacagtgacaaccacatcttcagcggcttccaggttcgcgacaacgcggtattctatgttgagtgctgggttaagctggacgccaagagcacgacgatggatggatcggtgcagattgcggtcggcatgtcgtttcagtatcaggataactcctggcagtggccggcactcattaagtcggcaaaagatctgtccgcagacacctggacgaaagtcagtggctatctgaagagcagcaagagcggtattaagcaggcaatggtgaggatttctattcctaacgttagcagcgttaaggcgggtaactcattcctcattgatgacctggtcattaccgaagtgactgatgcctacaatgcgcaaagtacagcagacgctaatgccaatgcgatttcgacactggactcgaccgtctcccaacagggtgaccagatcaccagtcagggtaacagcatcaccaaactgacaaatgacctggcaacgaccaataacaacgtcagtaaaaaagcggatcagagcgctttaagcgtgttgtccgggcgcgtcgatcaaacagaatcgggcttatcctctgcgaatagcagtatcactgcgcttaattcatctgtacgcgcagggaatgcgacaagtggcgatttgattagcaacccgacatttgacccagagtttagtcagatgggcttcactgtggtttccagctcgtctgagggcgtgccagccaattgcccatacgcttatgttgcacgcattgcggctcgcgaccatcaccccaattttgctgctattccggcgacattgggggatgtctatgaaatgtctgctctcgtcgcgtgtggtaccggctccgctgatttcaacctgtatctcggaaccgcaacaaggccaagcggcagcgtgggcgcgcctctgtcatccggcggcaaccgcaaggcgtcggccacatggcagcgagtaacctggcgattcaaaattactcaggggattgtcgatcgcggcttcttccgtccattcctgcaaattaaccagtccagcccattcggcaccgtatggttcgttacggactggcatatgcgaaatgtgacagcggcgcaaaaggttcaggatactgcggatgccacggcggcggcggttgactccctgaccaccaccgtgactcaacagggtaatctgctgacctcgaccggcaaccggacaacccagctggaaaacgggctggcaaccaccaatgccgcagtggccaaaaaggctgatgcgacagcggtgcagaatttgaccaataccgtcacacagctgggcaatgacctgacggctgcgaacagcgccatcacgaagctgaccggaaatctggcgaataccgataaagcgctggcgcagaaagccgatgcgactgcgctggccacgctcggcacgaaagtgacgcagcagggcaaaacgctggagagccagagcaattcgctgacgaacctgtcgaacagcctctcgcaggtcgcggcagatatcgatgccagcgggcagataccgggtaacctggtcgtgaatccctcgtttgaacgcgggctggatggttacaccgggcggtcaaccgcgaccagtgtggtggaggtttccgttcctcatagcgggacgcgggcgctgaaggttgatccggggaatgtgactccggggcaatacatcccgtttgttcaggggcgaacctatgaaatcggggtatgggttaaggatctcggagcgaccactgataacggagcaggtaacaacaagctgcggatcggcaactccgctggtcagccggtgtttgagcgaccgtacaatagcgggacgatcggttccgactggacgctgatttccggtcgctggaaggccacggagacagccaagctcccggttacgctgagtaacggtttgacagccgggagtcgttgctttgatgatttctatgtcatcgatgtgacagatagtgtcaaaatcgacgccaacgcctccgcattgtcttctctccagaatactgtaacccagcagggtaaagatattgcgtcgcagtccaccagcattacggatctgaaaaacaatctggacacgaccaacgcgaacgtcgcgaaaaaagcggacgccgcagctctccagacactgcaaaatacggttacccagcagggcaaagacattgcttcagcctcaagcagcattacaagcctgcagaacaacctgagcaccaccaatgccaacgttgcaaagaaagctgatgcgacggcgctgaacgctctccagaacaccgtgacgcagcagggtagctccatttcgtctcagggtaacagtatcacccagcttaaaaacgacgttgatagcttgtatattggcgcgagcaaccttcttcgtaactccgataagagcggcgccccggctctgtgtctgtctccgacttccggcttcaccagttatgagctgaaagcgattacgggtctggttggtaaaaatatcgctgttaaaactcagtacacgatgactctttggtttaaagagtacgcggatggcttcggaacaactaagccgttcacttctgcagtcatcggtcgttccgctgtcgggactgactcatggtctctgcgatactattcgcagaacggcatcgttacgcgtgatggtgacttgtacaaatgggttggaacaattacagctgaatctggttcgacgcttttcgtaggcgttgccggattgcgattcctgtttgaagataagtcccagaagaccggttgtcagatctaccaggtgaaactggaagaagggaataagggcacctcgtggtcgccggcttccgaggatctgtctgacgcgatttctggcaatagtcaggcgctgagtagtcttgatagccgtgtgactaaagccgaaggctcaatcacgtctcaaggcaacagcatcacccagcttcagaatgagctgaccgcgacgaatgctaacgttagcaagaaggcggatgcctctgcactggcctcgctgcagaacacagtgactcagcagggcaaggatataacgtcggtgtccagcgatatttctttactgaagaatagtctggcgacaactgatgcaaacgttgctaaaaaagcggactcttctacgctgtcttcgttacagagtacggtgacgcagcagggcaaagatttgagcagcgttggtaatcgcacaacgaacctggaaaacaatctcaagaccacagacgcgaacgtctcgaagaaggcagacgcatctgcggtggattccctccagaatactgtaacccagcagggtaaagatattgcgtcgcagtccaccagcattacggatctgaaaaacaatctggacacgaccaacgcgaacgtcgcgaaaaaagcggacgccgcagctctccagacactgcaaaatacggttacccagcagggcaaagacattgcttcagcctcaagcagcattacaagcctgcagaacaacctgaacacgacaaacagtaatgtcagtaaaaaggctgactcaactgcgctgaacgctctccagaacaccgtgacttctcagggcgacgctctgacgagccagggtaatcgcgtaacgtcgttagaaaatactttaacggtgggcgacaacattgttccaaactccgcaatgttgaataacgctcagggttggggtggtcatgcaacaactgttgacggttatccggctgtgatcgatacagcagcatgggcgccaacttcacctaagttttccgtaacacctggcgacattctagactttagtcttctttgtctggctggtgccgcaatcaacggtctggcatggggtattcgcttcgatggcccgagcctgacgaacaactcggtctacgtggaggcgttaaattatgcagctggcgagaagaaagccgtaactggaaccatcactgtcccggctggcgcgacaactggctatctccaaccttatagcagaaacgccattacgctcacgatctataacattaaggtgacccgcagaaatgccggtactatcgcgaacgccaaggcgatcgctgatctcactaacgaagtgactcagcagggcaaggatataacgtcggcgtccagcaatatttctttactgaagaatagtctggcgacaactgatgcaaacgttgctaaaaaagcggactcttctgcgctgtcttcgttacagagtacggtgaatcagcagggcacttccataagctctatcggtaatcgcaccacatcgctggaaaacgggctgtcgacagctcagaacaacattgccaggaaggctgatgcttctgcattgcaggatctccggaacacggtgacatctcaggggggcgatttaactgcggcgaacagtagcattaccagcctgcaggcctcgatgaaccgtcgcactgtgtttactgtcactgcacgggggattggcaacagcgtaactcctggggtttttgatgaaagcggcaaaaacctgtttacccctggtcgcagctgggcgctggtcacttttgcaaaacaaagcgacggatcagcggtgattgcgacctccaaaacatacgatgtctttggcagcgcgaataatggcgacacgatgtcggctgatatcggggcgttgactagtggcacttacgtttgcgtcctgacattcgatgagccatctggcaaccgaggtaagatattgtctgctctggaatctcttggtggtacatccgaagtcgtcaactccctgccgtatcgtggtgcctatattctccttggccgcaaaggcatgaggtcgggcgatggtctggaactgcgtgcgccaaccggtggagatgccaccgctcacatttcgacctcagtcgaatttgtgaacgggataatgatggggctgggtgcagccggcggtgtgatgatgaaggctgatgcgaacgcgtcggcaattaccacgctccagaacacagtgaagacccaggggggtaatattgactccctgagttcctcgataacggcgctggagaacagcctcaggtcgacaaacgatacggtgagtaaaaaggctgacacgactgcagtgagttcactgactggtcgcgtaagccaggtggaaaacactatcaccagccagtcgcagagtatcacgtcgctgaccagcagcatcaataccatcagtactcagggagctaatccgtgggttgacggtacgttcgaaagctacggagatggtcatgtgctgggcgggggcggcaccgccgttgtggtggcgtctcagaaattcaccggcaataagagcctgcaggtgagtcgaggagcgaacgacaacggcaacagcgataaacagcttgggagctggcagtcagtccgtgaggatgcgaagttccggtttgagttctgggctatgatgccggcggatcaggcgccctcctccgggtggacaacgctggtcggtatccagtcgcagaatgctgccgggcaaaatgcgtggcaggcggcggtcactgtcagcgaagcctctctgggcgcgcgcgataagtgggtgaaattcacgggtatcgccagtaacaacggggcaggcagaacacgcgcggtggtctggatctccactcgtggcgccaccggcaacggtacccctggctattcactgtatatcgacgatctggtcatcacggatgttaccgatgcgaaagcggcacaggatgcctctgacgcgacggcgagcgccgtgagcggcctgacggcgcgcgtaacggatgccgaagggaaaatcactgcccaggcgcagcagcagacagcactggcctcgaaagtggataacgccaactcccgcgtcgataacatggcgaagacgctgagcgacagccagagcacacaggccagcctgaatacctcgcttcagtcgcagattgacgcgcaggcggccgccaacatcaaaaaccagacgacgctggacaacacgattaaatcggtggccagtatcaccagtacccagcagacgcatgcaacggcactggaggcgctggcaacgcagcagacgaccctgacatccagtgtcggggatctcagcgcttccgttcagaacaccgccaaaaccgtggcggatgtgaatggtacggtgagttcgctgtggtcgatgaaggttgagacggttaacgggaagaatgttggcgcggggattacgctgggcagcaatggtgaaacaagcgatatgatcctctacgctgaccgcttctcgctgtttaaccgtaataatgcgacggctgttccggtgatggttgccgaaggcaatgagctgtatatcgatacggcacgtatcaaaaacagttccctgacctcaaccaaaatcgcggacggttccatcacgaacgcgaagatcggccacgagatccgctcgaatgactttgttgacgggtcacgcggctggcgtatcgctaaggatggctcttcgcagttcaacaacgtgatcgttcgcggtgcggtttatgcgactgacggctggttccagggtacggtatatgcgaaccacatcgagggcgacatcgggtcatttgcgatcaacatcgctcagcaccgcacgcgcaaggtgccgaaggctacatggcagtggtttgagctggcccggttccggcggcagaatttcgaccaggtgatcaatattcgcggtggactcctccagacggatagcatcactatcgacggcggcgcgaaactcagagcggggatgtcctacgcgccaggggctgacggcggactgaatcctggctatctgtcgtatgcaatgcttcttcgtggcacaggcgctacgtctggtggcggcagtatggagctaggcattgagcttatgtatgaaacaggtggagcaacacgcctgctgacggcacaaggggagatgaacgtcgacaatatgtcgtttgttgttccagctggcagtggggatgcagttcttcgttatggttgttatcttgaccgtaacggacagatggtattaaccatcctctcaagattcgacgccttcgccgcgcgcaataacaacgtaattcgcggttcatcaacctga

SEQ ID NO: 180663 - DNA, 1482 bp, Klebsiella oxytoca
atggcgatgtatgaagtcggtaccgtcacgggtgccgcgtcgcaggcacgggtgacaggtgcgacaacaaaatggtcacaggaggcgctggggatactgcccgggtcgattctggtggtctaccgcagcggtagtgctgacctgtatgcgatcaaatccgtggacagcgacacacagataacgcttacccgaaacattacgacagcgttctctggggcgtactatggcattatcacgtcagagacagccagcacctccgcatttgcaaaccaactcgccagcgccttttctctgtggcggagcgttgttgaaggatggtcgaccgcgctgacgtcgacaggcaacattacaatgactgaccctattaccggaacgtcagttactgttcctgctattaaggggatggcaaaaatcgccggcggtaataatttcagcggcacgcaaagcctggatagtgacgactccggttttattctcggaaaaaatggcgacataggtcttatcaagaaaagcggaacctatgggaaggttatggtgggaaagtcgtctcgattctcagtcgttcgaagcgataaagaccggatatcggcaactgatgagcagactgaaatttttggcgttgaagctaacggtgacgtcaaagtcgcgaattcactttatgctaaaggtgttctacaaagtgattatcaggttaaagcgcaaagtatcgagctttcatcttccacgccttacatcgattttcaccacaataactcgacggatgattatacacacaggattattactgaggatggtgcccttgcagttatgcccggtctgcgtgtcagaggtgggctgggcatatatggtactagcacaagttacggaggaccctattcggatgggatgattgcaaagttagaaaacgacccacccaatgtgcctgtcggaagcattcttccttctccgcgtttcatcgctcgtttcaacacccgcggttcagactcaaacgtgaacggcgctcaggcttcaatgtggtttgaagagcatgtgggtacgacgcatagacttgtgcttatgtgcgctggatttggtgccaacgtacaatactggcaattcgatgccggcgggaatatcaacagcagtacaaggggtggtgtgcagtttctggggacgtctgacgctcggctgaagcacgatatcacgcctactgatgggcagcagtcagtagaccgcataaaggcgctggagttggtcacgttcgtctataacgatgacgagcagaacaggacacggcgggggattatcgctcagcaggcacagaaagtggacccgcagtacgttaagcaggtgaacacgtcatacatgaggaacggtgagcaggtaaacgacgatcgcctgcaattggataataacgtgatcatgatggacacactggcggcggtaaaagtactgcttgagcgagtagacgaactagaggagcgattatcggcacatggataa

SEQ ID NO: 180664 - DNA, 978 bp, Klebsiella oxytoca
gtgaaacagcgctctattttaaaaaatgcccccaacatcgacagcattatgagcaagacgcaccaggcgcccgcatcacagcctgtgtcaccgatggtgggtgatttgcaacgccagcttagttcattatcgggaaacagtattatgctgcctgtgtgtggacgtaacgttaactttaagctggaaactatcccagcggataaagttgaaatggcgacgatggtttggctcggtaatgaacgtgatcaagacctgctcaacgaaacgtccttggccgatctcgttccgtcattcctcacttcggggcagcagaacccggcgttcgctcgcaaaactgcaggcatcatagaggttgctgatggttcccggcgccgtaaaacggccataattactggctgtgactaccgcgtattagtcggcgatctcgacgatgaacaaatgcagtggttatcgcaagtgggcaacgactatcggccaaccagtgcatatgagcgtggaaaaaaataccagcgccgtcttaacgatttcgatggcaacgtcaaagcattagcggaggccgagggggttgaccgaaatatcattacccgctgtataagtacggcgggcctgcctaaagatatcattgctattttccagcatcctggcgaactatcagcccgcgccggtcacgacttattcaaggtgtaccaagagaataagcaagccatgctagacgccgcacaacagctgctgcgcatgaagaaaaatggtgaaatattcgaaccaacgagaatcatccaagccctgcaggatttcatttcgacaaatgcagctgatacacaaaaaactgagaagcggtatggtgatggggttgttgcgaaatacaaaggtaactacgtcacattaaaattagataaccgaaaaatttctccagacttaatgagtaaaatagaagcattgctccagtctgagttagaaaaaacggaaagtgtaaaataa

SEQ ID NO: 180665 - DNA, 1164 bp, Klebsiella oxytoca
atgtcgcttattaatttactgcatgaatgtatcagccgcgggcaggagatgacgcaggccattgctatagctcaatttggtgatgatagccccgaggctcgccgtatcactcgtcgctgggggataaccgaggttgctgatttaatcggcgtttcgccgcaagcaattagggatgctgaaaaaaatgggcgactaccaccacctgattttgagttacgcggccgcgttgaacgtcgcgccggctataccatcgaccagattagccatatgcgcagcattttcggcaatccgaatcaacggcctgcagacaaaaatccagctgtgttagctgttatgtcgcacaaaggcggcgtttataaaacctcatctgcagtgcatgaagctcaatggttagctctgcaaggtcaccgagtgctactcattgaaggtaacgatccgcaagggaccgcctcgatgtatcacggctatgtaccggatttacatatccatgccgaggatactttgctcccgttttaccttggtgagcgtgataatgcggaatacgctataaaaccgacctgctggccaggtctggacattatccccagctgcctggcgctgcaccgtatcgaaacggatctgatgcaataccatgcccaaggaaaactacctcatcctccgcatctgatgctacgggccgctatcgaatccgtatgggataactatgacatcatcgtcattgatagcgctccaaacttagggacaggtacgattaatgttgtttgcgcagccgatattatcgtcgtggctacccctgcagagctatttgattattcatccgttctgcagttcttcaccatgcttctggaccttcttaaaaccgttgatttaggtggttttgagcctgttgtacggctgttactaactaaatacagtctgaccactggtaaccaatcgcgctggatggaagagcaaatcagaaatacatggggatcgatggtcctgcgtcaggttgtccgagtgacggatgaagtaggaaagggccaaataaaaatgcgcacagtatttgaacaggccgcgaaccagcgttcaacgcttaatgcatggcgaaatgcagtctctatttgggagcctgtttgccaagaaattttcgatgacttgattaaacctcgttgggaggactaa

SEQ ID NO: 180666 - DNA, 1164 bp, Klebsiella oxytoca; identical to SEQ ID NO: 180665

SEQ ID NO: 180667 - DNA, 978 bp, Klebsiella oxytoca; identical to SEQ ID NO: 180664

SEQ ID NO: 180668 - DNA, 1482 bp, Klebsiella oxytoca; identical to SEQ ID NO: 180663

SEQ ID NO: 180669 - DNA, 4755 bp, Klebsiella oxytoca
gtgacgcagcagggtagctccatttcgtctcagggtaacagtatcacccagcttaaaaacgacgttgatagcttgtatattggcgcgagcaaccttcttcgtaactccgataagagcggcgccccggctctgtgtctgtctccgacttccggcttcaccagttatgagctgaaagcgattacgggtctggttggtaaaaatatcgctgttaaaactcagtacacgatgactctttggtttaaagagtacgcggatggcttcggaacaactaagccgttcacttctgcagtcatcggtcgttccgctgtcgggactgactcatggtctctgcgatactattcgcagaacggcatcgttacgcgtgatggtgacttgtacaaatgggttggaacaattacagctgaatctggttcgacgcttttcgtaggcgttgccggattgcgattcctgtttgaagataagtcccagaagaccggttgtcagatctaccaggtgaaactggaagaagggaataagggcacctcgtggtcgccggcttccgaggatctgtctgacgcgatttctggcaatagtcaggcgctgagtagtcttgatagccgtgtgactaaagccgaaggctcaatcacgtctcaaggcaacagcatcacccagcttcagaatgagctgaccgcgacgaatgctaacgttagcaagaaggcggatgcctctgcactggcctcgctgcagaacacagtgactcagcagggcaaggatataacgtcggtgtccagcgatatttctttactgaagaatagtctggcgacaactgatgcaaacgttgctaaaaaagcggactcttctacgctgtcttcgttacagagtacggtgacgcagcagggcaaagatttgagcagcgttggtaatcgcacaacgaacctggaaaacaatctcaagaccacagacgcgaacgtctcgaagaaggcagacgcatctgcggtggattccctccagaatactgtaacccagcagggtaaagatattgcgtcgcagtccaccagcattacggatctgaaaaacaatctggacacgaccaacgcgaacgtcgcgaaaaaagcggacgccgcagctctccagacactgcaaaatacggttacccagcagggcaaagacattgcttcagcctcaagcagcattacaagcctgcagaacaacctgaacacgacaaacagtaatgtcagtaaaaaggctgactcaactgcgctgaacgctctccagaacaccgtgacttctcagggcgacgctctgacgagccagggtaatcgcgtaacgtcgttagaaaatactttaacggtgggcgacaacattgttccaaactccgcaatgttgaataacgctcagggttggggtggtcatgcaacaactgttgacggttatccggctgtgatcgatacagcagcatgggcgccaacttcacctaagttttccgtaacacctggcgacattctagactttagtcttctttgtctggctggtgccgcaatcaacggtctggcatggggtattcgcttcgatggcccgagcctgacgaacaactcggtctacgtggaggcgttaaattatgcagctggcgagaagaaagccgtaactggaaccatcactgtcccggctggcgcgacaactggctatctccaaccttatagcagaaacgccattacgctcacgatctataacattaaggtgacccgcagaaatgccggtactatcgcgaacgccaaggcgatcgctgatctcactaacgaagtgactcagcagggcaaggatataacgtcggcgtccagcaatatttctttactgaagaatagtctggcgacaactgatgcaaacgttgctaaaaaagcggactcttctgcgctgtcttcgttacagagtacggtgaatcagcagggcacttccataagctctatcggtaatcgcaccacatcgctggaaaacgggctgtcgacagctcagaacaacattgccaggaaggctgatgcttctgcattgcaggatctccggaacacggtgacatctcaggggggcgatttaactgcggcgaacagtagcattaccagcctgcaggcctcgatgaaccgtcgcactgtgtttactgtcactgcacgggggattggcaacagcgtaactcctggggtttttgatgaaagcggcaaaaacctgtttacccctggtcgcagctgggcgctggtcacttttgcaaaacaaagcgacggatcagcggtgattgcgacctccaaaacatacgatgtctttggcagcgcgaataatggcgacacgatgtcggctgatatcggggcgttgactagtggcacttacgtttgcgtcctgacattcgatgagccatctggcaaccgaggtaagatattgtctgctctggaatctcttggtggtacatccgaagtcgtcaactccctgccgtatcgtggtgcctatattctccttggccgcaaaggcatgaggtcgggcgatggtctggaactgcgtgcgccaaccggtggagatgccaccgctcacatttcgacctcagtcgaatttgtgaacgggataatgatggggctgggtgcagccggcggtgtgatgatgaaggctgatgcgaacgcgtcggcaattaccacgctccagaacacagtgaagacccaggggggtaatattgactccctgagttcctcgataacggcgctggagaacagcctcaggtcgacaaacgatacggtgagtaaaaaggctgacacgactgcagtgagttcactgactggtcgcgtaagccaggtggaaaacactatcaccagccagtcgcagagtatcacgtcgctgaccagcagcatcaataccatcagtactcagggagctaatccgtgggttgacggtacgttcgaaagctacggagatggtcatgtgctgggcgggggcggcaccgccgttgtggtggcgtctcagaaattcaccggcaataagagcctgcaggtgagtcgaggagcgaacgacaacggcaacagcgataaacagcttgggagctggcagtcagtccgtgaggatgcgaagttccggtttgagttctgggctatgatgccggcggatcaggcgccctcctccgggtggacaacgctggtcggtatccagtcgcagaatgctgccgggcaaaatgcgtggcaggcggcggtcactgtcagcgaagcctctctgggcgcgcgcgataagtgggtgaaattcacgggtatcgccagtaacaacggggcaggcagaacacgcgcggtggtctggatctccactcgtggcgccaccggcaacggtacccctggctattcactgtatatcgacgatctggtcatcacggatgttaccgatgcgaaagcggcacaggatgcctctgacgcgacggcgagcgccgtgagcggcctgacggcgcgcgtaacggatgccgaagggaaaatcactgcccaggcgcagcagcagacagcactggcctcgaaagtggataacgccaactcccgcgtcgataacatggcgaagacgctgagcgacagccagagcacacaggccagcctgaatacctcgcttcagtcgcagattgacgcgcaggcggccgccaacatcaaaaaccagacgacgctggacaacacgattaaatcggtggccagtatcaccagtacccagcagacgcatgcaacggcactggaggcgctggcaacgcagcagacgaccctgacatccagtgtcggggatctcagcgcttccgttcagaacaccgccaaaaccgtggcggatgtgaatggtacggtgagttcgctgtggtcgatgaaggttgagacggttaacgggaagaatgttggcgcggggattacgctgggcagcaatggtgaaacaagcgatatgatcctctacgctgaccgcttctcgctgtttaaccgtaataatgcgacggctgttccggtgatggttgccgaaggcaatgagctgtatatcgatacggcacgtatcaaaaacagttccctgacctcaaccaaaatcgcggacggttccatcacgaacgcgaagatcggccacgagatccgctcgaatgactttgttgacgggtcacgcggctggcgtatcgctaaggatggctcttcgcagttcaacaacgtgatcgttcgcggtgcggtttatgcgactgacggctggttccagggtacggtatatgcgaaccacatcgagggcgacatcgggtcatttgcgatcaacatcgctcagcaccgcacgcgcaaggtgccgaaggctacatggcagtggtttgagctggcccggttccggcggcagaatttcgaccaggtgatcaatattcgcggtggactcctccagacggatagcatcactatcgacggcggcgcgaaactcagagcggggatgtcctacgcgccaggggctgacggcggactgaatcctggctatctgtcgtatgcaatgcttcttcgtggcacaggcgctacgtctggtggcggcagtatggagctaggcattgagcttatgtatgaaacaggtggagcaacacgcctgctgacggcacaaggggagatgaacgtcgacaatatgtcgtttgttgttccagctggcagtggggatgcagttcttcgttatggttgttatcttgaccgtaacggacagatggtattaaccatcctctcaagattcgacgccttcgccgcgcgcaataacaacgtaattcgcggttcatcaacctga

SEQ ID NO: 180670 - DNA, 300 bp, Klebsiella oxytoca
atggcgacccttaaagaattaatggccaaacagagcccggaaagccaggcgcgtattgctgaaaaagtcgaggagatgcgccaggctatcgctttaagtatgttaagggaagaactcaatatgtctcaggcagagctggctaaggcaatgggcgttaaacaacccaccatagcaaaaatggaacaggctgataacgacccgcgtttgtcaacgctgaagcgctatgttgcagcgctcgggggggaactcagtattgatgttaagctgccaaccggtaagcgaatcgcattccatctttaa

SEQ ID NO: 180671 - DNA, 342 bp, Klebsiella oxytoca
atgtgggatgttgaaacaacggaggtttttgacaagtggtttgaggcgcagaccgaagcgctcaaagaggatatgctcgccgcaatggtgatcttatccgagtatggcccccggttgggaaggccgtttgcggatacagtaaacgattctgccttttcgaatatgaaagagctgcgcattcagcatcaaggtagacccatccgagctttctttgtatttgacccttctcgttgtggcatcgtgttatgcgccggagataaaacagggttaaatgaaaagagattctataaagatatgatcaagcttgcagatgctgagtaccgtaagcaccttaatcagtaa

SEQ ID NO: 180672 - DNA, 549 bp, Klebsiella oxytoca
atgctgattggttatgccagggtctcaacagtggaccaaaacctcgatttacagaaaaatgcgctgatccgcgcagaatgtgagctgatttttgaagataaatcgagcggtaaaaacacgaagcggccaggtttaaagaaggccctaaagcgcctcaaaaaaggggatacgctggttgtttggaagctggatcgattaggtcgacgaatgtgggatttgattaagctggtgggggagctgcaggagaaggggatttattttcgtagtctcacagacagttttgataccggaacgcctgctggccggtttgtcttccatgttatgggagcactggctgaaatggagagagagctaaacatcgaacgtactcgcgcaggtctggccgcagctcgcgaacgtggaaggattggcggtcgtcgtaaaatcatgacccgcgctatcatcaatcgggcggaagaaatgttaatcgctggcgcgacccggcagcaggtggccgatgtgatcggggtaggggtgaagactatttataaatattttccggtcggctaa

SEQ ID NO: 180673 - DNA, 1176 bp, Klebsiella oxytoca
atgcttacaacactcatatacagaagccacgttcgttcaggaacctcataccaggcaatagttgatatggttaaaagcgctaatgaccgcaacgtgcagatgggcgtcactggtgtgttactttttaatggaatccattttttccaactgcttgaaggccgcgaagaatcagtcaaagaagtttttgacagtatcagttgcgacaaacgtcattttaatattgttgaacttttttgcgactttgctccttttcgacgttttggtaatgcaggcatggagctaattgatatcagactccatgcgcaagatgagtgcctcgcatctgtccttgaacgtggtacaacaaagcataagcttatgtacaatgatcgggcgctgcgatttttccgcacgttcatcgaatcgactgaaacagaaaattattatgagttacctgacaagtctgaatggtattttatttccgaaactgtagggttaaaatctgtaacagatcccagtttaattgagataaaacctgtcgtggatcccctcgctcaacatgtacattcatttgagttaataccgaatgtacagtcgcaaaacagtgaggagctttttttggcagacataacctcaaaacgagacgccttttactttgccggaaaatttatactcgcggaacaaaggatatcagttagccttcaacctatgacgcttattgaagtgccaaggtctgttgaaacactccttgattatgttaaatccagtaatcttctccctgagcaacttatcattcagttctcagaaagagcaataattggtgatatgagtaagtttactcagtctgtcaaaaaacttaaaagcgctgggatcagtgttgctatcagcgactttggagcaggttatgctggcttgtcgcttctcgccaatttccagccggaaaaagtaaaaatccaccatgatttaacaagaaatattcacaaagatggttcccgtcaggcaattgtgcaaagcattattcattgctgtgaaaagctcgaaatcagggtttgtgcaacaggtatagagcaaccggaggaatggatgtggctcgaatcagcaggcatatcctgtttccaagggaatcttttctcaggttacgatgagaacaatcaattacatgtcacttggcctaatctcttcagcgatagtaattag

SEQ ID NO: 180674 - DNA, 174 bp, Klebsiella oxytoca
atgtgcggacgctttgctcaatcacaaacccgtgaagaatatctggcctatcttgccgaagaggccgagcgggatatcgcctttgatcccgagccaataggacgctacaacgtcgcaccaggtaccccgtctcccgcgcggtgggtaacgttaagaatcaggggccggaattga

SEQ ID NO: 180675 - DNA, 186 bp, Klebsiella oxytoca
atgctggcggatgacggctaccagtggtttgttgagcagggtggtttaacccgtgaaaacggccagcgcttccgcgaagcgattttgtctcgcggcaatagtactgatttagctgaactttatcgccagtggcgcggacacgatccgcagattgagccgatgctggaaaaccgcgggctgagttag

SEQ ID NO: 180676 - DNA, 435 bp, Klebsiella oxytoca
atgatgatattaaaagataaagagtacgtggactcggttgactggcagacggtggcggagattatcgccgccgcaggtctcaatcagcgggacgtcgcgctggtggagcgcgcgtttcgccatagtaccttttgctggtttggctatgaaaacgggcagcttattgccgttgcccgggcgattagcgacctgacctggtgcagctatctggcagatgtcgcggtgcacccgcgctgtcagggaaaggggtacgggcagcagctgatgcaatcggttagcgatcggctgcggccgttcggcaaaaccttcatctactcggtggtggataaagtcggcttttatcgccgctttggttttgaaacgctgaccacgggcatggtctgcgccagcgaagaggcgatagcgcgtatgcgcgagcagggatttgttggctag

SEQ ID NO: 180677 - DNA, 903 bp, Klebsiella oxytoca
atgagaggaaaaatccccaaaactgaattactggtgacctttgaggttgtggctcgccacgaaagttatactcgagcagcggaagagttggctttaacacaaagcgccgtgttccgacaggtcacggcgctggaggatttcctccatacgtcattatttaatcatgctaaaaaaaggatttttttaaatgcggctggcaagcattatttgactatcgttaaggaaacgcttaacaaactggaacgtgataccaactccattatgacatggcaaccgacggtgcaggtgcttgagctggccgtcaatcctacctttagcacccactggctgatccccaacctgcgcgagtttaataaattacatccgggcattatcgttaatattcattcgctggctaatattggcgattttcttagccgcgagtacgatgccgccattatgcgcgaggatttttgctcgccgtgggcggaggttgagtatctgttcgaagaggaaattctgccggtgtgcggctgcgggctgctgtccgaacccgggcagaagctggcggtcgaggagctgctgggcgagtttccgctgctgcatcaaagcacgcgaattcacggctggcaggagtggtttgcgctgtcgaatatcaccagcccgcagatcaacatcggtccgcgttttgacctgctctcaatgctgattgcggcggtgcgttcgaacctgggggtggcgctgctgccgcgttttgccattcagcatgacctggatagcggtgagatggtgatcccctgcgatgtgccgattcgcaccggcaaccgcttcattatgacgtggcaggaggataaagcggaatcccgacatttacaggtattccgcgagtggctgctgcaaaaatcggtggtctcggcagcctga

SEQ ID NO: 180678 - DNA, 432 bp, Klebsiella oxytoca
atggataagattatttacaagatttccgatgtgaaaccactgcggtttaactctcagctagaaaggaaagagtgggttcttgctcatacccttattcttccgagaaaggaaaaatttaaagaaactcttctgcaaaatgtttattatgatttgctgagaacctattcaaatgagctggataaagaggccactctgcttgttgtttttggtttttcatttgctgatgaacatcttgaaacgctaacaaagaaagcacttcgtaatgctactctcaaactactaatatttgcttttgacgaggcaggtgttaatgggtttatggataagtttcgtgattattccaacgtggaagtaatcttccggccgggaggaaatatagatttcccggtaatgaataacattatcacaagttatcttggaggggcgaggtga

SEQ ID NO: 180679 - DNA, 1851 bp, Klebsiella oxytoca
gtgaacgggcattttacggatgaggaagcggtattacgggtaggcgaagtctgcgaagtagctgggcgagcagtaattatcctcgtagataaaaacaaaaatcttagcgatttattttatcaaggaaaagttctgagaaatgtttccgtaggaagttttattgaaatcaagaaaggatttatgagcctgattggcaaagtggaatcagagagactcatcgaagaaaaacatccttctggcagtggcagcgatgcttggcgttatcgtcgctacttgacggccacgttaacgggatatatcgaccgaacgagaggtttcgttagcgggtcgcgtgagctacccctcataggtaatgaggcctttgttgttactgaagagatggtacagacggtacaccagatcgcgaaagagggcgaaacggtgatgtctttcactcgaacagatctcgaagatatagaaatctcgttaccagtcaatggtctcataaattctcatattgcaatttttggcaacaccggcagtgggaaatccaatacacttgcagcactttataaagctggaattgctcagataaaaccgatgctgggtgacagttttaatgaaaagtgccgatttattctcttcgattttaatggcgaatatacaacacaaaattgtattactgatgagaaaacggtttataacctgaacacacaccatgctaatggcaataagcttccacttcctaaagaagtactacttgaacatgatatgctttctgttctgacagatgcgacggataagacccaaaaacctttcttaaaacgtgttttggaatttcagtccgaagttatgggatctgataatgctcttgaatacatgaggaatgtgctaaagaaaaaaataaaacagaacttgtttagtggtgataagataaaaagtgaagcaataaatgcaatgtttagtccgatcttctgtgacgatccagagctattatctgatcttgagtttcactcaggaggctcaaaatggaaaataagaaacgaacggcactattttaactctgaagtcgatgtggaaagatcttatatctacgctaaagcctgctcttttaattttaaagaagatatgatagaaagtctcttggattttatgtggcttaagcttatatatgaatttttctccaataaatcgaatccggaacatgtctcgcctgtaataaatagaatgaattcaaaccggaaagatatagctaaaatatttgatacatctggagatagagacttctggaatggaggtaatttcatcgttatcaacctcaatatggttaatattacaatgaagaaaacactccctcttttgattgcaaaatgggcttataacttgaaaaaaatgtccaccgagccttcaacgcttcatatcattattgatgaagctcataacatcctctcaaacacgtcatttagagaaagtgaaagctggaaagattataggctcgaaacttttgaagagattatcaaagagggacgtaaatttggcgtatttgtaacaatttccagccagcgcccgaacgatatatcatcaactatcatttctcaagcacacaactattttattcatcgtcttattaatcagaatgatctttatgcaattgaaaagtctgtttcttatattgatcggttgacagaggagtccattccgacactttccacaggaacctgcatattcagtggtattgttagcccaatgccgctgaaactgagagtggcggaacttcccaacaaccagaaacctcgaagtaaaactataacattcggcgagttgatcgacagagagcaagggaatgatatagaaggtaacttaatattataa

SEQ ID NO: 180680 - DNA, 351 bp, Klebsiella oxytoca
atgtcattaacacccttacagctttttaaaaatctgtccgatgaaacccgtctgggtattgtgctgctgcttaaagagatgggggagctgtgcgtgtgcgatctctgcgcggcgttggatcagtcgcagcccaaaatctcccgtcaccttgctatgctgcgggaaagcggattgttgctggatcgcaagcagggtaagtgggtgcactatcgcttatcaccgcatatgcctgcatgggcggcacaggtaatagagcaggcctggttaagccaacaggagatcgtacaggccatcgcccgcaagctggcatcagcaaactgttctggaagcggtaaagcgttctgcctttaa

SEQ ID NO: 180681 - DNA, 573 bp, Klebsiella oxytoca
atggcggcaatatcgaccggtaccattaccgacgcatattcggtgaatcccagcccaaagaaatccgccgagacgatgttcaccagattcgacacaataagcggcaggctggcagtatcggcaataaacccggcagccatcacaaaggccagcgtcgtacccttgctgaatcctagtgccagcagcatggcaatcacgatgggcgtcaatattaatgccgcaccatcgttggcaaacaacgccgccaccgctgcgccgagcagaatgatatacgtaaacagcaaacggccacgaccgtttccccaacgagatacgtgcagcgcagcccattcaaaaaagccggactcatcgagcagcaggctgataataatcaccgcaataaaggtcgccgtcgcgttccagacgatattccacaccaccggaatatcacctacatgtacgacgccagcaattaaagccagtaccgcgcccagcgtcgcgctccagccgatgcctaatcccttcggctgccagataaccagaacaatggtcaggacaaaaatagcacctgccagtagcataccccctccctga

SEQ ID NO: 180682 - DNA, 294 bp, Klebsiella oxytoca
atgccagccgcaaacagtatggcgatgaaacgcgaaaccctgaatttgcgcatcaaacccgctgagcgcgatcttatcgatcgggcagcgaaagccagagggaaaaaccgcacagattttgtgctagaagctgcccgcgctgctgccgaggaagcgttgatcgagcagcgcatcattatggccgatccgcaggcttatcaggaatttcttgcccgtctggatcaggctcctgcgcccaatgccgcactgcgtaaaactatgcagacccctgcgccgtgggagcaggaaaaatga

SEQ ID NO: 180683 - DNA, 489 bp, Klebsiella oxytoca
atgatctccacaccagagccgcttcatgccgggcacattctaaccccgttctgctgcggcgtggattctatggataactggctgaaacagcgggcgatgaagaaccagctttctggcgcgtcccgtacgtttgtctgctgccacgatgctaaggtgatggcttactactcgctggcgtccagcgcggtaacgacaaacaccgcccccggccgctttcgtcgcaatatgcccgatccgatcccggttgtagtgctgggacgtctggcggtggatcggtcgctacatggacaaggcgttgggcgggcgctggtgagggatgccggactgcgggtgattcaggtggcggaaactatcggtattcgcgggatgctggttcacgccctgtcggatgaagcgcgggagttttacctgcgggtggggtttgagccgtcgccgatggatccgatgatgttgatggtgacgttgggggatttggtggagagtatttag

SEQ ID NO: 180684 - DNA, 699 bp, Klebsiella oxytoca
atgctgtatcgggttgatgaaatactgggatatttgaatcgttgtgagcgcattacatcaaatcaggccgatccattagagcttctagctaaaaaactttctttacgtgggttgatcgttagttctattttcctactgctaatgttactccctcttgggatctacgcattttttcctgagaagctattcatcttagtgagtaaatttttattcattttgatgatgttgagtggaatatttactttattagttgagccagcattgatgttattaggtctatttaaatggaaaacaatgactttgactcgttttctgaaggaagttcaggaagatgaagggcatgtagcagcattgagccgctatgatgaaaatgaactcaagtacgcagaacttcaactgataaaaaaaattaccgccaatgaaaatcgcgttaaagctttctttggtgagaaaacagcagtatttgcgttactggcattttcggttccgtttatgaaagaattttttggatgggatattaatttttcgttttttctctggggggacggtttttctggctatgctgataccttgctagggtttgtctgggcattaatttttggcatgtctcttggcgcaattgctttaaaattagtgactgaacggtataaataccagttatctctactaaagcagacgctctggattagaactctttag

SEQ ID NO: 180685 - DNA, 1701 bp, Klebsiella oxytoca
atgaaggtattaatttctcaatatattcgaacattgaaagagagaaatgaactcgacagactattgcctaatttattattatcaatggatatcgttcctctatttactacgcaaacgggcacaagacaatatggtgtcgatattgctgcaataggtaaagatcctgacgatggagaaaaaaaactatttatatttgtaattaaacaaaaagatctaggtagatctgaatgggattctggaccacaatccataagacagagtttaaatgaagtttttgatgtttaccttaggaagcatttacaaccaaaacacaaaaagttaccaaagaaaatcatattatccaccagcggtgatatgaaagaagaaataaatcaaaactgggccggatatcttgatgttcataaatcctatgagtttgatttctggggagcagacaaactttccacttttattgaacaatacatgttaaatgaacatatatttaacgacattgacagaaccgacttaagaaaatctctatcattgattagtgaaaatgattattcacggattgattttcatcgattattactccgaacactaatgcttgataatgaaggaaaaaaaattaaagaaatcaagaaagcagaactggagaagtcaatccgcacctgctatctcgcaactaatatattagcttactgggcgatacaggatggcaacaccaagcaagctttatttgtatccgaacgatgcttgctatgggtatggcaccggatcaatcttgaaaaagatccaaaaaaatacttctctgcttttgaagttatatggcaaggttatattaacatttctgctgaatatttttccaagcttcagccgtattttcatgaaaaatatcttgtttctttatactcaactgaaagttcactggtcaatataactgtatttgaacatattggtatacttgcaactctcggattaaataattttctcctcgcacttagaaaagataataatgatggagtacttcacattcataatgcagatatcgttgctgatagcttgtgtgcattaatcataaacaatcccgcatctggttcaccacgtcttgatgagaatgtcattgaaattactctaggattaatatttctttctctgatggggagaaaggatattatcgaaaagtggcttagagaactaattttgaggctggactatgtattcagaattggacgagaacatcccatatcaacagactctattgacgatctcatcagtatggaatgcaatagcgacgatacatatttaaaagaaaaaacaacaagcatgtcctggatgattcccaccttaatgggatggtgtgtaatactggaaaaagaagaaggatatcgcgcattattaacaggtataaaagaatcatatactaaagtatgctctcagctatggtatccaacgaatgatctttataaacatctttactttcatccagcacaatccttcactggtgaaactgaggcaccaataacattccctgataatatgagtgattataaaaacagaatggatgagctacgggaaaatgaacgatataatattttcaaagattcaagtgcggtacaggcaggtttaactatactcgatttcattgcctgccgacattttagaacacctgtaccctctgttctttggtatggaatgcaaaaaaaacagagtgataactga

SEQ ID NO: 180686 - DNA, 1911 bp, Klebsiella oxytoca
atgaaggataatattgttcaaaatatcgctcataagctttttttagcaagatcctatgtgctggagcatgaactcactggacaggaactttcttttttactgaaagagaaatcagaaggctattgtttaaagggcgataaattaatcttttcatcttatgaagatagagatcattatgttgtccgtcattatttttcagaaacagacagtgattgcgccgatgcggagaaaaccataatacaaactgcttttagcatatgggaaaagtctttgcgcggcgattgttcaaccgctggcttatttctcagcttatatgaagataagatcaacgtatggcaggtgctgctcgcatctaaacgtaaccaatatgaggttacatctctggccgatcaattcataaagcattccagaaatatagatataaacaccctgtttaatttcttctccgtcatttacaaaaaacacaaccaatatgttggtacatttacattattaggagaacgactgactaataaccctcaaaaatgttatgagataattaataaatttcattcagatataaaactagaaactcttcacctctataacattgccttattttcactaaaaaaagaaaactatgcatcggctattgatattttgctcgatgatatagaaaaaaatgacgtcattttgtctcctcaagcactgtggatacttggcagatttgtagaaataaataatatggaatatcgtaacgatgaaataaaattaatcatcaaaaataagattgcttctccggttacagatatttccaatgctgctatacaagcaaccgtaaacacaatagataaaatacctgatttttgtcaaattatccataagttacttaaggataatcatataaaaacaataacattactttgccaaagaatagcaatggctaaaaacttacaatatcacgctgactttcctgactggataaataccatctgtattaactcaggagatgatgtcgaactcagaggactagtttttcatattttatcatcactcactgaagatgaaaccaaacatcagctagtgattagttgtctgtttgtaatgataaaaaatagttctatagtgataaaacctcaggaaataaagagctttttatataatgctacaaaatctagtgagttaataaataaaatttttacattagcacttattgataacattccagaaatcgccgagttttcacgattactatccacacatttaatggttaatgatagcagtcatttattaagttatagccttccaattattaacaattttacagaaagagatttcatttttctggtacgaagaactctggggtttatcgttaatgaaaaacatttaatgtcgtcgatattatcattactgaatgttgataacgcaaataaaagaaccgataatcttgtattatctgttatatcaaatgaaattgccatagactatccaaattatgtaattgatgtaataagcgaatgcaaaaataaaatcgtgaataagaaaaaccataaatttaaaatatatgatgatatacttacccatacggaagactatctgaattctctaaaaaaatacccacaaagaaaagaattcgaaccgccttcagcgtatgtactgtcctttcaaaaagaacgggataaagtcatggctaaaaatcaagagatcagcaatgaggattcatttttatctaaaatagccacccgcattccactaaaagcaggaatagcctctttccattacaatgatcgctttaataccgggtatagtgaaccgtcgtaccttcatccattttcgagtagctattctctcccacgaaggcatgttatggacaatgttggctatgaaatacgtacggtaatgttcaagacagcaaaaaaggatacaatatga

SEQ ID NO: 180687 - DNA, 132 bp, Klebsiella oxytoca
atgcctgtgagttttaactctatgctttataccagaaaaatgagtctggccagccttatcaaatcaatatctgtgctttttaccataagcatggatatgttttgcgtactgtggaagaggatcgatacctag

SEQ ID NO: 180688 - DNA, 462 bp, Klebsiella oxytoca
atggctactaccctcatccagacacacccgttactttccgttcacttcaatgccgctacggacttcaccgtccttgccgatcactgcgaaaatttcgccgaaaccctgatagaaaacgacgatcccacgctcaaaatggcgctttgcggcaggctcaacgccgctctgacattgctccagcctacgctgttagaacccgtcccgccccatcttgttgaaagcctgaccgtcgatactctcccggcgaattcccccgagtttggaccggaatgcaccgagctttgtcgctactgcctcgccctgacgcagacgctggcggagcagggattttcttctgaaaaggagaaacagttgagttacttgctgtacgacctgatcaactacttcgcggcggaaatgaaagccccgcgctggctgcgcaccgtcgacggcgtgaagtttattgatggggaggcggcatga

SEQ ID NO: 180689 - DNA, 213 bp, Klebsiella oxytoca
atgagcatgatgaaaccggaatggcattccgcagatattatcgcggcgctgaaaaagcgtggaacgtcgctttcagccgtttcccgcaaatccgggctggcgtcctccacgctgacaaacgcgctgataaggcactggcccaaaggcgaaaggctgatcgccgaagcgctgggcgttgcgccagagaaaatctggccttcctgttataactag

SEQ ID NO: 180690 - DNA, 924 bp, Klebsiella oxytoca; identical to SEQ ID NO: 111886

SEQ ID NO: 180691 - DNA, 360 bp, Klebsiella oxytoca; identical to SEQ ID NO: 111885

SEQ ID NO: 180692 - DNA, 255 bp, Klebsiella oxytoca
gtgtcttctgcgctttccccctccaaccccactaggacaacttcccgctggggcttgtacgtcagcattgtgctgattggcgcgaatctgcgcgcccccattacgagcctcgggccggttcttcccgatattcaacgcgccttacacctcggaggtcttggggcggaagcagctggcaccgacggcaaacatctccaattcaatgcgcagctggcgacaaaccatttccatcaattagggctggccgccttgtga

SEQ ID NO: 180693 - DNA, 1734 bp, Klebsiella oxytoca
atgtcagcagtcctatttccggcgccgctgctctcggtcgagcgcctgtcgatccagtttggtacacagcgggtggtggatgacgtcagctttgcgctctggccgggaaaaactctgtgcattgccggcgagtcgggcagcggtaaatcgctgacttcgctggcgatcatgggtttgcttccggaggaggcacagattccaggcggcgcgattatttttgataaccaggatttgctcagcctgccggagcggcaaatgcagttgctgcgcggcaagtcggttgccatgatttttcaggaaccgatgacctcgctcaatccgctgatgacggtgggccagcagctggaagagacgctgcaacgccacgaagtgctgggccgccgtgaacggcgcagccgggtcagcacgatgctggacgcggtcaaaatcagtcatgtggagaagcgcctgcaacagtatccgcacgagctttccggcggtatgcgccagcgggtgatgatcgccatggcaatgctgtgccagccacaggtgctgattgccgatgagccgaccacggccctcgacgtcactattcaggcgcagatcctcgagttgatgcgcgaactgcagcaggcgttttccaccagcctgctgttgatcacccacgatatgggagtggtggcagaaatggccgatgatgtgctggttatgagtcacggcaaaatcatggagcaggctccggcaaaaacgctgtttacctcgccgcaggcggcttatacccgccagctgttgcaggcggtaccggtgctgggccaggcgcccgcgctggcgccggtcgaggcgacgcgaccgttgctcagcgtccgcgacctcagcgtgcgctttccggtgcgcggcgacggcctgcgcgtgcgtcgcgaagtccatgccgtcgatggcgtcagcttcgatcttttccccggcgagacgttgggcatcgtcggtgaaagcggctgcggtaaatcgacgacggcaaaagctctgatgaatatggtgccatttagcggcagcgcgcagcttaacggacaggagctgcacggcctgaaggacgaggcgttaagagcggtacgccgcgatttgcagatggtgtttcaggatccctgggcggcgctcaatccgcgcaaaactattttcgacctggttggggagccgctgctgattcatgagcagatgcccgcagtacagcgcacggagcgggtggcgcagctattgcagcaggtcggcctgccagcggaagcgatgcggcgttatccgcaccagttttccggcggccagcgccagcgcatttgcattgcccgcgcgctggcgctgaacccgaaagtgatcatcgccgatgaatcggtttccgcgctggatgtttcagtacaggcgcaggtgctgacgctgctggaagatttgcgtcagcgctatcggctcagctatctgtttatttcccatgatatggcggtggtggagcgcatctgccaccgggtagcggtgatgtttggcggccagctcgtggagatcggcccacgagatcgagtgttgcaccatccgcagcatccttatactcagcacttgctcagcgccgttcctatacctgacgttcagcaaagacggcaaccccgagccaccagcgcaatgccgataagaccagaaccgatcaaacccatcggctatcagagagtaccgcagcgctttaccgattttggcgacgggcacctcgtcgcctgctga

SEQ ID NO: 180694 - DNA, 948 bp, Klebsiella oxytoca
atgtgccaaaattgtctggtgaagaccattcatcatgctcaacatcatttcggctgggataacagcctgagcccggtcctgcacgtagcttccggcagccaactggagtttcactgcctggatgcggctaacggctggttcaacgccggttctaccgcagcggatatcccaacgctgccgtttgataagctcaacccggtcagtggcccggtctatgtggaaggcgctcagccgggcgatgcgctaaaggtgacgctggaatcctttcgtcccagcggctttggctggactgcgaatatcccgggcttcggcctgctggccgatcagttttctgatccggcgctgacgctgtggcaatatgaccgccagggcttaaccccctgcgcctttggccgatatggccgcgtaccgctgaaacccttcgccggtaccctcggcgtcgctcccgctgccgcgggccatcattcggtggtgccgccgcgccgcgtgggcggcaatctggatattcgcgatctggccgctggctgcacattatggctaccggtggaagtagaaggcgcgttgttttctattggtgacacccacgccgcgcagggcgatggtgaagtctgcggcacggcgattgaaagcgcgatggacgtggtggtgaagctggaagtggttaaagatatgccgctgaaaacgccgcgtttcgccacccctggcccagtgacccaacatctggatcggcacggctacagcgccttcaccggcattggccctgacctgatgaccgccgcccgcgacgcggtaagctataccatcgatgcgctgtgccgcgaacaagggatgtcggcggaagaggcctatatgctctgctccgtgtgcggcgatctgcgcatcagcgaaatcgtcgatcggcctaactgggtggtgtcgttctattttcccaacagcgtgtttaattag

SEQ ID NO: 180695 - DNA, 1608 bp, Klebsiella oxytoca
atgatgaaaaatgcgttattgacaatggcggtggccgcggcctgtttctcttatggcgcgcaggctgacgagaagaccggcggcgatatcgtggtgacctaccagaacgacgtggcgaccctcgatccggccattggctatgactggcaaaactggtcgatgatcaaaagcctgttcgacggcctgatggactatcgtcccggcaccaccgagttggtgaacgacctggcggagagctacgccatttccgaggacggcaaggtctacacctttgtgctacgcaaaggggtgaaattccacaacggccgcgaggtcacggcggcggacgtgaaatattctctggaacgcacagtcaacccgaaaacccaaagtccgggcgccgggttcttcagtcccatcgcgggctatgacgaggaggctagcggtaaaagcacgaccctgagcggtatcgaggtcgtcgacgatcatacggtaaaaatcactctgaaagagcccaacgccaccttcctgcatgtgctggcgctgaactttgcctcggtggttccccgtgaggaggtggagaaatggggtgccgacttcggcaagcatccggtcggcagcggcgcgtttgagctccaggagtggaagctgggccaggagctgatcttccgcaaaaacccgaactactttaaagccggcgtgccgcggctggatcacataaagttcgaaatgggacaggatccctcggtcgctctgctgcggctggaaaaaggcgaagtggatattgccggcgacggcgtaccgcccgcacagtttctgtcgtttaaaaacaacccggcctataagggcctgatggtcaccggcgaccagttgcagaccggctacgtgacgatgaaaaccacgctgccgcctttcgataatctcaaagtccgccaggcggtgaacatggcggtcaacaaagatcgcatcgtgcgcatcattaatggacgcgcggcgccggccaaccagccactgccacccgccatgcccggttatgacaaggcatatcagggtttcagctacgacccggcaaaagcgaagcaactgctcagcgaagcgggtttccccaacggttttgctaccgaactgtacgtgatgaataccgatccgcagccgcgtatcgctcagtctatccagcaggatctggccaaagtgggcatccacgccagcatcaaatccctggcgcaggcgaatgtgattgcggcgggcggctccgccagccaagcgccgatggtctggtccggcggcatggcgtggatcgccgatttcccggatccctccaacttctatggcccgatcctcggctgcgccggggcggtagagggcggctggaactgggcgcgctactgcaacaaagcgctggacgcgcaggcggccgcggcggacagcatggtgaaacccgaccagcaggacgcgcgcattgaagcctggcgcaaaatcttcatcactgcaatggatgacgcgccctgggtgccggtattcaacgagaagcgctacaccgtacattccgcacgcatggggggcgaggacgcgctgtatgtcgatccagtgcatgtaccagtcaactacgactatatcggactgaaataa

SEQ ID NO: 180696 - DNA, 921 bp, Klebsiella oxytoca
atgctatttctgggaaaacgtctgttgcatgccgggctgatcctgcttggcgttacgttgatctgctatttgctgctgtttatgttgcccgccgatccagcgcgccaaatcgccgggcgcagtgccacgccggaagtagtcgaaaacatccgccatcagttggggttggatcttccgttttatcagcaatattggcgttatctgcaggggctgctgcacggcgatctgggacgctcgtttattcagcgcagcgaagtgagtgaactggtttccgcccgtatcgggccgtcactgcagctgatggcggcgggtattctctgcgagttggtactggggatcgcactcggcaccctggcggcgttaaaacgcggcgggctggcggaccggcttctgatggcgctctcctttatcggtgtttcggcgccgcagttcatcgccgcgatgctttttctctatcttttcgccgtggtactcaactggttcccgatgggaggctatggcggcttcagccatctggcgctaccggcgctaaccctcggcctgctcggcagcggctggtattcacgcatgttgcgctcgtcgatgattgaggtgctgcatcaggattttatccgtaccgcgcgggccaaagggctgggccgaacccgcgtactgctgcgtcacgtgctgccgaatgccgtgctgccgctaattccgatgataggcattgatatcggcatttttatgggcggactggtggtagtcgaatcggtctttggctggccgggtatcggtcagctggcctggcaggcgattcaacaggtggatatcccggtgattgtcggggtaaccaccgtgtcagcggttgccattgttggcggcaaccttattgcggatctggtgctgccgtgggtcgatccgcgcattgatgtcaaaaagtag

SEQ ID NO: 180697 - DNA, 849 bp, Klebsiella oxytoca
atgaatagagtcggatattttctgcgccggccagccctgctgctctcgctgctgtttattctcctggtggtgatgagcgcgctgtttgccccctggctcacccccttcgatcccgatgaacagtttgtcgagggactgagcctggaaggcgcaccgctttctcccaacagcacttactggctgggaaccgatctgctgggacgcgatctcttctcgcgtttaatttacggagctcgtacttcgttactcatcggtgttgtcgccaacggcactgcagtactgatcggcgtcctggtagggcttagcgcaggttatctgcaggggcgtatcggagggctgctgatgcgctttaccgatctgatgatggcgtttcccgcactgctgctggcgattgccctggcggcgattttccagccaagtgtctggatcgtgtccctggtgatcgccatggtgaactgggtgcagatcgccagggttatctacgccgaaactagcgcgcttagcgcccgcgactttatcgccgtggaacgcaccctgggggccggaacgttgcgtattctcggcgtgcatttaattccacatctggcgccaacggtgctggtctgggccacactaggcatctccaccacagtcctgctggaagctactctatcgttcctcggggtgggggtacagccgccaacgccgagttggggcaacatcatctttgaaagccagagctattttacttcggctccctggctggtgttctttcccggcgcggcgattgtgctgctgtcgctctctttcaatatcgctggtgacgccctgcgcgacgccctcgatcccggcttaaaaggacgaaactaa

SEQ ID NO: 180698 - DNA, 594 bp, Klebsiella oxytoca
atgaaaacgctgctgtccccggatttagatgctcagccgctcctgctggtagactgtgaagcaaggagtcgcgaagcgctggaaaaaaacctgacgcggatgggtatccgctggcatcacctgaccggagatgaggctttacctcctctcaccccctgtgcagtactggtggaactggaggcattcgccagcccgctaaccctgagccagatcaatctggccggaataccggtgatcgcgctgacctcacatgagggactttaccaggtacagcgcgcgctggagttaggggcaacagcgctccttaccaagcctattacacagcgagccatctataccaccctgatgatggcagtggggctgcgtcagcagttgcatgacattcaacagcaacagatgctactgcgccagcgtctggcagcaatgccgcagattacccaagctctggcggcccagatgcaagcggaaagtattgatgaacaacaggcatgggttcgcctgcgctcggaatcaatgtgtacgaaccagtcggtggcacaggtggcgcagaagtggctgctacgaatgtcgtccggcaagcggggagcacaatga

SEQ ID NO: 180699 - DNA, 1128 bp, Klebsiella oxytoca
gtgcaaactattgatattggaattttgctttccacagaaggtacctacagccacctggcgaacagcacactgcttggtgcgcgccatgccttagaggaaatcaatgccgatcctgcttatccttttcagctgcgggcccgacatatcaaccctgcgggtgaactcgcagcctacagtgaagcggtgagcacctttatcgctcacggcatccgccatatcttcggaaccattacctctgccagtcggaaggagattatcccggacctggagcagcataacctgctgctgtggtatggctgtccttacgaggggttcgagagctgcgagcaggtcgtatatctgggcggttgtccgaaccagactctgctgccactcctgcggctggcgctggatatgttcggaaatcgctcctggctgatcggctctaactacgtctggggctgggaaagcaatcgtatcgcccgtgaggtagtggaaggttccggcggtacggtggtgggcgaaaaatatctgcacctgagaaacagcaacgtgaccgagttgattgaggcgattctcagcacagaggtagattttgtactcaataacctggtaggcgaaacctcttatgcgtttctgcgcgcactggacgaggcctgtcttcgcgatcggcggacgttagcggtgctcagctgtaattttaccgaagccgaagtcgccgaagtcgcgccactaagggcggtacgtttgctttcctgcggaccgttttttgagagcgtcgatctcgatttttgcgcgcggcagcacctgcaacatggcgcacagcgcatctcccactactatatcggcggctggcgggcagtaaggttgtttgccaatagcctgcgcgaggccggaaacagcgagccgggtgcggtgctggcggcactgcatcgtcagcacgacgttgattctccgggcgctcgctcagtaatggctcgaaacaaccacgcctgtttgccctgctacatcgctgagttgcaacaaacttgctttcagatactgcatcgcgaaccgctgccggttatgcccgatccctatctctccgcgaccgagctacgtgaaagccgaacggttgcagccagacctgctctgaggattgttaaatga

SEQ ID NO: 180700 - DNA, 168 bp, Klebsiella oxytoca; identical to SEQ ID NO: 103979

SEQ ID NO: 180701 - DNA, 456 bp, Klebsiella oxytoca
atggtgaaatacctcaaggagaacttcttcgtccggtaccgccggttcgacagcttcgcccaggttaatcagctactggagcagtggatggctgacgttgccgacaggcgggaacttcgccagttcaggcagacaccggaacagcgcttcacgcaggaacaggagcatctgcagccgttgccggatacggacttcgataccagctacttcgatatccgtcatgtctcctgggatggctatatcgaggttggcggaaaccgttacagcgtgccggaaagcctgtgtggccagccggtatcaatacggatttcgctggatgatgaactgcggatctacagtaatgagcagcagatggcatcgcaccgtctctgttcggctgcatccggctggcagaccgtgccggagcatcacgccccgctctggcagcaggtcagtcaggtggaacccgaaatctga

SEQ ID NO: 180702 - DNA, 954 bp, Klebsiella oxytoca
atgaatccttcgttaaccgattcccgccgtcaggcgctgcgttcagcttcccactggtatgccgtgctaagcggcgagcgcgtcagcccacaacaggaagcgcgctggcaacagtggtatgaacaggatcaggataaccagtgggcctggcagcaggttgaaaacctgcgcaaccagcttggcggtgtgcctggcgacgttgccagccgggcgctgcacgatacccgcctcacccgccgtcacgtgatgaaaggattactgctgttgctcggcgctggcggaggctggcaactctggcagtcggaaaccggcgaaggtctgcgggcagattaccgcacccccaaaggcgcagtcagccgtcagcaactggaagatggctccctgctcacgctgaatacccaaagcgcggcggatgtgcgttttgatgcgcatcagcgcaccgtccggctctggtacggtgaaatcgccattactaccgcgaaagatgcgcagcaacgctccttccgcgtcctgacccgtcagggccaactcaccgctttagggacagaatttaccgtccgccagcaggataatttcacgcagcttgacgtgcagcagcacgccgtggaagtgcttctcgccagtgcccccgcgcaaaaacgcatcgtgaacgctggtgaaagcctgcagttcagcgcctctgagtttggcgcagtgaaaccgctggatgacgagagtacaagctggacgaagggcatcctgagcttcagcgataaaccgctgggtgaggtgatagccacgctaagccgttaccgcaacggcgtgctgcgctgcgatcccgccgttgccgggctgcgcctgagcgggacgttcccgctgaaaaataccgatgcgatcctgaacgttatcgctcaaacgcttcccgttaaaattcagtctattacgcggtactggataaacatttcaccgctgtaa

SEQ ID NO: 180703 - DNA, 132 bp, Klebsiella oxytoca
atgaatcccacactgaaacttttgctactgttattgctgagcggttcgctgctgactggatgcaatacggctcgcggcatgggcgaggatatccagagcctgggtcatgctatttctcacgcggtcagctaa

SEQ ID NO: 180704 - DNA, 759 bp, Klebsiella oxytoca
atgaaaattcgctcagctcttcttgcccttgggatcgcagccacgcttaccggatgccagaacatggattccaacggcctgcttagctccggcgcggaggctttccaggcttattcactcagcgacgagcaggtgaaagccttaagcgacaaagcctgtcaggagatggatgcgaaagcgactatcgcgcctgccagcagtgaatacagcaaacgcctgagtaaaatcgccgccgcgctgggggacaacatcaacggccagccggtgaactacaaggtgtatcaaactaaagacgttaacgccttcgccatggctaacggctgcatccgcgtttacagcgggctgatggatttgatgaatgataatgaagtcgaagcggttatcggccacgaaatgggccacgtcgcgctgggccacgtgaagaaagggatgcaggtagcgctgggcaccaacgcggtacgcgcggcggcggcctccgcgggcggcatcgtcggcagcctgtcgcagtcgcagctgggcgatctgggcgagaagctggtgaactcgcagttctcccagcgtcaggaatcggaagcggacgactactcgtacgatctgctgcgcaagcgcggcattaatccggcaggacttgccaccagcttcgagaaactggcgcagctggaagccggacgccaaagctccatgtttgatgaccacccggcatcggaagcccgcgctcagcatatccgcgatcgcatgaaggccgacgggattaagtaa

SEQ ID NO: 180705 - DNA, 3405 bp, Klebsiella oxytoca
atgaagaccaataaagatcaaaaagagacgatttctgctgcgttcacagttgttcttgctgcagtgacccttactttttttattttctgtggcggactgacttactggtattttattgccgatcatgtaatgacatgggtggttatatcgccgattctgatagtatgcggtctgctctggattatgctggcatgtatggtcgcactggtatttctggcaatccatctctggcttgtcaaccgggtcagatcttcatcgaccattagacagaacgccacttcagtgaagcagacatcgaattattcaccgctgttaagtgaaatggctaatcacctccgccgtcgctacaaccttttctggcgcagtcaggtccgcctgctgctggtctgtggcgaacccgaacacatcgccgccatcgcccccggtctggcggaaaaacagtggctcgaaggccgccgcacggtgctgatttacggcggcagcctgtcatcggcgccggacaccgggcgcctgaccgccctgcgtaagctgcgccgcagccgtccgctggacggcatcgtgctggcgctggatgagagacagaccaccgccggtacgctggataaccatcttcgcaccctggagcaggtcggggaggcgctgcgctggcagccgccggtgtacctgtggcaggtgactgacagcgactggtcgcaggatgcgcgcgtcacccggacggtaggggcgcttttcccggcccgcgccacgccggatgttgtggcgcgccagatgagcgcgattctgccgtcgctgtatgcgcaggggatgcagcagatgaacgtcagtccggcgcacgactggctgctgcgccttgcccggtcgcttgagcaggaagggattgcccactggaaaacgctgctgacgccgtggctgacggagcacctgaagcgtgttccgctgcgcggcctgatgttcagcccgtcgctggcccctgaggataatgccgcgggccatgaacaccgctggtccgctccggcggtctggcagggcgtgacggcggactgcgctcaggcgcggggcgtgcgggcagggatgccgtggcagcgaacgccgggcgtcaccctgctggcgctgattgccctgtggggggcgggcagcgtgctctcctttgccgttaaccgccaccatatcgtcagcgcggcggcgcgggcgcagcagctggtgaatcatcccgcggttaacgacccgcagctgatggcgctgcaggccctgcgtaacgatatcgggcgcctgcagacgcaacaggcgaatggcgctccctggtaccagcgcttcgggctggaccacaatgcgtcgctctccgccgccctgatgccctggtacggccaggccagtaaccgcctgatacgcgatgcggccatgcaggcgctgacgcagaaactgaccgtcctggcgaacctgccgccgcgcagcccgcagcgcgccacgtcagctaaagcgggctacgaccagctgaaagcatacctgatgatggcgcgcccggacaaagccgacgctgccctgtacgcgcaggtgatgacaaccaccgcgccatcccggccgggactctccccggcgctgtggcagagtatcgccccggaccttcacgccttttacatgcagagcctgccgtcgcagccagcctggaaaatcacgccggacaggcagctggtcacccgggtacgtcaggtgctgctggagcagattggccggcgcaacgcggaaagtacgctgtatgagaacatgctcacccgggtgcgccgcagctacgcggacatgacgctggaggacatgacgccgcagaccgacgccggtcgcctgttcagcacgccggaatcggtgccggggatgttcacccgccaggcgtgggagggcggggttcaggaagccattgataacgccgtggcgtcccggcgcgatgaaatcgactgggtgctgagcgatagccgtaaaacgctgtccggcgacgtctccccggaggcgctgaagcagcgcctgacggcgcgctacttcaccgattttgccggtgcctggctgaacttcctcaacagtatccggctgaacccggcgcacaatattgccgacgtcaccgaccagttaacgctggccggggacgtgcgccagtcgccgctgattgccctgatgaacaccctggcttaccaggggcagaccgggcagcagaaagaggccatttccacatcgctggtgaaatcggcgaaaaacctgctgggcggtgatgaccggccggtgattgaccagcaggccgccggaccggcggggccgctggacagcaccttcgggccgctgctgcagcttatgggtaaaaacagcgcgcagagcgtgatggcggcggacagttcgctcagtttacagacttacctgacgcgtctgacccgcgtgcgcctcaggctccagcaggtggcaaacgccgccgacccgcaggcgatgatgcagctgctggcgcagacggtcttccagggcaagagcgttgacctgaccgacacgcaggagtacggcagcctggtggcggcaagcctcggtgaagagtggagcggtttcgggcagacgatgtttgttcagccgctgacccaggcctgggagacggtgcttcagccgtcggcggccagcctgaacgaagcgtggcagcgctcagttgtcgcgaactggaattcagcgtttaaggggcgttatccctttgctgccgcgaagagcgacgcctcgctgccgatgctggcggcgttcatccgccgcgataccggacgtattgaccgtttcctcagcacgcagctgggcggcgttctgcaccgggagggcagtacctgggtggcggacagaacccacagtcaggggctgacgttcagcccggccttcctgaacgcggtgaaccagctcagccagctgtccgacatcctgttcaccgacggcagccagggtatcagctttgaactgcagggggtggcaatgccggaagtggtggaaacacagctgacgcttgacgggcagaaactccactattttaaccaggttgccgactggcagagcttccgctggccgggggtaatcaataaaccgggggcgatgctgacctggacgtcgacggcggcgggaacccgtctgtatacaaaccacagtggcccgtggggcgttatccggatgctggagcagatgcagcggcagaaagcgggggacggactgtaccggctgagcgtcaccgcgccggacaggcgacagcttcagtggctgctgcgtacggaactgggcgacggaccgctggcgctgctgaagctgcgaaacttcagtctgccgtcgcagatattcagcgtcggtgtcccggcgccaggccgcacggatgaatatgaatctgacgttgtggaagggagtgaataa

SEQ ID NO: 180706 - DNA, 1005 bp, Klebsiella oxytoca; identical to SEQ ID NO: 154540

SEQ ID NO: 180707 - DNA, 243 bp, Klebsiella oxytoca
atgaccaacagaaaagcaattcctgacaaagttcaggctaagataatggacaaaagcgcggcgcggtgcgctatctgttacagcacgcggatgaataccgatgtggtgtatcccgttcctggcttccagagtgcacacattgaccaaaacgccgccaactgcgcggagaataatctataccggggttcgaggttcaatcgtgtaaaaaaccacgttaaggcaataattcattgtttgaattga

SEQ ID NO: 180708 - DNA, 3009 bp, Klebsiella oxytoca; identical to SEQ ID NO: 121760

SEQ ID NO: 180709 - DNA, 558 bp, Klebsiella oxytoca; identical to SEQ ID NO: 121759

SEQ ID NO: 180710 - DNA, 333 bp, Klebsiella oxytoca; identical to SEQ ID NO: 121758

SEQ ID NO: 180711 - DNA, 1182 bp, Klebsiella oxytoca; identical to SEQ ID NO: 95492

SEQ ID NO: 180712 - DNA, 375 bp, Klebsiella oxytoca; identical to SEQ ID NO: 95491

SEQ ID NO: 180713 - DNA, 1197 bp, Klebsiella oxytoca; identical to SEQ ID NO: 95490

SEQ ID NO: 180714 - DNA, 828 bp, Klebsiella oxytoca; identical to SEQ ID NO: 95489

SEQ ID NO: 180715 - DNA, 1479 bp, Klebsiella oxytoca; identical to SEQ ID NO: 121753

SEQ ID NO: 180716 - DNA, 354 bp, Klebsiella oxytoca; identical to SEQ ID NO: 97191

SEQ ID NO: 180717 - DNA, 1284 bp, Klebsiella oxytoca; identical to SEQ ID NO: 97190

SEQ ID NO: 180718 - DNA, 429 bp, Klebsiella oxytoca; identical to SEQ ID NO: 97189

SEQ ID NO: 180719 - DNA, 303 bp, Klebsiella oxytoca
atgcaggtcagcggcggctcacagtcgttcaacgctgtaaatcagatgcgtattcttggacgctggatgcggatgatcaccatcccgaatcagtcatccgtggcaaaagcctgggccgagtttgatgaggatggccgcatgaagccttcttcgtattatgaccgcatagtggacgtcatggaggaactgatgaagttcaccctgctgacgcgcggtcgcagtgattatctcaccgaccgctacagcgaaaggaaagagagtgccgcgcagctttctgagcgggtcaaccagcgcagcatataa

SEQ ID NO: 180720 - DNA, 426 bp, Klebsiella oxytoca
gtgaacaacctgactgatgccctgaaaaatatcgatccggccctcctggacgcgccgctgacggaagataagctgaaggccagagagataacgcatccgccccgcatcctgatgctctacggctcgctgcgggcgcgctcttacagccggctgacaacggaagaaggtgcccggctgctgacggccatgggcgcggaggtgaaaattttcaacccgtccggcctgccactgcccgatgatgcgccggagacgcacccgaaagtggctgagctgcgggagctggttctctggtcggaaggcatggtctggtgctctccggagcgtcacggggccatgaccggcatcatgaaggcccagattgactggataccgctgacgtcaggcgcggtccgcccgtcaggggtcgtctcagaaaacggaaaataa

SEQ ID NO: 180721 - DNA, 333 bp, Klebsiella oxytoca; identical to SEQ ID NO: 121748

SEQ ID NO: 180722 - DNA, 435 bp, Klebsiella oxytoca
atggaaaacaatttggagaacctgaccattggcgttttcgccaggacggccggggtcaatgtggagaccatccggttctatcagcgcaagggcttgctcccggaaccggacaagccttacggcagcattcgccgctatggcgagacggatgtaacgcgggtgcgcttcgtgaaatcagcccagcggttgggcttcagcctggatgagatcgccgagctgctgcggctggaggatggcacccattgcgaggaagccagcagcctggccgagcacaagctcaaggacgtgcgcgagaggatggctgacctggcgcgcatggaggccgtgctgtctgatttggtgtgcgcctgccatgcgcggaaggggaacgtttcctgtccgctgattgcgtcactgcaagggaagaaagaaccgcgcagtgcggacgcggtgtag

SEQ ID NO: 180723 - DNA, 351 bp, Klebsiella oxytoca; identical to SEQ ID NO: 121654

SEQ ID NO: 180724 - DNA, 276 bp, Klebsiella oxytoca; identical to SEQ ID NO: 121653

SEQ ID NO: 180725 - DNA, 246 bp, Klebsiella oxytoca; identical to SEQ ID NO: 108023

SEQ ID NO: 180726 - DNA, 1647 bp, Klebsiella oxytoca
atgaccgaaatcaccgtgaatggcatgacctgcacatcctgcgccacccatgtcaaagatgctttggaaaagattcccggcgtgaatgccgctgtggtgtcctatccagaaagccgcgcgcaagtcatggcagacaccgccgtgagccacaaccaactgctggccgccatcgccgcattgggttatcaaggctcgatccgggttggtgatttcaaagatgaaccaaaaatccgtgatgcacttgagggcgccggtttgcatatcgccatcattggcagcggcggggccgcgatggcggcggcgctgaaggccgtcgagcaaggcgcgacggtcacgctgatcgaacgcggcaccatcggcggcacctgcgtcaatatcggctgtgtgccgtccaagatcatgatccgcgctgcccatattgcccatctgcgccgggaaagtccgttcgacggcggtattgcggcaactgtgcctgcgattgaccgcagcaaactgctggcccagcagcaggcccgtgtcgatgaactgcggcacgccaaatacgaaggcatcctggacggcaatccagccatcaccgttttgcacggtgaagcgcgtttcaaggacgaccagagcctggtcgtccgtttgaacgagggtggcgagcgcgaggtaacgttcgaccgctgcctggtcgccaccggtgccagtccggccgtgccgccgattccgggcctgaaagagtcaccctactggacttccaccgaagcgcttgtcagcgacaccattcccgcacgcctggccgtgatcggttcgtcggtggtggcgttggaactggcgcaagcctttgcccggctcggcagccaggtcacgatcctggcacgcagcaccttgttcttccgggaagacccggccatcggcgaggccgtgacagccgctttccgcgccgagggcatcgaggtgctggagcacacgcaagccagccaggtcgcccatgtgaacggcgaattcgtgctgaccaccggacacggtgaattgcgcgctgacaagttgctggttgccaccggtcgggcaccgaatacgcgcagcctcgcgctggacgcggcgggggtcactgtcaatgcgcaaggggccatcgttatcgaccaaggcatgcgcacgagcaacccgaacatctacgcggccggcgactgcaccgaccagccgcagttcgtctacgtggcagcggccgccggcacccgtgccgcgatcaacatgaccggcggcgacgcagccctcaatctgaccgcgatgccggcagtggtgttcaccgacccgcaagtcgccaccgtgggctacagcgaggcggaagcgcaccacgatggcatcgagaccgacagtcgcacgctgacactcgacaacgttccgcgagcgcttgccaacttcgacacacgcggcttcatcaagctggtcatcgaggaaggtagcggacggctcatcggcgtgcaggcggtggccccggaagcgggcgaactgatccagacggcggtgctcgccatccgcaaccgcatgacggtgcaggaactggccgaccagttgttcccctacctgacaatggtcgaggggttgaagcttgcggcgcagaccttcaacaaggacgtgaagcagctttcctgctgcgctggataa

SEQ ID NO: 180727 - DNA, 366 bp, Klebsiella oxytoca; identical to SEQ ID NO: 121650

SEQ ID NO: 180728 - DNA, 237 bp, Klebsiella oxytoca; identical to SEQ ID NO: 121649

SEQ ID NO: 180729 - DNA, 615 bp, Klebsiella oxytoca; identical to SEQ ID NO: 108024

SEQ ID NO: 180730 - DNA, 474 bp, Klebsiella oxytoca; identical to SEQ ID NO: 104970

SEQ ID NO: 180731 - DNA, 405 bp, Klebsiella oxytoca; identical to SEQ ID NO: 102211

SEQ ID NO: 180732 - DNA, 432 bp, Klebsiella oxytoca; identical to SEQ ID NO: 139525

SEQ ID NO: 180733 - DNA, 681 bp, Klebsiella oxytoca; identical to SEQ ID NO: 139460

SEQ ID NO: 180734 - DNA, 1281 bp, Klebsiella oxytoca
atggcgattaacggagagaacggtgttagtgcagtcaccgtggatgaactactcaagcaaggccttcggataccgaactatcaacgcccatacagttgggatgtatcgactgctctacaactggtggatgatatcagcgaagctcttcgagataccgaacgaaaagatattccctatgttttgggtgcaatcattcttcacgatgatggtgagtatctcaatgtagtcgacgggcagcagcgcctgctgactttgcgaatgattcttgcggccttagatccgataaatcatcaaatttcgatgtctggtaacagcgacactcctgtctccctagtttggatagagcttcaaaggcgcctgtcgcagttggaagataaaaaagagtttttggattttatctgtcacaaatgtcagttggtgcgtattgtgacggacgatattgatgaggcatttcgtgtctttgattcccagaactatcgcggcaaaccgcttgcccctcacgacttgctcaaagcacaccacctgcgcgaaatgcacgatgagtccgctgctatgaaagtggctgtcgttgaggcttgggaagccgtaaacgatgaggatctggacaggcttttttctacttttttataccggatatccaagtggtcacgaggcgaaagctcgctcgaatttactattcgggacatcggcatgttcaagggcatttcatcacgatcccacaggtcattttcgccaaatctgcgatatcaccttgcagcacaagccgctatgccacttctaagtgcatggtcggtatcctctacacatgatgcacgaaacgccgggcgcagccgctttcagcttgatgccccgataatcgcaggacgctcatttttcgagatggtgacattcatgcttgacgaattgaagatactggaacaagaggttattgacagaggtttcaaaaactttggcccatctcaaagtcgctaccgctacgtgtacgaattgttcattgccgcgctgctttgctatacaaacaagtttggcgatgaagatgtagatgaagtgcgaaataggttattcgcatgggcatatgccttgcgggtcgagttacttcgtgtgcaatttgtatctgctgacaaccgagcgcgaggtaaaaacgatgcaaataaatcgccttttgttttgctacgtaatgcgatgactggaagtgttgtccgcaaacttccaataacaagtaagccatacagcgataaccacgaaaaggaactcgttgcttttatcaaggggctgcaatga

SEQ ID NO: 180735 - DNA, 1953 bp, Klebsiella oxytoca
atgagcaagaaggagttgaaacctgaactgttaacagtaggcaagttattcactgacaattatctgattcctatttatcaacggaactatgcttggcgggccgaacagattgagcaacttattagcgatattcaagactcggtggtagggggccaggacaactattttcttgggaaccttgttgtaatcaagcggggtagagaggatgagttcgaggtcatagatggacaacaacgacttacaaccctctatctgcttcttaccttcctggagcaagacggtgagggtgagaagccgtcggttggccatgcaggccacttgcaatatgagtcgcgcgcacgggcaactgaggccctgctgcgagtagcacaggaggcggctaaggagcacgttcgaccgcagggctccacgagtaatgcagatgctggcattcatgaaggctacagcatcatcaatcagttcttcaaacaaaatgaaaaccttaatcgctcacgcgaaaaattctccgatttcttgctaacgaaggtgactgtcgtccgtgcctcgctgccacccaataccgacctcaatcgctacttcgagatcatgaacactcgtgggcagcaactcaagcaggttgatattgttaaggctcgcctgatgagcaaactgcccaatcaatatgaacgcgaatgctttgcgtgggtttgggattcctgtgctgacatggattcttatgtccagatgtctctgacccgtggtgacacaagtttgcgaaacaaagtatttggtgatgaatggtcctggctggaggtgaccagcttctcttcgctaatggaaagtcgtccgcaatccggcatcaattcatcaaggcaatcctccgaaggggtatcgttgtccttggatgaggcgttgtcaaaatacgctaaagagctcgagtcaaattccactgaagacgagggcaacgagcggtttcgttcgactattgagtttccggcctttctgctacacgttctaagaattatgaaaggcgatgaggtcgaagacgaaggcctgcttgacgacaagcgcctcatcaagtcatttgacgacgccgtaaataatgtacccgatgctaaagccgattgggtgcgtagttttgcatttatgcttctcaagtgccgcaacctcttcgatggcttcatcttgaagcgtcaattcacggcaaacatcggtgacgatggcgattggtctctccagcgactgaaaaaaggaggcggggacaagaagccaaccccgacgtacatccatgttttctcggccagcaatggaagcttagaggaggacgggagtgctgacccacatacccgagatgtattgctgcttcagtccatgcttcggattacctacacttctccgcgaacgatgcactggattaccaaagttcttcgctggctctccgttaaagcccctcgagacgtgaaacatgcggatcttgccgatttgttgaagggatatgcccgcagcaaggttaaagagacattctcctttgagaaagatcagcaaccacaagggtttggtatcagccgtatcgtcttttcgtatctcgactatcttctgttgagtgactcctcaaaacgagatttcaaatttcagttcagaacttccattgagcacttctatccacagcatcctgacaaagaacagtcgggcgcggttgtttcaggttctagccttaacctgcttggcaacctcgcgctcgtaagcgtcagcgcgaactcaaaattcagcaatagcctccccagagcaaaggccgaaaacttcaaggatacaattgaacttcaaagtcccaagctcaagagaatggcggaaatcacccgaaatacaaactgggacgatcagcagataacagcacatcatgaagcgatggtgacattgcttcgtgatgatgtaagtctggtggaggcaagcggaagatccaacccagggcgttga

SEQ ID NO: 180736 - DNA, 1434 bp, Klebsiella oxytoca
gtggagcgaaggagcggggccaagggaaacgcggaacagccacacatgcgccggacgcagagccgggaaagtatgtcacagaggctgtcacgcgtgcgggaagctgcgaagcagcggaagaaagaacggtttaccgcattgttccacctcctgacagcagaggcactggagaacgcattcctctccctgagcaggaaagcggctgccggagttgatggtgtcaggtggaaggactacgccgaaaacctgaaggtcaacatagcagatctgcaccggaggcttcatcagggtagttacagggctcagcccggcaggcggcactacatcccgaaagcggatggaaaacagcgcccgctcggcatcgcctcactggaggacaaaatcgtccagtatgcgctggttaagatcctgaatgcagtctacgaaaatgactttatggggttttcatacgggttcagacccgggcgaagccagcacaatgcgctggacgcactggccacagggctggttcggaccaatgtaaactgggtactggatgccgatatcagtcagttcttcgacaaggtaagccatgaatggctaatcaggttcatagaacacagaatcggcgaccagagggtaatcaggctcatacgaaagtggctcacagccgggacctcagaggaaggagaatggcgggcatcggaggaaggagaatggcgggcatcggaggaaggcaccccacagggtgcggttatctcgccgctgctggcaaacatctacctccactatgtcttcgatctgtgggcgcatcagtggcgacgccgccatgccacaggcaatgtggtcatggtcagatacgcagatgacatagtcatcgggttcgacaagcgaatcgacgctcaatgctttcgtatagccatgcagcgcagactgaaggagttcggactcacggtacatccgaagaaaacccgactgacggagttcggccgcttcgcagccgaaaaccgcgccagcaggggaaaaggtaaaccagaaacgttcaacttcctcgggttcacgcatatcagtgggaaagatcgtagtggcaggttcatgctgatacgaaagacacgccggggcaggatgacggcgacactgaaagcgatcaaggacggactacgaaagcgctggcattactcaatccccgaacagggaaaatggctcaggagagtggttcagggatacctgaactaccactcagtcccgggcaactatcccatgatgcggaagttcaggatatacgtaacagacctctggcgacgggcgctgaggcgcaggagccagcaggatgatacgacatggacgaaagcaaacagactggcagccgtatggctgccgaaggttcgggttctgcatccatggcctgtggagcggttcaccgccagacacccaaggcaggagcccggtgcgtga

SEQ ID NO: 180737 - DNA, 231 bp, Klebsiella oxytoca
atgaatacgggtttaaggcaggttctgcgatatgcaggcgtcccggttgacgccgctgaaccggtgcgccggcaattcggtagccgcctgattttaatcgtgacggttgctcttcttccgctgttgattgttgacgtccctcagtggctatttgtgctctctcagattatctggggaagcggtatgtacattggtatctccgtggccagtgataaaccagatcgccgataa

SEQ ID NO: 180738 - DNA, 279 bp, Klebsiella oxytoca; identical to SEQ ID NO: 98260

SEQ ID NO: 180739 - DNA, 858 bp, Klebsiella oxytoca
gtgactgatatccttcaaaaccactattcacaagttaaaaacccgaacccggttttcacgccgcgagaagggaaaaagaccctgccgttctgccgtaagctgatggcgaaagccgaaggcttcacgtcccgttttgatttttccattcatgtggcgtttttgcgttcgctgggtaagcggcacaggatgccaccactgttgcgccggcgtgcaattgacgcgctactgcaggcaatgtgttttcactatgatccactggccaatcgcgtgcagcgctcgattaccaatatggccatcgagtgtggactggccaccgagtccaggagcggcaacctgtcagtcagccgtgccacccgggcgctgaagtttctggcggagctggggctcatcacctatcagacggaatatgacccgcagatcggctgtaacatcccgaccgatatcaccttcaccccggctctgttttccgcgcttgacgtttctgaggtggctgtggtggccgcgcgccgcagccgtgtggagtgggaaaacctgcagcgcaaaaagcagaaactgaaaccgctggagatggacgagctgatcgcaaaagcgtggcggttcgtgcgtgagcgttttcgctgctatcaggctgagcgtaaatctcacggccggaagcgggatactgcacggcgggatgcatcacggcagcgtcatgacatcgagacgcgcgtgcgtcagcaactgacccgcgaatacgccaccggacgcttcaggggagataaagaagcgctgaagcgtgaggttgagcgccgtgtgcaggagcgcatgctgctgtcgcgcgggaacaactacacgcgactggccactgtgcccatataa

SEQ ID NO: 180740 - DNA, 1242 bp, Klebsiella oxytoca; identical to SEQ ID NO: 104974

SEQ ID NO: 180741 - DNA, 894 bp, Klebsiella oxytoca; identical to SEQ ID NO: 154545

SEQ ID NO: 180742 - DNA, 1998 bp, Klebsiella oxytoca; identical to SEQ ID NO: 104972

SEQ ID NO: 180743 - DNA, 912 bp, Klebsiella oxytoca; identical to SEQ ID NO: 104971

SEQ ID NO: 180744 - DNA, 255 bp, Klebsiella oxytoca; identical to SEQ ID NO: 102310

SEQ ID NO: 180745 - DNA, 258 bp, Klebsiella oxytoca; identical to SEQ ID NO: 102309

SEQ ID NO: 180746 - DNA, 204 bp, Klebsiella oxytoca; identical to SEQ ID NO: 136047

SEQ ID NO: 180747 - DNA, 369 bp, Klebsiella oxytoca
atgaaaacagcgatatgggtggtggtgtatttcacgatgtgttttctgcttttcacaggctggattttcgcctttgcgcagtatgcgccctataacgggcaggaacacgcgttttctctgacgtatctgcttaatttattttttcttcatgtagtgatggtaccttactacgagttttttcagactgaaatatacagcaatgtattaatgagtctggcagatgaatccggtcagatgatacgttttcatcacgtggtacctgttctagggatatatagtctgtccgcactcttaacttttgtaggttacatcatatatgcaaaatggttcactcataaccggctgaaaggaaatcttcttccaaaatga

SEQ ID NO: 180748 - DNA, 495 bp, Klebsiella oxytoca
atgaaagtcactgaacccggactgaatacgctgatcgataacctgaacaccctgatttgtgaggacagcctgctcacgcgccaggagcgtgaaaccctggtgcgggccgtggcggccatcggcgccatgaaagcacgcgtcagcatgaaaaaaggcgaagcgccgaccgttgccagacgggaaaaaagggagaaaaaagaccgccagcctgatccgcgttttccgcgagccggtcatccctggcaggaagacgaaaaaaccttactgagtgatgcgcttgaaccggtcccggatgaagagatcggtacgcatcttttctggctttccgagaaactgggcagaacgcctttcagtgttgctttccagatcgcggcaatcagggagctgcaggacggctgggaggagcagttcagggagatttcggataaaattcgcttgtccggcctgagcatcagtgattatctgaagcagaacggcacgggccataacgcctga

SEQ ID NO: 180749 - DNA, 576 bp, Klebsiella oxytoca
atggcagcagtaacaacctcccgcaggccgtcgccgctgcagcgacgggtactgattgtgctggccgccctcgatgcgaaacgtccggggccggtggcgacgcgggatatcgagcgggtgctggagcagggcggggacgccccggtgtacggaccgaacctgcgcgcctcctgccggcgcatggaagccgcgggctggctgcgcaccctgcgcgcgccgaacctgcagctggccgtcgagctgacggaggccggtcgcggcattgcagaaccgctcttccaggcagaacgcgaggctgaaacggcacgacaacgactgaccgacgtccggcgtctgccgttacgccagacggctgccggtgacgcggtggagctgcagctgggtgacggccattacaccatcagggaagcggcctacgtgatccgtctggacggtaccacctgcctgcagctgacggatgccggcggcatacgccggataaaagagggcgatcccctgcaggtggccagctggtatcaggcctgttttgatgcaggcctgccggtcatcgttcaggtgaatgagagccgggactga

SEQ ID NO: 180750 - DNA, 270 bp, Klebsiella oxytoca; identical to SEQ ID NO: 136048

SEQ ID NO: 180751 - DNA, 1341 bp, Klebsiella oxytoca
atgacgatgccatttttacagaatatccccccgtttatcttcttcaccggcaaaggcggcgtggggaaaacctctctggcctgcgcgacggcggtatggctggctgaccagggccggagaacgcttctggtcagtaccgatccggcctccaatgtcggtcaggtcttcagccagactgtgggccaccggatcactggtatccgcaccgtggaaaaccttgcggcaatggaagttgacccgatggcggccgcgcaggcttaccgcgatcgcgtgctcgatcctgttcgtgaactgatgcctgccgatgtcatcagcaacattgaagaacagctttccggttcatgtaccacggagatcgcggcgtttgatgaatttaccgcgctgctgaccagtcatgaactgcgcgaaaaatatgatcatatcgtctttgatactgcaccaaccggacacaccatccgtatgcttgagctgccgggcgcctggagcgggtacctcgatgcacatcctgatgctgcggcgaacctcggccctctggtggggctggagaaacaacaggaccagtacgctgacgcagtgaaagccctctctgatacggcactcacgcgactggttctggttgcccgcgcacaggcgtcgaccctgaaagaggtctcccatacccacgaggagctgtcggctatcggtctgcagcatcagcaccttgccatcaatggcgtgctgcctccctttgccggtgaacaggatccgctggcgcacagtattctggcgcgggaggaacgggccttacgggccatgcctgaaaacctcgcgcatcttccccggtcgatgctgtatctgaagccttttaatctggttggtctggaagccctgagggcgctgtttacagagagcacacttgttctgccggatccgggagccacgctcacgacggtcgatttaccggagcttgcctccctggtggaggacctcagccgagcgggaaaagggctggtcatgacgatgggaaaagggggcgtggggaaaaccacggtggcggctgcggtcgcggtctcgctggccagacgcggtcataaagtccacctgaccacctccgatccggcagccacctgtcttacaccctggatggctcgctgccaggccttcaggtcagccgtatcgatccaaaagcagagactgagcgctatcgtcgctttgtgctggaaaatcagggaaaaggtctggatgaagagggactggcggtactggaggaagatctccgttccccctgcaccgaagagattgccgtgtttcaggcattctcccggatcatcaaagaggccaacgaccattttgtcattatag

SEQ ID NO: 180752 - DNA, 816 bp, Klebsiella oxytoca; identical to SEQ ID NO: 102214

SEQ ID NO: 180753 - DNA, 441 bp, Klebsiella oxytoca
atgaataaaacaaaatatccaagtctgactaactatctcgccaaaacaaaaaagaacgcagatctttatagattatataatccacaattttcttttttctgcaaaagtgacactcaggagcaaagattttatttcgattatttctcaagacatatggtctcgaagagaaatattttaaccgtattctctatctatacattcacctcttataacatgaacaaaaaagagacaataaaaaatttcattcgatttctcaaaacgacgaatgaaagtacattccataatgctttttcatttcgcggtggtaacattttgtatgtaagcaacaaaaacatgttgaaagagatctcatggttttcactcgctcgaatttacgaagacattaaaaaaataaaggaatataaaaccaaccatgacaactatatcagattagtcgcttaa

SEQ ID NO: 180754 - DNA, 945 bp, Klebsiella oxytoca
atgaataacaacgcaataaatgcattactctcttgtaaaactccaaaagacattcaggcttgcattaatgcaggctccgatattaatacactggattcgtttggaagaaatatactgttttactgtaaaaacccaaaaatgattgacactctggttaaagcaggaatagattttaaccattctgacaactatggtcacaatgttttgtttaaccagcgaaatcctcacatactgaaaaaattgattgattccggcgtagatatacaccacaaaaatggtctcggccaaacctgtttatgctcgttagctgataatatatcctgttgcaaaaccctgatcaatgctggaattaatgtcaacaatgtggataaatgcggaagaacaatacttttttacgtaaaaaatcactctatctttgatttgatggtacaggccggttgcaatataaaccacaaagataaccagggtcacggtatttttgaaatttgctattcattaggcgatttcaaagccaaaatgctcattcgtcatattagtatgaaggatagcagtccagtaattttcaactacctcaacagcgaaagtctgcagataatggatttgcttcagaagaaaaaccttaactttactatctctgataactgccaggtttatctaagtgccaatgaaaatgaaatgagctctttcttcagtgaactaaagaagaagacagatatcagcaacacacattttcgccatattgtactgcgaggttatgatttacgcggggacattgaaaccattaaatggtttatccgcaatgacatcaaaatagataaaaaacaactggaacagcatattcgacatgatgagatttgtaaatatatagcagaacatgagagaaagaaacttagcgaaattatgaaacaaacaatctctttaatgccagtaaaacgtagattgtaa

SEQ ID NO: 180755 - DNA, 225 bp, Klebsiella oxytoca
atggcatccctcaacaaactcccaccggtattacctgaaatcaatcgtgaagcatgggttaaactcggcaacctttcacaggatttaaaccgcctgctgaatcatctcgacagcaaaagccctgacagcgaactgacccgtacagaactcttcgccctgcgcagacaaatcaaaactctcagggatcaccttattccatcaacctttctggagcaagaccagtga

SEQ ID NO: 180756 - DNA, 1224 bp, Klebsiella oxytoca
gtgaaaggcatgcagaaaataaagcggggtaaacagtttgcaggtgtggttctctacagccttaagtcaggatctcaccacaaaatcacgccttatattatcggtggcaacatgacgggaagcactgctgctgaacttatcagtgaatttgaaggcacaagactactgcgccccggtgtcgccaaacctgtctggcataattcgcttcgcctgccaaagggagaaacactgtcagtcagacaatgggcggcattcgccgacgattatatgatccggatggggttcactgaaacgcaccttcgctgttatatccttcacgatgataccgacgggcagcatatccatatcattgcaagtcgcattaacatggccggtggaaagctgtacatggggaaaaatgaaaatctcatcagcacccgcattatcagcgaactggagcgaatacacggactcactgaaacaacacctgcaaccagcagtcgccctcaggctaaaagaaaaccctcacgcaatgagctgatgatggcagaacgaacagcagttccctgccctaagtctcagttgcagaccctgattgataatgtcttaacgcatcgtcccgatttactgacttttatcgacatgctggaacagaaaggtgtgacctgtaaacccaatatcgcgtcgaccggaaaaatgaatggattttcatttcagtaccagggtattgcctttaaagcgtctcagcttggaaaaaagtatggctggtcttctctgcaaacgcagattgattttacaccagagcacctggccttactgaaaaaagagcaacaacagactgtaccagtgccagtgccagtgccagtgccagtgccagtgccagtgccatcatgcgagcctgaagaacaggttgcaaaccgggaaacgattctggagaaaatccttcagcttgaagaaaaaattcgtctggaaagacaacaggaaacagtgggtgtcattcaactcaggagcaaactgcacaatacagctcgtcagataccccgccagcgtcgtctgcattcgtggcttgtattgctcggccatattgtggcacttctcaggcgcaggggcatgtctctgttacatgccactgcacatcctttccaccaaatcctgcacctgcatcttctgacaccctgtcattccatgacaacaaatcccattaaagaacaattagttaaaaataacccccatcctgcaccataa

SEQ ID NO: 180757 - DNA, 273 bp, Klebsiella oxytoca
atggataataaaacgattagctgccccttctgctttacacaaagcccgcacggcgtgcggatttgcaaaggatgccatgcaaaagtcgcctacggtgagagtccgctcagtgtggcattcctgtttcaattcgtggcattagctctcgcctggttagtattttcattgaccggcagcactcctgtctcagtcattacgttttttgccagcgtcattattcttatctgcattattaaaaagaaatatgcagacagagttgtttttatacggtga

SEQ ID NO: 180758 - DNA, 387 bp, Klebsiella oxytoca
atgaacagattcatgatttctgtgttttttatttctgctttccttatttctggttgttcaacatcaggcaaccagcatctaaaaaacgaaacagcacaaagtctgcagtcgaaaattataaaaaataaaacaacgaaatcagaaatcattaccgcattaggtgagcccgaaaccaaaactacacttgatagtggcaatgaagaatggacttattcgatggataacaatcagtttgatgccaccacattcattccagtggtcgggttgctgacaggcggttcacagacgcaggccaaaacgctggaaatcgaatttaaaggcgaaacggtcagtaagtggacgttctctgaaaacaacagcaagatgaaaaccggccttattcaataa

SEQ ID NO: 180759 - DNA, 321 bp, Klebsiella oxytoca
atgaaaacatatgcatttaccacactcattgcgtccatttttttgctgagtggctgtaccggtgaaccgtctgagcaggatatttacactgcgatgaataaggtcatggagcagacgaatgccatcgttaaatccatagcaggtaaagatgtcccgaaagacgcactgcgggaattaaaatctgtcaaaaagcatgactgcgaaaaactatcggataaaagctacaaatgcaatgtaacagctgttgccgataacgaaaaacgcacagcggctgtcacgctgatcaaaacggatgatggctggcaggtcattgataagtaa

SEQ ID NO: 180760 - DNA, 426 bp, Klebsiella oxytoca
atgagtaatatttgtgtttcttctcaggaagaaaagtttatatttgttgttgataaatatataacacaccatcgcgacagtgttaataacaatattttttacagaaaactttatgtgcttttcgctggataccatctgaagtatttttattcacgggcgcaatatcgcaattcgtgttatcacgttgataatatcatgcagatgtttatgggtgtcgtttctaccctgaaggcccctctgctcaggcaactcgcaaacagtgacacattactgcattgcctgaattcgctcgtgaattatatttcaggcaatctggatgaagcagagcacatttatgctgatttactggcacagtatgaaaagaaacgcattgcacgttctctggcttatacaccaccaggatccgtggtcaggaaaaggctgtga

SEQ ID NO: 180761 - DNA, 564 bp, Klebsiella oxytoca
atgtcaaacacaagtgttatgttaactaaagaacaaaaagcaatcattgcagaagcattagatgttatgcccgaagatctggaagaaataaaagttaaagcaagtgcctgtaaaaagacatcctttcgtgacgatttttcgatggtcttcaaagataatacggccacactcgcccgaatggatctgacaccaacggcattcagaattgttctttatcttttctcagtcattgattatggaaatattatccctgacttttcacagtcacgtactgccagagagttaggactgaataaatcgaatgtttcacgtgcattcagagaattatttgagaggaaaatactgatccgtaacgctgaagacggtcaggtttacctgaattctaatttatgcgtaaaaggtattcctcatcgtttcaatgaagatctgatggataaattcagtaaatcaagacttgagactgaagattttgccacttcattcaacttttatcgcgcagggcgcaaaacaaagcctgtaaaaaaatccagaaacagatatccaactgacggcattcccttttaa

SEQ ID NO: 180762 - DNA, 306 bp, Klebsiella oxytoca
atgaagcaaagactccctgcttacctttaccagaataaattatcagatgaacaacgcaatctgaacaatactgctcactatgtgttttggcttctcacattaatcgcttcatacacaccagataaaaacactgtttacctgaactttcaccgtgcaacatccatcgcacagcaggaagatatacatattacgccagcccgattttatcgggccatcgatgaactgattgatacgaatgttattatacctactgagtttaaataccagtatcgtttaaaccctgtatttttcagttatcttaaataa

SEQ ID NO: 180763 - DNA, 276 bp, Klebsiella oxytoca
atgaataattcaatcagagtaccggaagataaagattttgtatgtgcatttgtgacttcaccggatagcttgtatgaggctattgaaacctatcgtaattatgtagatccagtcgaagagatagagtttgagcacgtccttctttatttgttgtgttctatactggtcgaaggtgctacagatgttaccattaatgatgaagtacgaatgtgtattgagcaccttgtcaatgaaaaaaatattatcagaaagaataacgcaggtaaaaaggtgtaa

SEQ ID NO: 180764 - DNA, 855 bp, Klebsiella oxytoca
ttgaaaaactggtcaccagagcatactaaagaaatcaaagcttggcttgacatagataactatcgcaagctcgaagacatcagtttaaatgccttgtatcacgaactttgggcaagagcacttctgtacaagcctgggcctactgacgaagaaaagaaagggctatgggtgtacatgactgaaattttcagtgggaacccccatcttttcaaagggaagcatctcgattatccaacagttaacgatactctctacagtcctccacacatttttatcacggatatcaccaggcttgctgaacttagtgtgatggctcttagtgtgaatcttttcacctgggaggaaggaaacgatgaatattgtgttaatgcgcctcatcacgaagcttatgtgtcacaactcttgtcccccttatgtgagaaaacggtgttgcttgaaatcgatcttggtagtggtactgacgatgaaatagccgaatcgataaaagcggccctgccgcaatggagatcggtaaaaggagtggaagttaatgaaaccggtatcgttcgtttcggctatggaaccattaaaaaaatcataaattacaggttggttgcgatgctggacatcttactttgggcaaaaaggaaagaactaagaatctcagatgatcgcctctcccggcttctttatactgatgaagatgaagaaacaactacccgtttagggtatcacattaaagactcagatcgtccgcttgcgatgaaagctgcaacgatagacttcattaggcagttcaattttttcatgaaccgaaatccccacctgaaaaacatgagagtttcagatgtgatgaaactctctgattctaactga

SEQ ID NO: 180765 - DNA, 993 bp, Klebsiella oxytoca
atggaattagtcatatccttattacaaaagggattattagaaaaggcattagaccttgccatttctgaattattcttcaatgcaagatcacctgatgatataaagaaagctttaaaaataggctatgacattaatgctgttaacagtaacggcaacaatgccatttttgcctgcagaaccctggaagccatggattgcctgctcagttatggaattaatatacaccatatcaacggacatgggcaaaatgcgctctttcatcaaaaaaatccagaaatactgaagaaactgattgaactgggtttagacacctcgcatacggatactaatggctacacatgcatttttgaacattacaggaatgctgaaggattgacagaattaattaatgctggttgtgatataaatcacatcgataaaaaaggaatgaatattctcttcacgcccctttccccggaagttttatccgtagcaatagatgctggatgcaatgtcaatcaaattgatcattcagggaaaggatttattgaaaatgtatatgattatgaattacatgatatcattctctcgcatattgataaatttgacagaagaacgctgcatgtagatttttgtgatctcgactcagcctttttcttgtattacctttctgaacatggattcaaaatagaacttaataaagaccatttcaccattaacagttacataggtgattataaagaaatcttatccatacttgatttcatcagtgaaattcatgatattcacttctataaatataaaggcggccctctctataaagatatcgacaagcgaattgtaaagtggatgataagaaataatctcttggttgatttatcaaaaataaataaacacaaggattatgaagaaattaattcatacaaaatccgtcgagaacagaaagaaatctccaggcatttaaaacctgctaaaagtatatctgcaacagtcaaaaacggcggaagattgtga

SEQ ID NO: 180766 - DNA, 948 bp, Klebsiella oxytoca
atgacaaaccataaagaagagaacaggttattatcattatattctatggggatccttgatacaaaatatgaagaacgatttgacagattgacgaggattgccaccaaactctttgatgtaccaatagcacttgtttcattaattgatagagacaggcaatggtttaagtcatgttatgggctgaagataaaagagacagatagaagtgattcattttgtacaatagcagtagatcttagtgaaccattaatagtgcccgatgcaagccttgatccaagattcaaagaaaataaattagttaaaaatgatccttatatccggttttatgcagggcatcccgtaagactgccagatggtgagatagctggaacaatatgtattattgatacagaaccaagagtattaaccagagatgacttcttattgcttaaagatttagcagaaatcgtagaggatgagtttagaataataaacgaagcaactactgatcctttgacaggtatatgtaaccggcgttctttcgccctaatgacggatgaatcgttaagaaaagccaaaaaaaagaaaaaaacattctgtgttctgatcatagatctcgataattttaaaccaatcaatgataacttcggtcattcagaaggtaatgaagtactttgcaattttgcagatatgctggaagatcttagtagttcaaaaagcgttgttgcaagattaggaggtgatgaatttggtgttctattacccgagtcaacctataaagaagcagaagaattccttcataaattgagggccgggattaccagctacaatcttaattctcaaaaaaaatacaacatagatttttctgcagggattattgaatatgatgaggaaattcatactgaatgctctgctatcatgcaggatgcagacgaaagaatgtatgaaattaaaaagggaaaacgatag

SEQ ID NO: 180767 - DNA, 264 bp, Klebsiella oxytoca; identical to SEQ ID NO: 94215

SEQ ID NO: 180768 - DNA, 657 bp, Klebsiella oxytoca
atgctgatgtgtgatgcgaccggtatgtcgcaacgtcgtgcctgcaggcttacaggtttatccctgtcgacctgccgctatgaggctcaccgtccggctgctgatgcgcatttatcagggcgcatcactgagctggcactggagcgcaggcgttttggctaccgtcgtatttggcagttgctgcgccgtgaagggcttcatgttaatcataagcgcgtgtaccggctttatcacctcagtggcctgggcgtaaaacgcagaagacgtcgtaaagtgctggcaacagaacgtctgccgctgctccgtccggcggcgcccaatctgacctggtcgatggatttcgtcatggacgcactttccaccggtcgcaggatcaagtgtcttacctgcgtcgatgatttcacaaaggaatgcctgacggtcactgttgcctttgggatttcaggcgttcaggtctcgcgtattctggacagcattgcactgtttcgaggctatccggcgacgataagaactgaccaggggccggagttcacttgccgtgcactggatcaatgggcctttgagcatggtgttgagttgcgcttaatccagccgggaagccaacgcagaacggatttattgagagctttaacggacgatttcgcgatgaatgcctga

SEQ ID NO: 180769 - DNA, 1644 bp, Klebsiella oxytoca
atgacggacagtaaacgcgcaggggagcctgcacaacagagtgatttgattaacgtcgctcagctgaccgcgcagtactacgtactgaggccggaagcgggcaacgcggagcatgcggtgaagtttggtacctctggccatcgtggcagtgcagggcgccataacttcaatgagcagcatattctggcgatcgcgcaggcgattgcggaagaccgcgccaggaacgggattaccggtccctgctacgtgggtaaagatacccacgcgctctccgaaccggcctttatttccgtactggaagtgctggcggccaacggcgttgatgttatcgtgcaggaacacaacggtttcaccccgacgccggccatttccaatgccatcctggtgcacaacaaaaaaggtggtccgctggcagacggcatcgtgatcacgccgtctcataacccgccggaagatggcggtattaagtacaacccgccgaacggcggcccggcggataccaacgtcaccaaagtggtagagaatcgcgctaacgaactgctggcctcgggtctgcagggcgtcaggcgcatctccctcgatgcggcactggcatccggtcatgttaaaaagcaggatctggtacagccgtttatcgaagggctggcggatatcgtcgacatggcggcaattcagaaagccggcctcaagctcgggatcgatccgctgggcgggtccggtatcgaatactggaaacgtattgccgggcactacaagctcgacctgactatcgtcaacgatcacgtcgatcaaaccttccgctttatgcatctggataaagacggcgccattcgcatggactgctcatctgagtgcgcaatggcgggcctgctggcgctgcgcgataagtttgacctggcttttgctaacgatccagattatgaccgtcacggcatcgtcacgccggcagggctgatgaacccgaaccactatctggcggtggcgattaactacctgttccagcatcgcccgcagtggggccaggatgtggcggtgggcaagacgctggtctcttccgcgatgatcgaccgtgtggtgaacgacctcggccgcaggctggttgaagtgccggtgggctttaaatggtttgttgacggcctgttcgacggcagcttcggcttcggcggagaagagagcgcgggcgcctcgttcctgcgttttgacggaacgccgtggtcgaccgacaaagacgggatcatcatgtgcctgctggcggcggaaatcaccgccgtcaccggtaaaaacccgcaggagcactacgacgaactggccgcccgcttcggcgcgccgagctataaccggctgcaggcttcggccacttccgcacagaaagcggtgctgtcgaagctgtcgccggaaatggtcagggccagtcagctggcgggtgacccgatcactgcgcgtctgaccgccgcgccgggcaacggcgcatcgattggtggcctgaaagtgatgaccgacaacggctggttcgccgcccgaccgtcaggtacggaagacgcttacaagatctactgcgagagcttcctcggggaagcacatcgcaagcagatcgagaaagaagcggtggaaatcgtgaatagcgtgctagcggcgcaccagtag

SEQ ID NO: 180770 - DNA, 2448 bp, Klebsiella oxytoca
atggaaccacgcataagttatatttcacccaggctgaatgaagaagcgctgcagcatgctatcgcttataacctcatgtttattctcggtaaagacccttcacttgccaataagcatgaatggctcaatgctacgctgttcgccgtgcgcgatcggctggttgagcgctggttgcgggcgcatcgggcgcggatctcgcagcaggcgcgccaggtatattatctgtcgatggagtttctcatcggccgtaccctctcgaatgccttactgtcgctgggcatctatgaggatgtgaaaacagcgctggccgggatgggtctggatctggaagagctgattgacgaagagaatgacccgggcctgggcaacggcggtctcggtcgtctggcagcctgttttctcgactccctggccacgctggggctgccaggacgcggttacggcatccgctacgactacggcatgttcaagcaaaacatcatcgacggccggcagatggagtcaccggactactggctggagtacggtaacccctgggaattcgagcgccataaaacccgctataccgtgcgctttggcgggcgcattcagcatgaggggaaaaactcgcgctggctggaaaccgaagagatcatcgcggtggcctacgatcagattatcccgggttatgaaaccgatgccaccaacaccctgcgcttgtggagcgcccaggccagcagcgagattaacctcggtaaatttaatcagggagattacttcgcggcggtagaagataaaaaccattccgaaaacgtctcccgggtactgtatccggacgactcgacctactccgggcgcgagctgcgcctgcgtcaggaatatttcctcgtttcggcgacggtgcaggatattctttttcgccattaccagttgtatcaaacctatgacaacctggcagataaaattgctatccacctcaacgacacccatccggtgctgtcgatcccggagctgatgcgtctgctgattgacgaacaccgcttcagctgggatgacgctttcggggtgacctgtcaggtcttctcctacaccaaccataccctgatgagcgaggcgctggagacctggccggtcgagatgctggggaaaatcctgccgcgccatttgcagattattttcgagattaatgactattttctgaaaaccatgcaggagcactatcccgatgatattgcgttgctgagccggacctcgattatcgatgaatccaacgaccgtcgcgtacggatggcctggctggcggtggtggtcagttacaaggtgaacggcgtgtcggaactgcactcccggctgatggtggagtcgctgtttgccgatttcgccagaatctttccgcgccgcttcaccaacgtgactaacggcgtcacgccgcgccgctggctggctgccgctaacccgtcccttgccgcggttctggaccgccatatcggccagacctggcgaacggatttaagccagctgagcgaaatgggggaatatcaggattatccgctggttaaccaggccgtcagcgccgccaaactggcgaataaacagcgtctggccgattatatcgcccgtcagctgggcgtggtggtgaacccgaacgcgctgtttgatgtgcaaattaaacggatccacgaatataaacgccagctgatgaatgtgctgcatgtgatcacccgctacaaccgtatcaaggcggacccgcaggccgaatgggtgccgcgagtggtgattttcgccggcaaagccgcgtccgcttaccacacggcaaaacagatcatccatctgataaacgacgtcgccaaagtcatcaacagcgatccgcagattggcgacagactaaaggtggtgttcattcccaactacagcgtcagtctggcgcagatgatcattccggccgcggacctttctgagcagatttcgctggcagggactgaagcctccgggaccagtaatatgaagttcgccctcaacggtgcgctgaccattggcacgctggacggcgccaacgttgagatgttggagcacgtgggtgaggacaatatctttatcttcggtaataccgctgcagaggtcgaggcgctgcgcagcaacggttatcagccgcgtgattactacgaccaggatcaagagctgcgccaggcgctgacccagatggggaccggggtgttcagcccacaggagccgggccgctatcgcggtctgctggattcgctgatcaactttggcgaccactatcaggtgctggccgattaccgcagctatgttgactgtcaggacaaggtggatgcgctctaccgaaccccggaagagtggaccgccaaagcgatgctcaacataacccacatgggctatttttcatcggaccgtacggtgcgggagtatgcgcaaaagatctggtatatcgacaaaacgcaactctga

SEQ ID NO: 180771 - DNA, 1407 bp, Klebsiella oxytoca
atgttcccgctgttaaaaacgggcggactggccgacgtcaccggcgcgctcccggcggcgcaaattgccgaggggctggatacccgcgtgctgctgcctgggtttccggcgatccgcaacggggttcaggatccgcaggtggtggccagcagggagacattcgccgggcggatgacgctgctgtttggccattttaacggtgtgggcatctatctgattgatgccccgcatctctatgaccggacgggtaatccttatcataaccagcagatgcaggattatcctgataacgtcctgcgtttcgcgttgctgagctgggtcggggccgagcttgccggtggtcttgacccgttctggcgtcctgaaatcgtccacgcccatgactggcacgcgggtctcaccccggcttatctggccacccgcggcaacccggccaaatcggtgtttacggtgcacaacattgcctatcaggggttgtttcaggcccggcatatggcggagatcgcgttaccgtggtcgttcttccagatgcacggggtggagtttaatgggcaaatctccttccttaaggcgggtctctatttcgctgaccatatcaccaccgtcagcccgacatatgcccgtgaaattaccgaaccacagtacgcgtttggtctggaagagctgctgcggcaacgtcagcgggaagggcgactgtcggggatcctgaacggggttgacaaaaatatctgggatccgcgccgcgatccgctgctggcagcgccttacgaccagaattcactggcggagaaagcgaagaacaagcagcagctgcagacgtcgctggggctgaaggcggacgatcgggcgctgctgttcaccgttgtgagccggctgaccagccagaaggggctggatcttctgtttggcgcgctgccgggaattatatctaagggagggcagctggcgctgctgggatccggggacccggatttgcaggcccgttttctgaccgccgaggcgcaataccccgggcaggtgagtatccggatcggctacgacgaggcgctgtcgcatcagatgattggcggcgccgacgtcatcctggtgcccagccgttttgaaccctgcggtctgacccagctttatggtctgcgctacggcacattaccgctggttcgccgtaccggcggactggcggataccgtcgccgactgttcgctcgaaaaccttgttgacgggctcgcgaccggatttgtgtttaccgacagcgagacggaatcgttattacatgctatccaccgggccagtgtcctgtggtcgcgtccctcgctgtggcgttacgtgcagcggcaggcgatgagcatggattttagctggcaaagtgccgcaaagtctttccacctgttgtatcagcgtattatttaa

SEQ ID NO: 180772 - DNA, 1284 bp, Klebsiella oxytoca
atgagtaaacttgaatatactgacaacttaatgctgtcgcgccagttaccgcttaaatccgtggccctgatcctcgccggcggacgtggcacacgattaaaagacctgaccactattcgcgcaaaacctgcggtgcatttcggcggtaaattcagaattattgattttgctttatcgaattgtattaactccggaataagacgtatcggggtcattacacaatatcagtcccattcactggtgcagcatattcaacgcggctgggcattctttaacgaagaaatgaatgagttcgtggatttattaccggcgcagcagcgggtgcatggtgagaactggtatcgggggacggcggatgccgtgacccagaatctggatattatccgccgctatgatgcggaatatgtcgttattctggccggggaccatatctataaacaagattattcgcggatgctgctcgatcacgttgaaaaaggggcgcgctgtaccgtggcctgcctgccggtcccggttgaagaggcaagcgcttttggcgtcatggccgtggatgagaatgacaaaatcattgaatttgttgaaaaaccggctaatccgcccaccattcctggcgatgaaacccgctcgcttgccagtatgggcatttatgtgtttgatgcggaatatctctaccagctgctggaagacgacgatcgggatgaacactccacccatgattttggcaaagatattattcccaggataacggcggcaggtgaagcgtatgcgcatccgttcccgcgctcctgcgttcagtcggataataatgccgagccatactggcgcgatgtcggaaccctggaggcgtactggaaagcgaatctggatttagcctcagtagtgccagagctggacgtttatgaccgtaactggcctatccgtacctatgtcgaatcgctgcccagcgccaaatttgttcaggaccgttccggcagtcatggcatgaccatgaattctctggtctccggcggctgtattatttctggctcggtggtggtgcagtcggttctattttccagagttcggattaactcgttctgtaatattgattcgtcggttttattaccgggcgtctgggtcggtcgctcctgcaggataagacgctgcgtgatcgaccggggatgcgttattccggaggggacggtgattggcgaaaatgccgttgaggatgcgcgacgcttttatcgttcggaagaaggcatcgttctggttaccaaagaaatgctggacaaacttgaggtatga

SEQ ID NO: 180773 - DNA, 2193 bp, Klebsiella oxytoca
atgtctgattataatgaaaaaagtgcgatctccgcacttctcgcaggtcattgttccgatccattttccgtgcttggcatgcactcaaccgatgcgggtctggaagtgcgcgcattattacccgatgccaccgatgtatgggtgattgaaccgaaaaccgggcgcaaagtcggtaaactcgaatgcctcgacacacgcgggttctttagcggcgttctgccgcgccggaaaaatccttttcgttaccagctggccgtcacctggcacggtcagcaaaacctgattgacgacccctatcgctttggcccgctgctgcaggagcttgatgcctggctgctcgctgaagggactcatctgcggccctacgagacgctgggagcccatgccgacaccatggacggcgtcaccgggacgcgtttttccgtctgggcgccgaacgcccgtcgtgtgtcggtggtcggacagttcaactactgggacggccgccgccacccgatgcgtctgcgcaaagagtccggcatctgggagctgtttgtccccggcgcgcataacggccagctgtataagttcgagctgattgacgcccacggccacctgcgggtgaaatccgacccgtatgcctttgaggcacagatgcgcccggaaagcgcgtcgcttatctgcggcatgccggaaaaggtcgaacagccacagtcccgtcagcaggccaaccagtttgatgcaccgatttcgatttatgaagtgcaccttggctcgtggcgccgccacgccgataaccatttctggctcagctaccgcgagctggcggaccagctggtgccttacgcgaagtggatgggcttcacccatctggagctgctgccggtaaacgaacatccgttcgacggcagctggggctatcagcccaccgggctgtacgcgccgacccgccgttttggtacccgtgaagacttccgctacttcctgaatgctgcccatgccgcgggtctgaacgtgatcctcgactgggtgccgggccacttcccgtcggatgactttgcgctggcatcgttcgacggcaccgcgttgtatgaacacagcgacccgcgagaaggttatcaccaggactggaatacgctgatctacaactacggtcgccgtgaagtcagcaactttctggtcgggaacgcgctgtactggattgaacgcttcgggatcgacgccctgcgcgtggatgcggttgcgtcaatgatctaccgcgactacagccgcaaagagggggagtgggtgcccaatgagtacggcggccgggaaaacctcgaagcgattgaatttctgcgcaataccaaccgtgtgctcggtgagcagacgccgggagcggtcacgatggcggaggagtccaccgacttcgccggggttacacgaccgtcttcgacgggcggtcttggcttctggttcaaatggaacctcggctggatgcatgacaccctcgactatatgcagctcgatcccatctatcgtcgttatcatcacgacaagatgaccttcgggatgctctacaactacaccgaaaacttcgtgttgccgctgtcacacgatgaagtggttcacggcaaaaaatcgattcttgaccggatgcctggcgatgcctggcagaagttcgccaacctgcgcgcctactacggctggctgtttgccttccccggtaaaaagctgctgtttatgggcaacgagtttgcccaggggcgggagtggaaccacgacgccagcctcgactggcatctgctggaagggggcgacaactggcatcacggggtgcagcgtctggtgcgcgatctgaaccatacctatcgccaccataaggcactgcacgaactggattttgacccctacggctttgaatggcttgttgtggatgaccatgaacggtcggtgtttatctttgtccgtcgcgataaagccgggaacgagataatcgtggcgagcaacttcacgccagtaccgcgtcacggctatcgcttcgggattaaccagccggggcgctggcgtgaagagctgaacaccgactcgatgcactaccacgggagcaacaccggcaacggcggctgcgtggcaagcgaggcgatcgccagccacggtcgggagcattcgctgtcggtgactctgccgccgctggcgacaatctggctggtacgggaatctgcagggcaataa

SEQ ID NO: 180774 - DNA, 837 bp, Klebsiella oxytoca; identical to SEQ ID NO: 137381

SEQ ID NO: 180775 - DNA, 294 bp, Klebsiella oxytoca; identical to SEQ ID NO: 102300

SEQ ID NO: 180776 - DNA, 1548 bp, Klebsiella oxytoca
atggccagaaaacctaaagaaatcaaaacagacccgttagaggtcatcctgtggaaagcggcagacaaactgcgtaaaaacattgatgcagccgagtacaagcacgtcgtactaggcctcattttccttaagtacatttctgattcttttgaatctcattatgagttgctgaaagccggtaaaggcgagttcgcaggtgctgatccggaagacaaagacgagtacaccgcttacaacgttttctttgtccctgagcttgcacgttggaactatctgatttctaaggccaagcttcctgaaatcggtaagatggttgatgatgcgatggagcttatcgaagcgggcaatccacagttaaaaggtgtgttgccgaaagtctatgcccgacaaaacctcgacgccactgttctgggtgagctgatagatctgattggcaacattgcactaggagatgccaaagcacgctctgctgacgttttaggtcacgtattcgaatacttcctaggtgaatttgcactggcagaaggcaaacaaggcggccagttctatacgccaaaatctattgtaagcctgctggttaacatgctggaaccctataaaggccgtgtctttgatccctgctgtggttctggtggtatgttcgttcagtcagaaaaatttgtagaagcacatcagggaaatattgacgatatttcgatctatgggcaggagtccaaccagaccacttggcgtctggcaaaaatgaacctggcaattcgtgggattaattctgaacacgttcgctggaataatgaaggttcatttcttaacgatgctcacaaagatttgaaatctgattttatcatagctaacccaccgtttaacgtttccgactggtctggtgagcagcttcgtggtgatgcccgctggcaatatggcattccacctgctggcaacgctaactttgcatggatgcaacattttttgtatcacttgtctcctaaagggcaagcgggtgttgttctggcaaaaggggcattaacttctaaaagctctggtgaaggtgatattcgtgctgcactggtaaaagatgccaatgtgattgactgtatcgtcaacttaccggcaaagctgttcctgaatactcagatccctgctgcattatggtttatgcgccgtgaccgtcataacagcaaccagtatcgtgatcgtagtaaagaaattctgtttattgatgcccgtaatctcggtcatttaattaatcgtcgtaccaaagtactttctgacgacgatataaaaaccatcgctgatacctatcataactggcgtaacaaaggtggcgactacgaagacgtcgctggtttctgtgcgtcagtagacattgctgaagttgctaaactcgattatgtgctgacacctggccgttatgttggtcttgctaatgaagaagacgatttcgactttaaagaacgctttacggctcttaaagctgagtttgaagcgcaactggaagaagaggcgcgtctgaacagagccatcgttgataatctggcgaaggtggttttatga

SEQ ID NO: 180777 - DNA, 1194 bp, Klebsiella oxytoca
atgagtaggtggagaaatttttgtataactgaattagcagatttttgcaacgcacaaagaattcctttgagtgctatggaacgagcccataagaaaggaaattttccatattatggagcgtcaggaattgtcgattatatcgacaattatatttttgatggcagctacatccttatttctgaagatggagaaaacttaaagtccagaaaaacacctatagcatttgaagctactggaaaattttgggttaataatcacgctcatgtccttaaagctaaaaagccccatttaacggcattgataatccaatatttttcacaacttgatctatctccttatttaacaggtgctgctcaaccaaaattaaataaagcatcgctaaatttgattcctctttacttaccaattgatgaatctgaacaaaaagccatcgcctctattttgtcctctcttaaagacaaaatagacctgcttcatcgccagaataaaactctggaatccatggcagaaaccctatttagacagtggtttattgaagagacgcatgcggattgggaaataacgactcttgattgtcatattacagtagctaagggattaagctacaagggagccggccttaccacgtcagataacggcattccactttttagtttgaactcagtacttgagggcggtggttataagagtgcaggtataaaatactacaatggtgattttaaagaaaggcatattataaagcctggggatatcattgtagccaatacagaacagggccatgaatatcgactcatagggtatcctgctataattccaaaaacagaaagcgaattatccatatatacgcatcatttatttaaaatcagcatcaatgacgatagttacttaaccaatgcttttctgtactatttactttgctccaaagatatgcatgagcaagttgttgctgcaactaacggttcaactgtaaatcagctgtcggctgacggattacaacgcccagaattcaaactccccccggagtgtatggtgaaagaattcactacacagattgatttcttctggaaaaaaataagtattaacaactcacaaattaaaaacatagaatctctgcgcgacactctccttcccaaactgatgagcggcgaagtacgggttcagtatgcggaagaagcaatcgcatcagtagcataa

SEQ ID NO: 180778 - DNA, 3240 bp, Klebsiella oxytoca
atggcaaagatgaccgaatccgatattgaagtaatggcaattgagcacctgcaagggctgggctatgagtatgtttacggcccggacattgaacccagtggaatcaatccgttacgtagctatcagcaggttatccttgaagataaagtgcgtacagcattgcaacgaattaacccgcaccttagtgagcagaagtgtgaagaagctctaaaacaggtgatgcagatcagctcacctgacctaatggcaaacaatctaacctttcatcgccttttgaccgaaggaatcaatatcgaagtcagcaaggatggtaatacacaaggagaactggctagcctgatcgactttaacgatcccactaataatgcatttctggtcattaatcagctcaccatcaaagaaggcaaccatacccgccgacctgatcttattttattcatcaatggcctgccattagtcgttatcgaacttaaaaatgccgctgacgaaaatgcaacggtaacaggtgcctataatcagattaaaacctatcagaaccaaatccccggtctgtttaactacaatgcttttaatgtgatatctgacgggctggaagccaaagcggggacggtttctgccgatttcagtcgttatatgacgtggaaaactgctaacggtaaaacgcaagccaccagtacccaaccacagcttgaagttttattacaggggttgcttaatcctgtaacgctgctggatataatccgccactttatcgtgtttgaggccagcaaacatgaagacagcaaagggattatcagtatccgtactgttaaaaaaatggcggcttatcaccagtactacgcggtcaatgcagcagttctttccactattcgtgcctcagcggtgaatgcggactccccctctgccgaagtggcactgcgccagcagggacgtaacagtaaagatcttgttaatgcgcaaaaaaccggagatcgcaaagcgggcgtagtctggcatactcagggttccggtaaatcgctttcgatggtgttttataccgggaaaattgtgctggcgctggataatccgacagttgttgtgattactgaccgtaacgacttagatgatcagctattcggtacgttctcttccgcgacccagctacttcgtcagacaccaaaacaggccaacaaccgggaagaactcaaagaatatttgcgtgtcgcctctggcggtgtggtgtttactactattcaaaaattccagcctgatgatggcagcaatatctatgagttgttgtcagacagaaccaatattgtcgttatcgctgatgaagcacaccgttcccagtacggtttcagcgccaaagaagttgacgtgaaagacagcgaaggcaacgtaacaggtaaacgcaccgtttacggctttgccaaatatatgcgtgatgccttacctaatgcgacctatctcggctttaccggaacccccatagaaaaaacggacgtcaacacgcctgctgtttttggtaactatgttgatatctacgatatctcgcaggccgttgaagatggtgcaacagttcgtatcttttatgaaagccgtcttgccaaaattgccatcagtgatgaaggtcgtcagcttattgaagactttgatgatgagtttaacgaggacgaactgacgctcacgcaaaaagaacgttctaaatgggccagaatcgaaggtttgattggcagttcaaaacgtattaaagcgattgcggcggatatggttctgcactttgagcagcgcttaaaatccaatgccgatcatggtaagggcatgattgttaccatgtcccgccgtattgctgctgaactatataaagaaatcatagccttaaaacctgaatggcacagcgatgatttaaatgacggtataataaaagtcgtcatgacctcttctgctgctgacgggccagaaattgccaaacaccacaccacaaaaaaagaacgtcaggttctggctaaccgtatgaaggatgacgacgacaagctgaaactggtgatagtgcgtgatatgtggttaaccggcttcgacgctcccagcatgcatacgctgtatatcgacaaaccaatgaaaggccacaaccttatgcaggcaattgcccgtgtgaaccgtgtgtataaagataagataggcggtctggttgttgactatctgggcattgcctctgatttaaaagaagccctctccttttactctgatgcaggtggacgtggagatcctgctgaggttcaggaagaagccgtaacgctcatgcaggaaaagctggaaatcctggaaggcatgatgcatggatacgattacaaagcttactttgccgcaactacctcacaacgcctgacaattattcttgaatcagaaaaccatattttagggctggataacggtaaaggtaaaatgcgtttcctcgctgcggttgcagccttatcgcaggcatttgcattggcgacaccgcacgataaagcaatggaagcggcacccgaagtagcattcttccaggcagtaaaagccagactgaataaatttactgaaaactcagacggatcagaagaagaacacaatgacagtctcgaagttcgggtaaaacagactatcgatcaggctctggttaccgataaagttgttgatatttttgacgctgctgggatacaaaaacctgatatttccgttctttctgaagaattccttcaggaaatgaaggattaccaacacagaaatattgctttggaaacgcttaaaaaactgctttctgacgagatcaaggttcgctcgaatcaaagtatcacccaaggcaaaaaactgattgatatgctgacctctgcaatcaatggctaccagaacaaggtactgaccgcagcggaggtaattgatgagctaatcaagcttgccaagactatccaggaatctgacagccttgccagccagttaaacctcagcgcttatgaatatgccttctattctgctgttgcagataacgacagtgctcgcgagttaatggaaaaggaaaaactacgagaactggcagtcgtacttacggaggctatccgcaacaatgtcagtcttgactggacagtgaaagaagcagcaagagcaaaaattcgcgtggtggtaaaacgtctgctcaaaaaatatggttatccgcctgatatgtcattgctcgccacagagactgttttgaagcaggctgaacttttagctggagaattaggaaaatga

SEQ ID NO: 180779 - DNA, 1587 bp, Klebsiella oxytoca
atgctgtcactggaagcatttgaaagaattaacagtttcttttcactcatggaaccacttgcttataaggggaccggtcctgtatttccctggcagacagacctgtcaggaaaagttctcctgggatacgacagtgagaaagaatgcattattggtgcaggtcttcttggggtagaaaaggtaaatgagctgatcctggttcagatgaaaaccgctcttcagcagcttggcctggctatgtacaagggggaaggacctgtttttccctggtttactgatacgacaggtaacaaagttctcctgggttttgatagtgagaaacagcgcgttgtcggtgccattgaggctacggcagacgcaccatcacggacagaaatgaaacccctgccgtctgagctacgaccagtggcaaagctcatgaatattatgctcggatacgggcaatcacttagcgtgggagcccagggaatcccggtgatatcgattacccagccttattcaaatctcacgttcggtagcggcccgcgtggcaacagtcacgactattcattgctttcacctctggttgaagataacagggcgtctcccgatggcggggcaaatcgcggcgaaacattttgttctggtgctgcaaattacgcatcaacactactggcagttgaaaacggaattgatccggcgggacatattatattcgcttcaacggctggcaaaggaggaaccaaaatagccgatcttgttaaaggtacggcctggtacaactctaattttttgccccatgttaacggcgcatacaatctgaacactaactcagcggttcatgctatctgctgggctcagggggaaacagataatgaccaaagtacgcccacatctttcgcgacttaccgctcataccttcagcagttgcaggtaagtgcggaggccgatataaaagccgttaacggacagacttcccccgtccattttctgacataccagacttcctacaagataagaaccagtacaggggttgcgctcgcgcaacttgatttagccaccaataacgaaaagtttcacttcgtatccccgtgctatcatttgccgttttatacagatggcacgcatctcaccaatgtgggttataaatggctaggggcatattttgggcgcgcttataagacgctcgttcatgatcaatgtttcccgcagttccttcgccctgtctcggccattcttcggggcaaggtattaacgctgacgctcgatcccccggtatcacctgtcgtgattgatacgaccaacctggctgttgctaaagattatgggttcatggtcaaaggtcgaaccaccgggagtgctattccgatttctgctatcgagactgctagtaaccaggtccgcttaaccctcacagaaattccgacagaagcggtaacgattcgctatgcgctcgattatctggggacaggactcaatattgtaaacggtgcttcagggaacctccgggacagtgaaccggctgtaattaatatacagggggtcgacagaccgttattcaatgtttgtcctcactttgaattaaatgttattaaggtaggtgaataa

SEQ ID NO: 180780 - DNA, 762 bp, Klebsiella oxytoca
atgtacgggttctttcaaacaccagtaatctattcaggcaacgatctgccagtcattccggaaagtgatattgaacgttatgaagtggtttatgaggctgatgcttatgaacactgggcattgaatggaagcaactcttctcttacaggtatggtaaacaggaaagtgctaacccgagtgggagatattaccgctgcggatggcatattctccatgcaggtgaatacaacggccaaacttggccttaaaagtgataaagcagacagtagagtgcagacacaatgcgcggtcattcgagtggattcaacgccttcctcatcgtcgtcagcatccattcttatgggcactttaaaccagagtgcgggttcagctgtctacatagacgaaaacccgttcattcgtcgtcagttcaggccaacgatcagcatcacaggagaaaagtcagctacaggactggcaaataaatggcttttcgttggcttctcagaaaatggtacggcttcaggtatgatttcgactgttctggttggcggagatactccctcgatagtcacgaaagattatgctcaggcaaaaaccgtcagcaccaactatgtcagtgtggggccaatagactacagcgcatccactggaggagctgcggtaaaactggacgttgcagaatacattgtttatgacaaggcattatcaccatcacaattgctcgcggtatatattcgttctaaaacacgactggctaatcgcggatttatgattgaataa

SEQ ID NO: 180781 - DNA, 3948 bp, Klebsiella oxytoca
atggcgaaaattgatgagctcaggcaggacctgatccctctcagtaagcagtacatgacgcttgcggcggcccaggcggatatcgcgaatatccccgaagggagcacaacgtattaccgtagccctgatgattccgcgctggctatcgaggtcattaacaccgccgggacgcttgtagcaactgggcggaaaatgccctctcaggaatcagtcaataaagccatcgaagatttattctttgctctgaacacacaaatcagtctggtgtccagtgaaagtaaggatatcgatgagctgtatgtcaggaacagagttcgcgatctcgacactgcaatttcagggtatttgacgcctcttgactacatcagacagtacggctctgaaatcgagtattcaaaatctcataccagtgatgctatttttaagcttgaatctctgtccctcgcgggtgctgcccgcctcagtaatttcaagatcgtcgattccctgggcgtggcggttagcatttctgtgctggaaggcgaatcaattacaggcccggtcaggacctcaagctatgtggagttcgccctaaatccggccagtttccatgatatggggatcaacactgataccgggtttaccattgtccgtattgatgttgctctgggcggcagtctcccgtccgatacaacccgaatcatccgcgaccgctccggtcgttttgcggcttacacaccaggtaccatatacggtgggactaccgaaggggtgacatattcagcatcggtaaaaggtttgttgcttaaattaagcaacaagacaatcacagacgctgggtttgcgcttacaactgaaggcgtgatctcgtacattaaagaaaacctgacgggtttcgtgttctcacaactgacagcagattcagtatcaacgccgttctgcaatgttttccgcgtggcagcgggtactgtaactgtaacgtctaatggagtggctgactcagacaaaacagtaatgtgcgtgggcacattttatgtcagcaaagtctcatccaaaactaaaacatcagcccagcttgccgtctctcgtttagctgaggatgttgcgaccatagaatcggtcgtcgagacggggaaaatacgaaccctggcgcctgagaatgacggtttcactgtaaacatcgcgaatgtggccacggtcggaaatgccgcattactgtcggttgacacaatcgcagacagccgttttgtactggacaagttcgcgctggccaatgtcgccagacgaaccatattgcggatggttgacggtctcggcaccgcacaggaactcgtattcctggaaggtgagtacaccgacgcacagtcgctttactcaccatacgtcgatttcatcttcgagccacgtgaattttataacgtgtttgcagacactgataccggttatacgtccatggatatcgccgtgacattaccgggtacactgccgtctgataccactcgaatcatccgcgaccgggccggagtatggggggcttatacaccggtgacgattaaatccggcaaaggtataacctataactcggccacaggtcggcttatcctgaacgttcctaacgcggaaataatggtcgcaggatacgacctttcccagaaagggatcatttcctatgtcattgataacctgtccgggtatcgtttcagtcagctgagcgccaccgtttctgccagaccgttctgcaatgtcttcgtgctggctgcaggaacagtatcggtcctgaccgatggtgccgctgcatccgataaagtggtcactatgtcgggacggctgttttctaagcgctccggctccggcatgaacagcctgtataaacgtctcatctgttctgtgtctaataatcttgatgtcgtcaccgggttgcgcccggtatacctgaaatgcaaatttggtcccggagaagttatttctgaagactgcctggttgtcaaagatactgccggggtggtgtatccgtctcagtgggatggtgagcaggatttcaatccacgccgcaatgcaacagccggatactggcctgatggctcgctgcgatgcggatcgctaatcatttttgacaatatccaggccaatagctcgaaggattatgtgcttgaagcgcacccggccccccagacacgcaacgttttctcgcggtgtacccgggagacgcagacaagcctcctggtgaccgcagatgatggcacgcaggcgcgttttgacagtgttgtcggctggctgttgtacaagctgaatcgcgacggaaagacttatagctatatctgccagcatctgctgattacacgcgtttctggttcagcaaccacatacagttgcggctatgctaatgcccggtatcgtgtgttaagcgatggtcctctgttcaccgaagtagagaccacatttaaaaatttcgtgcaaccggcctatcccacagtcgataaacagtacctcgaaatgaggtaccgcactaagatcttcaaaaatggctatatcaaggttgacgcgcagcaccgtctgctgatggacctcccggataacaccctttacggcagcgaatgccgtgttcagcttgattcttcggaggctaaaacctaccgcgcggggtataacagcatctggacggacaatgctgtcagacgcagtatctcactgcactatgcaaatggcgatgtccgacgggatgatggtgagattaataccctggcccaacgcccgtcagtcattaacattaccaccacgtcgtcatatacgcgtgcagatgtgggatgggcgcaattcagcagctcgatactgggtgcacctaaggactgggcatggacaatgggtttttccatcaacatgaacgaaccggaatccgataatgttgtcctgtctaatctggagcataaccctgtcaccggatttgcgtcggcggtgtcgctgtatcctcgtattcgcacagccgcgatcatggctaaactggcaaatctgatttccggtatcgtgtcctggtctgaactggatgcatcaaccactgacacagccaatggggcgttcaatactctggcaggatcgttagtccgtcatctctattcaggccagggctctttcgatgctgagtacgcgaaattcgatgcatgggccactgctatgtacggtgggataggaagcattcacatggggagcgctgatgaatacaagggattacagttcgccagcaggctagtccttccgcaactgaactggttctatcaggttgcattgaaaaaaggcgatacagcgaaagtggcggagttgaaagtggccattgcaaatatggcgtctgactgccataacgctttcggagggatcgggaaagctaactcgaacttttacgcagcatcccatcgggcatggggtcttgcagtgatggcggggcttgacccaagcggaacttacgcggctgacatggatatggtggatggccagttctcctcttcggactacttcgaaggtgttaccaatattattacggataacccgcgggagaatgttggtggtatgcgttacctgcattaccagatgtatgcgtataacaactatttgctgggatgcaaagcggctgaccggactccagtaattgacatgaagacgtatatgcttaatgccatttctgcttacggtggtctgcgtgaaattgatttttgtgtcgcagagtcacggcgggggaacccgaccacagtggcgtttatgctttacccgttgttgcattcaggggatgtatcttgtctggatgctgctgacagagtgttgaacgctttcgaggaatacgcgggttctaatacgtccggacaaataaaactttgggatttgaattttctgtcagtaatcaccaccagtttttctgagtacacattcgcatgcaatattatggcagatgtgtggatgcagtactggattgataataactga

SEQ ID NO: 180782 - DNA, 192 bp, Klebsiella oxytoca
atgacgaaacaacagcaaacggcgctaaacatggctaagttcatccagaatcagtctctgctcctgctggagaagcttaacgagcttgatctcgatgtagaggccgacctttgtgagaaactccacgatgatgcggagcatcttttccgtacactgtcctcgagactggatgaattacaggatggtaactga

SEQ ID NO: 180783 - DNA, 423 bp, Klebsiella oxytoca
atggccagagtgtctattagtgaagcggcacggcttgttaaggttagtcgccccacaatttacaagatgattaacagtgggaagttaagttacacctctgttgtaaagcacgggaaggctattaaagttattgatacctcagagcttattagagtgtttggttctcttgatggtgtcatcgatactgtaaaatatgatgtaaaaagtgacgcagaatctacaggtgttaacagcgttggtttacataatttacaacatagaattgctttactagaagctgaaaacgatggtcttaaaggggctgttaaggctcgagatgagcatattgattcccttcgtcaggctatgcagcttctggagtacaatcacgaaccttcttcaccaccccattccccgtggtggaaattctggaaaaaatcctga

SEQ ID NO: 180784 - DNA, 201 bp, Klebsiella oxytoca
atgtttggttttggaattcaaggtactattaataaaggattttttcttcagatggctcgtagagatcaggatgcatttttgcaatatctctatgaccaagggtactcagcaaaagatatcagcaagaacttcgatattccggttcctagcgtctacaacagaatcaacgctcaccgaggccgtggacctcttcccaattaa

SEQ ID NO: 180785 - DNA, 429 bp, Klebsiella oxytoca
atgacttactctattgaggaaaaatggaaggctggcggtttgtctcttggctggactgcaatacctactgtcttgttttttatacagaacgagaaaaagctaacctccgtagcctttaacactctgcttaacctgatcgttcattggtggaatttgcaagaatggccgcatccatcaatggaaagcctagccatacgtatgggggtttctgtaaggacagttcagagagctatcaatgatctggaaaaagctaatctcttggacaagaaaccaacgtcgaagagtgatagccgatatggaggtcgtaatatttatgatctaacaaagctcgttgattacctggatacaatgggcccatcagtagctgaacaggttaagaaaccccgtcataaaagaccggtatataccgtaagaaaaacaacaatttaa

SEQ ID NO: 180786 - DNA, 171 bp, Klebsiella oxytoca
atgaaaaccgaacaacgtcatgatcttattaaagatactgaagtatttggcgtatccttgtctctgttgatttccagagcgaatgagaagtctgttacaatgccatctggtctaagtagggagcagagaagagcatgggcagcggagcaggtgcgcaaaatccacagttga

SEQ ID NO: 180787 - DNA, 429 bp, Klebsiella oxytoca
atgggcagcggagcaggtgcgcaaaatccacagttgaatattgtctcgttctctgagactttcaatctctattacacatcccgattttctgcaaaaacactcgataaaatcgatgatttcattgagcatttcgaaaaatataacctctttggcgatcctttaaaaaaacatccagcttggattggtaaagtatcgccgtcgtggaaagtgcctgatcattacgaaaacaaagaagctattgagctgcacgctagagctaacaagttatggcatgctcatttaggcgatccggttttcaaagatacgtttcatgggaaatacaaggtttctgactgggttatccatttccagcggctgacaccgaaccatataaagcttttagaactgggataccatgacccgatggaactaccccaaaactttgaatga

SEQ ID NO: 180788 - DNA, 897 bp, Klebsiella oxytoca
atgctgcctgaaaaaaatgaattcccaataattcaaattgagattgcaaaaataaaatttcttaacccacgaacaagaaataaggtagtgcatgaagaaataaaggaaagcataaaaaaaagaggattaagcaagccaataagcgtaagagctattgatgaaggcgatttcaaatatgctttaatttgtggtcaagggagaatagaggctctcgttgcattaggtgaaactattattccagcaattataagagatgtatcagaagaagatgcttacgttatgagtttagttgaaaacattgcaaggagaagaccacgttctaatgagttattacaggtgattaaagacatgaaaatcagaggactttcagactccgaaataagtgagattactggatattcatcgaactgggtgagcagtattaatatgctacttgataagggagagcataaacttctctcagcagtcgaacggggtaatttgcctctgtatctcgcagtgcaatttgcaagatgtgaaactgaggaagcacaagatattcttaccgaagcatatgataaaaaattaataaaaagtcgggacattataaagataaaacacattctaaatcaaagaacagttgggaataaaggtgcaaaagcagccggattttattatcacaaaccatcaaaaaggatgactgcagaggagttgattgagctttatgaaaatagtatcgctgaacataaatctgtttataacaactcaaaattcataaaaaccaacctactaatagtaaatgagatttttaacatcataatgatgaataaaagctttcaacatatacttgaacaagagaatctttcagaactaccatctcagatattaaccccagtaaacaaagaggtattaaaatga

SEQ ID NO: 180789 - DNA, 897 bp, Klebsiella oxytoca
atgattcagatacgttttggcgataattttatttacctggaaactaataagttaattccatctaaggaattattagaaaacgtaaagcgaagccataaatatcatcaaatagttacctctatcgaaagcttaggtattattgaaccaataatagtcttctatgacaaagataaagatgtcactaagatacttgatggccatttaagggttgaggctttaaaagacttaggtatagaaaaagctccatgtatactttcgagcatagatgatgctttcactcctaacaaacaagtgaatcatataaatgtagttgaagaacatagaatgataattaagtctctggcaaaagtatcaattgaaaaacttagtgctgctttgggcatatctgttgatgccataaaagataaagcgaatgtgatgaacggcatagatccaagtgtaattgcgaaactttctgataaacctatacctaaggctacatttgacgttttgaggaaaatgaagccaattcgccaaattgaagcagtcggtacaatgattaattttgataattatagtaaaaaatttgcaatgagcatcttggatgcaacaccggcatcgatgatagtaaataaagggaaaaacactccctataaaaaggacataaaaaaaaccatacttcgtctggaacaagaaatggcaacaacttcggaagaaacgaaaaagcttcaaaccgagtatggttcagatatgttgaaattcgttataatccagtcatatattaataaattacttggcaattctaaagttcttcattggttcttagaaaacgaggttgattatcttaatgagttaaaaagaatttctagaataaattctttggatgataagactcttactgaaaacagcaagtcatag

SEQ ID NO: 180790 - DNA, 1398 bp, Klebsiella oxytoca; identical to SEQ ID NO: 101139

SEQ ID NO: 180791 - DNA, 279 bp, Klebsiella oxytoca; identical to SEQ ID NO: 101140

SEQ ID NO: 180792 - DNA, 477 bp, Klebsiella oxytoca
gtgttttcacgggtcagcgatattgccttcagcaacagcgatgtggtgattgtggagtcagagctgaacaccggcgatgccgaacgtctcaagtacctacacatttcaccggtcaatcttatctttttattaaaaccggcgtcaggaatgagcgggacagggcgtgaagcggtatgcattgacactgaattaagcggtaatgaatatctcatgatgaggcaggcgtttaaaaaaatggggatcaatctgaagagggacaagttgtcatttaccaaaagagaaacacatgttatcaatatgattttaaatggttattcgatagatgaaatttcccgtagcctgctgatctccaaaaaaacggttcagtcttttgtcggtattgttttgcataaactgaataccaccaaaataagtggaatataccgcaaaaaaaatctcatcatcgacagttttgccaggaggagcctgcatcgttag

SEQ ID NO: 180793 - DNA, 987 bp, Klebsiella oxytoca
atgatatcaagagaaaataataaaaataacctattccgtgtaaagtctaaaaatggtgtccttcgttgccttaaggctggcatggatataaatatgtgcaatagtaaaggtcaaactgctctttttacctgtaatgtacctgaagctatacaggcaatgattgacgctgacattgacattcaccactttgataatgacggtaataatgcattattctatgctcaaaatgttgaaacagtggaacttcttgtcagcaatggtattaatgttaaccaccggaataagtcaggcacccttgcgattcaacatattgatgtttcaccagggttagtaaaatatcttatcaaagcaggactagatatccataccaaagatagctatggcaattcctttcttttcattccatttgaaggatatgtgtacgatgcactaattgaggctggttgcgacattaatcataaaaatataagtggacagacagcattcgatcactggcagtcagaaaataatagcatagttggtaaatatacgcactgggaatctaaaaacgataactacattcgttttcttatccgtaatattcatcttaaagacagttcaaaaattgtattcacgaacattacatttaaatcaattgagctgttgtcgttacttataaagcaaaaaaatgaatttgagataagtgataagtgcattatcacaccaacaaatgccgacgctaaaaaattaattttacaactaaagaagctgacagacattagtcatgtttggttttacataagcagtacatatctactgacgcactatgcaggaagactgctaattaaatggttaatacgtaatgatataaaagttgatatagaatcgctaaaagaacgctacttttatgaagaaatcctccaggacaaattacagagagagcaaaaggttttacgaacaacgcttcaaccagttacctgtaaagcaattacaaaaaaaagattatga

SEQ ID NO: 180794 - DNA, 1359 bp, Klebsiella oxytoca; identical to SEQ ID NO: 101137

SEQ ID NO: 180795 - DNA, 396 bp, Klebsiella oxytoca; identical to SEQ ID NO: 101138

SEQ ID NO: 180796 - DNA, 264 bp, Klebsiella oxytoca
atgacggacaacctgtaccttgaacgactggtatccggctgccgtcgccatgatattcaacacagacagatcaaactggagatcacggaagattcgcgctctgaatcaggtctgatagccgcattctgccagcaagctaggcaacatggttttatgatttcactggatgatttcggcacgggaaccgccaatattggggtccgcttggaaaacggaaattatcctacgctaagcctgttttttgtacatattactattcactga

SEQ ID NO: 180797 - DNA, 855 bp, Klebsiella oxytoca
gtggttatcgccgccctggtcgtaatcgacgcgctggtagcccgcttccagccaggtggagtgcacatcgttccagaagtacatcggacggacaatggcgccgtagtttttacggttatcggtgttgtccttgccgttgtcatagtcgtggaaggccagcagatattcgatctgcgcctgccgggtaaatttatgcagcccttcaaagctggcgtaaatcgcggtcaggtcatcggttttgttgtagacgctgttatccgagttatcggagtagcgcaggatcactttattgacgccgctgtcgttggtgtggctcagcaccagcccgccctgccaggcgtcgagacgttcgtcgctgtccaccgctttcgaatcgaaaccgtagttggcgtacacctcaacgtcgatcggcccggccttgatgttgtgggttttggtggtcagggcgtagtggccgttatcgccggtaccggagccgccggtacaggtgatgcgcgacgggttggcctcgtccgccatcacttccgggctacaggactccacctgcgacactcccgccacgtcaaactgcacgccgccgatatcaaagttcttcaccccggcgccctggccgtcgtggttcatccagaagtagtcgttgatcccctgctgcgggcgctgatggaagtcgcggccggcccagatataggcgttggggttagactccagcacgttggtgacgccgacgtaggcttttttcaggttaacttcatcgctccagtggtcaaacatgacgttgatatcccagatcgcgcctttactgctcttgaaggctttagttatctggaattcgccgccgttgccttcgttgcctaa

SEQ ID NO: 180798 - DNA, 882 bp, Klebsiella oxytoca
atggatagcgcacgcgcccttgttgccaaaggacggggaatagccctggtcagccgcaccatgggcgtgtcgcgtgcgcagctgtcactgcggattaaccgttctgccgactggcaggacaagcgctgtaaccggcgtaatgacgaagcagacgaagaaatactgtcggctatcctcgacatcatcagcgatatgccgagttatggttatcgacgcgtgtggggcatcctgcgcaagcaacgtcgcacagagggacagccacctgtgaacgccaaacggctttacaggataatgagcgagcataacctgttgttgttgcatgacaaaccagagcgaccgaagcgtgaacataagggcaagatagcggtggcagaaagcgatatgcgctggtgttcagatggcttcgagttcggctgcgacaacggcgaaaaactgcgggtaacgttcgcgctggactgctgcgaccgtgaggccatagactgggcagcaagcacgggaggctatgacagttcaaccgtgcaggatgtgatgctgaggtcggtggaaaagcgcttcggcgacaggttgcccgatacagcggtgcagtggctgacggacaacggttcagcgtataccgcgtatgaaacgtggaggttcgcgagagagctgaatctggagccctgcacaacagcggtgagcagcccgcagagtaatggcatggccgaacggttcgtgaaaacgatgaaagaagactatatcgcgttcatgccaaaaccggatgtgagaacagcactgcgaaaccttgcagtagcgttcacgcattacaatgaaaaccacccgcacagcgcgctgggatatcactccccgagggaataccggcggcagcggacatcgttaacttaa

SEQ ID NO: 180799 - DNA, 396 bp, Klebsiella oxytoca; identical to SEQ ID NO: 100678

SEQ ID NO: 180800 - DNA, 594 bp, Klebsiella oxytoca
atgagtggtcaagattacccaattagggaccgctcagagtttttagaattgctaagcaagaataaagaatatattactattatgcaaggatttcaccagactaaaccagaggatcgcatcagatatcattactttgattgttttgatagacgtagtaaatcgttaaaaacagtaatatataagctagctgaaaggtttttaagaattatatatcggaagaaaaattacccctttagcacaatttatcatggatcgacatggtgtgccctctcgggatcatgtgttgattatatacttgattttatggataaaaaccctcactttgttgacttttttaagacatcttggtgtgccgaagagtctttctttccgactattataggtaattctgatttcattaataacgtgagtcctggtatttggtatactgattgggaaggtgtaaacccgccagtagctttgactgagaagcatatttcattatttaaagaaaatgatattttttataataaaacatacgatattacatattgtccttattttgccagaaaatttaatgatggtaatcaagatgtcagaagtcttctagattga

SEQ ID NO: 180801 - DNA, 435 bp, Klebsiella oxytoca
atgggactttacaggagttcatcacatgtatattggcgttgcaaataccacatagtctggacacccaagtaccgattcaggatcctgaaagataagctgggtaaggagctgtacaggacgatctatatcctctgtggaataaaggattgtgaggttctggagctaaatgttcagcccgatcatgtacatctggtcgtcatcattccaccaaagatctcgatatcaactctgatgggccatctaaaaggacgcagtgccatcaggctttataaccgttttccacatatcaggaagaagctatgggggaatcatttttggtcgcgaggctactttgtcgatacggtgggagtgaatgaagaaattatcagacgatatgtgaggcatcaggagaaaacggaacaaacgtatgaacagcagatggaattgctagagtaa

SEQ ID NO: 180802 - DNA, 267 bp, Klebsiella oxytoca
atggcgacgctggggcgtcttatgagcctgctgtcaccctttgacgtggtgatatggatgacggatggctggccgctgtatgaatcccgcctgaagggaaagctgcacgtaatcagcaagcgatatacgcagcgaattgagcggcataacctgaatctgaggcagcacctggcacggctgggacggaagtcgctgtcgctctcaaaatcggtggagctgcatgacaaagtcatcgggcattatctgaacataaaacactatcaataa

SEQ ID NO: 180803 - DNA, 390 bp, Klebsiella oxytoca
atgaaaaaaataattcgctgggttgccgccgcaacgattatcggtgctctggcaggctgtgcccgtacagcgcccattgaacaaatccatacaacagtaagcgcaggccataccgaagccgaggttaaaaatgcaatcatcaaggcaggtgcccagagagaatggattatgtcagacgctgggccgggggtgatcaatgcccgccaacaaatacgcgaccatattgctgaaattaaaattaactattccgcaaccagctattccatcaactatgccagcagcattaacctgatggcctccggtggaaaaattcatagaaactataaccgctgggtgcacaaccttgataaagatattcaaattacccttgccgcggactcagctcggtaa

SEQ ID NO: 180804 - DNA, 1062 bp, Klebsiella oxytoca
gtgtacaaaaaggacactctcagcgcactggatgctattaccgaagcgcagcggattgcttttgcccccatgctttttcaaactgcattatgcctacgcaactcaggcgtactagattacctcgaccatcaaggtaaactcggtgcgacgctggaggctatttgtgagcattgcaaggtcaatgaatacgccgtcagcgtattgctggatatgggattaagtggacgtatccttactcataaaggagagtgctattatctcgctaaagtaggacatttcttacttcatgatacaatgacccgggtaaatatggatttcacacaggatgtttgttatcagggattgttttttctggaaaatgcgctccaggaaggaaagccaaccgggttaaaagtatttggcgactggcccacgatttatccagccctggcacagttaccgcaggcggcgcgtaaaagctggttcgcttttgatcattactattctgacggggcattcaatgctgcactgccgtatgtattcgccagccagcccgcaaccctgtacgatgtaggcggaaataccggaaagtgggctttacgctgctgtcagtatgatgaaaatatcgcggtaacgttattagatttgcctcaacaaattgcactggctcgtgaaaatatagaaaatgcaggccttacccaccgcatcgatttccatgctgtggatatgctgagcgacgcgcaccttcccggggaagcggatgtctggtggatgagtcaatttcttgactgcttttcaccagaacaaattatcaccatgctcagtaacgtggcgcgcgtgatgaaacccggcgctcgcctgtgcattctggaactgttctgggacgcgcagaaatttgaagctgcatctttcagcctgaatgcgtcttcgctctattttacctgcatggccaacggttacagccggttctacagcgtcgacaagttttatcgctatctggaaatggcaggattccaggtagaacaacgtcaggataatttaggcgttgggcataccttattgatatgccagaaaataaaataa

SEQ ID NO: 180805 - DNA, 723 bp, Klebsiella oxytoca
atgacattttcatttaacataattgactggcaagccatggctcctggggtcagtggcaccgaacagtggcaaaagtggtcacggcatttgcacgccatcgaccccacggcaccgttggctaagctcagcgagctgccaatgatgacggcccgccggctcagctccggtagtaagctggcagtcgagtgcgggctggcaatactccgtcgccatgagatagatgccgtggtgtacaccagccgccacggagagctggagcgtaactaccggatcctgcacgcgctggcgacagagcaggcgctctctccaaccgatttcgccttatccgtgcataactccgccgtaggtaatctgactatcgccgcgaaaaagccgatcgtttcatcgtcgctctccgccggccgcgatactttccagcagggattgtatgaagtcatgggtctgctgaatgcggggtaccagcgtattttaatagtcgatttcgacggtttcctgcctgttttttatcacccgcagctaccacctttgatgcccacctggccctatgcaacggcgtggattattgaggctggtagcgaatggcagtgtaaaacccaacgctgcgaggttggcgaggagagcgagctaccgcaaagtttgctgtttttacaacactatttgcagaataccagcacattcaccatccccggtgagcgcgtgcagtggcagtggtgccgctcatga

SEQ ID NO: 180806 - DNA, 771 bp, Klebsiella oxytoca
atgaccggcttttgtttcgcgcttttcgggcttggcgggctgctgctctcgcttgtctggttcaatctgctgctggcaacgattcgcgacaaagcccgtcgccgtcgactcgcacggcgcagcatttcagccagtttccgattctttctcaccgtggtaaaagccgttggtgtactcgattttcgcattgaaggcggcgacgttttgcgccaggagcgcggttgcttgatcgtcgccaaccaccctagcctgatcgattatgtcatgctcgcttcagtaatgcccgaaacagactgcctggtgaagagcgcgctgctgaaaaatccgtttctcagcggcgtgattcgcgcggcggattatctgattaacgatcaggctgatgccctgcttccggccagcagccagcgtttacaacagggtgacaccattttgatttttcccgagggaacgcgcacgttacctggcgaaaaaatgacactacagcgcggtgcggccaatatcgcggttcgctgcggtagcgatttgcgcgtagtcgttatccgctgtaccgagcatatgctgggcaaacagagcaagtggtatgatgctccgccaacgaaaccacgctttaccattgcggttggtgagcggctacaaatcaaccaattttacgatgcaaacttacaagaaccggcgctggcggcaaggcagttaaaccggcatattttgcttaaattacaatcaggtactacgcctggcacaggaattaatgatgcaagcgctctatcttga

SEQ ID NO: 180807 - DNA, 258 bp, Klebsiella oxytoca
atgcaagcgctctatcttgaaattaaaaatctgatcataaatacactgaacctggacgaactgtccgttgacgatatcgaaaccgaagcggcgctgtttggcgatggtttgggcctggactcaatcgatgctctggaactgggtctggcagtgaaaaaccagtacggtgtggtgctgtccgccgagagtgaagagatgcgtcagcactttttctccgttgccacgctggcatctttcattcacgcgcaacgtacctga

SEQ ID NO: 180808 - DNA, 252 bp, Klebsiella oxytoca
atgaccgcacaaaacgccatttacgaagaagtctccgcgctgctgattaagctgttcgaagtcgacgcgcaggcaattcaacctgaagcgcgcctgtacgaggatctggagctggatagcatcgacgcagtcgacatgatcgtacatcttcaaaagaaaaccggtaagaaaatcaagccggaagagtttaaagccgttcgtaccgtgcaggatgtcgtcgatgcggtagaacgcctgctcaaagaagcataa

SEQ ID NO: 180809 - DNA, 582 bp, Klebsiella oxytoca
gtgtcaggcgcacggtcgctgccggtcatcaccctgctgacaggtttattgctgctgacctggccatttttgatctggtttggtctggcgcataacggcctgcgctggctgctgccgctaattgcactcttgctgtttttacgctgtcgtcagatccgacgacaggcggggccactacgcatcgtcacacagatcgttgctgccgcaggcatcacgctgtgctctgccagctatctgctcaaaactcaccaactgctactgttttacccggtggtagtgaacagcgtcatgctagcggtttttggcggttcgctgtggtcagctatgccgattatcgaacgcctggcacgactgcgagaaccagaccttccagaaactgccgttcgttatacacgccgtgtgacacaaatttggtgcgcatttttcatcttcaacggcagcattgcgctcttaaccgcgctgcacggcgacatgtctatttggacggcgtggaacgggatgctctcttatctgttgatgggcatgctgatggccggtgagtggttagtacgccggcgggtaatgaaaagagataatcaatga

SEQ ID NO: 180810 - DNA, 1350 bp, Klebsiella oxytoca
atgaagccgatcctcactctggcccagtggctcaacgcccctcgcccggtcgacacgtcgattgcatggcaggaaggacatacctggacacttgggcatctgcgcaaggatgtcggtcatctgcttgaatacctgcaacagcaggaaggcgatcgctgggcgctatgttttgaaaacagctatttgttcatcgtcgcgctgctggcaacgctgcatgcaggtaaaataccggtgctccctggacactgccgcgtaacattattgagtgagcagcacaccctatttgacggtctattgagcgataaagcgctggactggcagggctcgctgcgggtggtcagttccgccatgacgctcgccactgaatccttcgcctttccagcaatcgacaacgatgcatatattgagctgtttacctccggatcgactggtcagccaaaacgtgtgaacaaaccaatacgccttctcaacaacgaagcacagctgctggcaacgcgctttgccgatcgtcttgcaaattgccgcatagtcgcttcagtcacacctcaacacctgtacggcctgacattccgtatcttcctgccgatggccttaggtctgcctctccacgcagggatgctctggtacgcagagcagttggcggctctgagccataaatatcggtacgcgtttatcagcagccctgcattcctcaaacgcctcgacggccagctcgctcccccaccggtagagatgatcctgtccgcgggtggtgtgctctcctggtcagatgccgcgcgagcagctagctggctgaacgtttgggtggatgaaatctacggcagtactgaaaccggcgttatcgcctgccgcgattaccaacaagatgatgcgaaatggttgccttttcctggcatcagcatccatcaggaaaatggttcatttcgcgttatttcaccgctaattgcaggtgttgatggctttttactcgatgatattctgcaattttcaaaaaatgggcagttcggcctgattggacgccgggggcgggtggtcaaaattgaagagaagcgcatttcgctcagcgaagtggagcagcgcctgctgatgttggacggcatccttgatgcagcggtattaacggtaacacgcggcagccgtcaaagcgtgggcgccttgctggtcctggataacaacgcgcgaaagcgctggggtaaaacccaggaattaacatggcggaaagcgttgagctcatggctggagccggtcgccgttccccgctactggcgggtgattgatgaaattccggtaaacagtatgaacaagcgtgtctatgcgcaattacaggagttatttcatgaaaccccatga

SEQ ID NO: 180811 - DNA, 354 bp, Klebsiella oxytoca
atgaaaccccatgaaattgagcgccatcaagcacaacctcatcagattcaaatcgatttatatctcgaccccacgctgttctggtttcgcgggcattttgccgtccagccgctgctcccgggcgttgcgcaaatagattgggtgatgcattacgctaccaccctactcgcgcccggctggcgttttcatagtattcagaacgtgaagttccaggcgccgctattgccggagacagccgttacgctcaccgtactctggcaggaagaacggcaaatactcacctttagctatcagcgccacgacggcgaagcgcgacacacagccagcagcgggaagatccgtttatgccgttaa

SEQ ID NO: 180812 - DNA, 1692 bp, Klebsiella oxytoca
atgccgttaaatttttccccgtgcgtgctgatcccctgctataaccacggcgcgatgatgtcgcgcgtgctggcgcgtcttcagccgtttggcctgcactgcatcgtagttgatgatggcagcgatttccgtacgcaacaggaactcgaacgattagcggcagcatctgcaaatatgactttaattcgcctgccgattaactcaggtaaaggcgcagcggttattcgcggcatgcagacggcagcggaagctggctttagtcatgccgtccaggttgatgccgacggccagcatgctcttgaagacattcccaaactgcttgccctggccgaggaacacccgacggcgctgatttccggacagcctatttacgacgattccattccccgctcgcgcctgtatgggcgctgggtgacccacgtctgggtgtggatcgaaacgctttcgcttaaattgaaagacagcatgtgtggctttcgggtctatccggttgcgccaacgctgcggctagcgcagcgcgtggcgctaggtaagcggatggacttcgatactgaagttatggtgcgtctctactggcagggtagtaccagttattttatcccaacccgcgttacctatccgctggacgggctatctcatttcgacgccttcaaagataacctgcgtatctcacggatgcacacgcgactgttcttcggcatgctgccgcgcatcccatcgctgttgttccgccacacatcgccacactgggcgcatcagcaggaggtcaggggattgtggggaatgcgtgtgatgcttctggtatggcgcctgctagggcgcaaggcatttactctgctactctatccagtggtcgccgtttactggctcacggcttccactgctcgtaaagcttcgcggaactggatagctcgcgtacgcgaacagctctccgagcgtctgatgccggtccccccttcgctcaccagctaccagcactttctgcgcttcggaaatgcaatgctcgataaaattgccagttggcgcggcgagctgcggttgggccgcgatgtggtattttcgcctggcgcggaagaagccctcaacgtcaactcaccgtacggcaagctgctgcttgcatcacatctgggcgatgttgaagcctgccgcgcgctagcgcaattacagggcagcaaaatcatcaacgcgctggtattcagcgacaatgcccagcgctttaagcaaattatgcaggaaatggctccgcaggctggactcaacctgatgccggtcaccgacatcggcccggagaccgccatccagcttaaagagaagctagagcgcggcgagtggattgccattgtcggcgatcgcattgcggttaatccccagcgcggcggcgaatggcgcgtctgctggagccgctttatgggccaacccgctccgtttccacaggggccgttcattctcgcctcgattttaggttgtcaggtggatctgattttcgccctgcgccagcagggaacgctgcgtattcactgcgaaccgttcgccaatccgctgctgctgccgcgcgccgaacgtcaggatgccttgcagaaaactatcgagcgctacgccgaacgcctcgagcactatgcgctccagtcgccgctggactggtttaactttttcgatttctggcaactgccggacaccaaacacaaggaataa

SEQ ID NO: 180813 - DNA, 423 bp, Klebsiella oxytoca
gtgctgaacgatccccgctttacggctgaagtcgagctggctatcccgttccacgacgttgatatgatgggcgtggcgtggcacggcaactacttccgctactttgagattgcccgtgaagcgcttctgaaccagttcgactacgggtaccgacagatgaaagcctcaggttacctgtggcccgtggttgatgcgcgggtaaagtaccgtaatcccctgacctttgagcagcgcattcgcgtccgcgcgcgtatagaggagttcgaaaaccgcctgcgcatcggttatgaaattttcgatgccgaaacaggaaagcgggcaacgactggctacaccattcaggtagcggttgaagaaaagagtcgcgaactgtgctttgtcagccccacgattctgtttgaacgtatgggagttacgccatga

SEQ ID NO: 180814 - DNA, 606 bp, Klebsiella oxytoca
atgagattcttaccactgctggcgctgttcatcagtcccatagtcagcgccctgacgcttgataatctgcaacagcgctttaccgaacagccggtggtccgggcgcatttcgatcaaaccagaacgattaaggatctgccgcagccgttgcgatctcaggggaagatgctgatcgcccgcgaccagggtttactatgggatcaaaccagccctttcccgatgcagttgctgctggatgacaagcggatggtgcaagtgattaacggccagccgccgcaaaccatcaccgccgagaacaaccctcagatgttccagttcaaccatctgctgcgcgcgctgttccaggccgatcgtaaagtgctggaagagaatttccgcgtagagtttgtagacttaggcgaaggacgctggacgctgcgcctgacccccatcaccacgccgctggataagattttcgcgaccattgatttagccggaaaaacgtatctggagagcattcaactcaacgacaagcagggcgatcgtaccgatatcgcactttcccaacatcaactcacgccagcgcaactgaccgatgacgaacgccaacgttttgccgcccagtaa

SEQ ID NO: 180815 - DNA, 2322 bp, Klebsiella oxytoca
atgacgaacgccaacgttttgccgcccagtaaacgccctgcgttgctatggggaatcgcctgcctgatcctgctgggcgttctgctaacgcagctgcctcaggcgcggctaaacagtagcgtgctggcgatgctgccaaagcaaacactggggaagacccctccgagcctgaacgacggtttcatgcagcgtctcgaccgacagttggtctggttggtaagtcctggtaagaaagccgatccggcggtagcccacgactggctgatgcgattgcaaaaatcgcaggcgctggctgaagtgaaaggcccaatggacgccaacagccagcaagcgtggggagcttttttttggcagcatcgcaacggactaatcgatagcgacacccgtgcgcgtttgcaaaacggcggcgaggcgcaggcgcaatggatactttcccaactctactcggcattctccggcgttagcggcaaagagttgcaaaacgatccgttgatgctgatgcgcggctcgcagctggcaatggccaaaaacggccaacgcctgcggctgatggacggctggctggtgactcaggataaacagggcaactactggtatctgatgcatggcgagctggccggttcctcgtttgacatgcagcagacgcatcggttggtcaccacgctaaaaacgctggaaggtgaacttaaagcgcaatatccgcaggcacagttgctgtctcgcggcacgctcttttacagcgattacgccagccagcaggcgaaacaggatatctccaccctcggcgtggcgactctgttcggcgtgattctgctgattatggcggtattccgctcgctgcgcccgctgcttttgtgtctgatatccattgctattggcgcgctggcgggcacggtcgtgacgctgcttattttcggcgagctgcatctgatgacgctggtgatgagcatgagcattatcggaatttccgctgactatacgctctattatctgaccgaacggatggtgcacggtgcacaaatgtcaccgtggcaaagcctcgctaaagtgcggaatgcgctgctgctggcgctactgactaccgtagcggcgtacctgattatgatgctcgcccccttccccggtattcgtcagatggcggtcttcgcggtgatggggttaagcgcctcctgtttaacggtgattttctggcatccgtggctatgtcgtggtctgcccgtccgtcctgttccgtccatggtacaaatgctgcgctggcttgccgcatggcgacgcaataaaaagctttccatcggtttgcctgtggtgctggcgctgttctcgctggcaggtcttgccacgctgcgcgttgatgatgatatatcacagctacaaacgctgccgcaggacatcctggcccaggaaaaagccattaccgcgctcaccggacaaagcgtcgaccagaaatggttcgtagtttatggcaaatctgcccagcaaaccctggagcggctggaacgctttacccccgagctggagcaagcgaaaacagaaggatggctcagcgggtatcgcaccattccgctaaattcgctcacccgacagcagcaggatcttagtttgttgaaaaatgctgcgcccaccgttaccgcagccctgaataacgccggactagcggcagtaaatcccgacctcaacgccatgcaggtaacggttgatgcctggcttgccagcccggctagcgaagggtggcggctattgtggataacgctggcagatggagaaagcggcgtactagtgccagtagaaggcgtgaacaatagcgcagcgctaaatgctctcagcacaagatatgttggtgttgcgtgggtggatcgcaaaagcagcttcgacgagctgttcacactttatcgtcatatcctgaccggcctgctgtgcgttgcgctagcggtgattgcctgcggggcgatgattcggcttgggtggcgaaaagggctaattagcctggtgccgtcgatgttatcccttggctgcgggctggccgtactttcgctgagcggtcatacggtaaacctgttctcgctactggcgctggtgctggtgctcggaattggcattaactacacgctgttttttagcaatccgcacggcactccgctgacgtcgctactggcgattacgctggcgatgctaactacgatcttgaccttgggcatgctggtttttagcgccacccaggctatcagcagttttggcattgtactagtaagcggtattttcaccgcgtttctgctttcaccactggcgatgcccgcgaaaaagagaaaaaaagataatgattaa

SEQ ID NO: 180816 - DNA, 585 bp, Klebsiella oxytoca
atgattaaaccgacgttctggcgcgccatcgctctgatcgcaacgctgatactggccggatgcagcagctcgcagccggaacaacaagggcgccctcaggcctggctcgagccgggcacgcgcgtcacactgcctttaccggacatctctccgccgattaattcacagcaactactcaccggcagctttaacggcaaaacccagtcgctgctggtactgctcaatgctgacgataaaaatctcacgttggcaggactctcctctgtcggcattcgcctgttccttgtgacctacgatgaaaaagggctgcacagcgaacagtcaatcgtggtaccgcagttgccgccagcaagccaggtgctggctgatgtcatgctcagccactggccaattcacgcctgggagtcgcagttgccaaaaggctggacattgatcgactgcggcgataagcgcgaactgcgcaacgccagcggtaagctggtcaccgaaatcatctatctgaatcgcaaaggcaagcgtgagccgatcagcatcgaacaacatgtctttaaataccacatcaccattcaatatctgggtgactga

SEQ ID NO: 180817 - DNA, 1170 bp, Klebsiella oxytoca
atgatctatatttctgccgtcggcatgatcaacgcgctgggtagcgataacaatgaaattgccgccaacctgatgcgcggcgtggcacccggtatgcgccctcgttcgggctggcttcggggacatccgcacgcggtattagccggtgtagatggcgaactgccggtcattcccgatgagttcagcgcccatcgttcgcgcaataatcaattactactggcggcgcttaaacacattcagccgcaggtcgataaggctattacgcagtacggacgggacaggattgccgtgatacagggtaccagtacctctggacttgatgaaggcgatacgcacgttaatctgacgcttaacggacaggaaagcgcggcctggcagtacccgcaacaagagctgggagacccatcgcgctttcttagccgctggctggcactggctggcccggcattcacgctgtcaaccgcctgctcttccagcgcccgggcaataattagcggacgccgcctgcttgaagccgggctagcggacgtcgcgattgtcggcggtgcggatacgctgagccgaatgccgatcaatggcttccacagtctggaatccctctccccaacgctgtgccagccgttcggtcgtgaccgcaatggcattactattggtgaaggtgccgcgttgatgctgctgactcgtgaaccgcagcctattgctttactgggcgtgggcgagtcgagcgacgcataccatatttcagcgccgcatccacaaggtgaaggagcgatccgcgccattcatcaggcgctgcacgacgcaggaatcacgccagagcaggtgggctacatcaatctgcacggtaccgccacgccgcttaacgaccagattgaatccagagtggtgcacgaactgttcggcgaaacggtgccatgcagttccactaaacacctaaccggccacacgctgggtgcggcagggatcaccgaagcggcgatcggtatgctaattttgcaacgcaacctgccactaccgccgcagaattttagctcctcgccacgcgacgaaacgctgccgccctgcggtatcatcgagcagccgcagccgcttgaacgtccagttatcctgtcaaactcgtttgcctttggcggcaataacgccagtattctgctcgggaggatctcatga

SEQ ID NO: 180818 - DNA, 477 bp, Klebsiella oxytoca
atgagcgactatttaccccccggcgaatacctgccgcacgacgagccaatgctgctgcttgatgaagtggtaaatgtgacggacgactccaccctctgccgagtcacggtatcggccaatggcacgctggccccctttctcgatgcagaaggccatctccccggctggtttgccctggagcttatggcgcaaaccgttggcgtctggtcaggctggcaccgccaccggcagggacaagagagtatttccttaggtatggtactcggcgcgcgtgaactggtctgcgcggcggggattgttcccgccggattaacgctgaatgtctccgtcacgttgctgatgcaggatgagcgcttcggcagctttgaatgcacgatcgccgctggcgaagagacgttggctactggcagggttaacaccttccagccaacatctgaagaacttaacaccctatttcaacaaggagcgtccgcatga

SEQ ID NO: 180819 - DNA, 732 bp, Klebsiella oxytoca
atgaatcgttcagttttggttaccggctccagcaagggaatcggtcgcgctatcgccctccaactggcagcggacggctttattgttggcgtccattatcatcgcgatgcgcagggcgcgcaggagacgctggatgcgattctcgccgcaggcggcgctggccgcctgctgacgtttgacgtcgccaaccgcgagcagtgccgcaaggtgttagagcaggatatcgaggcacatagcgcgtggtacggcgtggtgagcaatgctggtatcacacgcgatgcggccttcccggcgctcagcgataacgactgggatacggtgatccacaccaatctggatagcttctacaacgttattcagccgtgcatcatgccaatgattagcgcgcgtaagggcgggcgaatcattacgctttcttcggtttccggcgtaatgggcaatcggggccaggttaactacagcgcggccaaagcggggattatcggggcgacgaaagcgctggcaactgagctggcaaaacgcaaaattaccgtcaactgcatcgcaccggggcttatcgacaccgggatgatcgaaatggaagaggccgcgcttaaagaggcgatgtcgatgatccccatgaaacggatgggccatgcggacgaagtggccgggcttgccagctatttaatgtcggatgtggcgggctacgtgacccgtcaggtgatttccatcaatggagggatgttatga

SEQ ID NO: 180820 - DNA, 1230 bp, Klebsiella oxytoca
atgacgcgtagagtggtgattacaggcatgggcggtgtcaccgcctttggagaaagctggcaggccgtttccaccagactgcttgactacgagaacgcagtacgcaaaatgccggagtggcaggtttatgacggcctgcatacgcggctgggcgcgccggtcgatgatttcaccccaccggagcattatacccgtaagcgtattcgctccatgggccgcgtatcgctgatgtccactcgcgccactgaactggcgctggagcaggcagggctaattggcgaggcagtgctaaccaacggcgaaactggtatcgcctatggctcctcaaccggcagcaccggaccagtgagtgaattcgccactatgctgaccgaaaaacacaccaataacatcaccggcaccacctacgtacagatgatgccgcataccaccgccgtcaacaccgggctgtttttcggattgcgcggtcgcgttatccccacatccagtgcctgtacctcaggcagccaggcgattggttacgcatgggaagcgattcgtcacggatatcaaacagtaatggtggctggcggcgcagaagagctatgtccgtcggaagcggcagtgtttgataccttattcgccaccagccagcgtaatgatgcccccaaaaccaccccttccccgttcgatgaacaacgcgatggtctggtgattggcgaaggcgcaggcacgctgatcctggaagaactggagcacgccaaagcgcgcggtgcgaccatctacggtgagattatcggtttcgccaccaactgcgacgcggcgcatataacccaaccgcagcgagaaaccatgcagatatgcatggagcagtcactgaaaatagcaggcctgagtgctctggatattggctatatttccgctcacggaacggcgaccgatcgcggtgatattgcagaaagcctggcaacagaggcgatttatggcaacaacgtccccttctcttccctgaaaagttattttggccataccctgggtgcctgcggtgcgctggaagcctggatgagcctgcatatgatgcgcgaaggctggtttgcgccaacgttgaacctgcatcatccggatgccaactgcggcgcactggattacatcatgggtgaagcccgcaaaattgactgtgagtttctgcaaagcaacaactttgcctttggcggcattaacacctctattatcatccagcgctggccctga

SEQ ID NO: 180821 - DNA, 582 bp, Klebsiella oxytoca
atgtaccggctttttctgggaaacgtgtcggccttaagcgcaggcgatctgccgtctgcattgatctcctgcgcgcctcagggcgccggccaaactcgctggctggccgggcgtgccctgctttcccatgccgtttcgccactgccggaaattatctatagcgaacagggcaaacctgctttctcggccggtacgccactgtggttcaatctgagccacagcaacgacgatatcgcgttactgctgagcgacgaaggtgaagtgggttgcgatatcgaagttgtacgccagcgcgataactggcgcgcgttggtaagcgcggtttttagcccccgcgaacaggctgagatcgaggctatccccccggaacggcagatagctgccttctggcggatctggacacgcaaagaagccatcatcaagcagtacggcggaagcgcctggcaaatgcgcagtatcgacagcacgcagccctccgcgctgtcggtgagccagattcagataggatcgctcagcctcgcggtctgcacgccaacaccatttcttttgaccaccgcgaacatcagccgggttcgctcgtaa

SEQ ID NO: 180822 - DNA, 1962 bp, Klebsiella oxytoca
atgtctgttatggaagtcgatctgcacaaactgaaaatcaacgacccgttcctcggccagtaccagcagctggtgcgcgatgtggtgatcccttatcagtgggatgcgcttaacgaccgtatcgaggaggcggacccgagccatgcgatagagaacttccgcatcgccgccgggcgacaggagggcgaattctacggcatggtctttcaggacagcgacgtggcgaaatggctggaggcggtggcctggtcgctgtgtcagaagccggaccccgggctggaaaaaaccgccgatgaggtgattgaactggtcgcggccgcccagtgtgaagatggctatctgaatacatatttcacggtcaaagcgccagaggagcgctggaccaacctcgccgaatgccacgaactgtactgcgccgggcacatgattgaagcgggtgtcgccttcttccaggccaccggcaaacgtcgtctgctggatgtcgtctgccgcctcgctgaccacatcgatagcgtgtttggccccggagataaccagctgcacggctaccctggccatccggaaatcgagctggcgttaatgcgcctgtatgacgtcactcaggagccgcgctatatcgcgctggtgaagtacttcgttgaggcgcgcggaacgcagccgcatttttacgatatcgaatacgagaagcgcggcaaaacctcctactggaacacctacggtccggcgtggatggtgatggataaaccctacagccaggcgcatcagccgatttccgaacagccggtcgccatcggccacgcggtgcgtttcgtctatctgatgaccggcgttgcccacctcgcccgtttaagtcaggacgagggcaagcgccgggattgcctgcgcctgtggaaaaatatggcccggcgtcagctgtatatcaccggcggaatcggttcgcagagcagcggggaggccttcagcagcgactatgacctgccaaacgacacggtctatgccgaaagctgtgcttccattggcctgatgatgtttgcccgccggatgctggagatggaagccgacagccaatatgccgacgtgatggagcgcgcgctgtataacaccgtgctgggtggaatggcgctcgacggcaagcacttcttctacgtcaatccgctggaagtgcatccaaaatccttaaaactcaaccatatttacgatcacgttaagcccgtccgtcagcgctggttcggctgcgcctgctgtccaccgaatatcgcacgggtgctgacctcgctggggcactatatctacacgccgcacgacgacgtcctgtacatcaacctgtatgtcggcaacagcgtggagatcccggtgggcaatgaggcgctacgcctgcgcatcagcggcaactatccgtggcaggaacaggtgaagatagtcatcgattcatcttcaccggttaatcataccctggcgctgcgtctgccggactggtgcgataagccgcaggtcacgctcaacggcgcgccggttacgcaggacgtgcgcaaagggtatctgcacatcagccagctctggcaggagggcgacacgctacagttaaccctgccgatgccggtgcgccgcatttacggtaacccgctggtgcgccaccaggcaggccaggtcgccgtccagcgcggtccgctggtttactgcctggagcaggcggataacggcgagcaattgcataacctgcagctgccgcgcgacgcccggtttagcactgtcgaaggcaaagggatttttgcccgcaagatacttctccaggcgccgggctataagcaaacggcgaaggatgccgaaaaccaggccctatggcactatgaccgcgcgccgtcctcccgtcagccgcaagtattaacctttattccgtggtttagctgggccaaccgcggcgaaggcgagatgcgcatctgggtgaacgaagcggaagcgtaa

SEQ ID NO: 180823 - DNA, 1167 bp, Klebsiella oxytoca
atggcactgacagacatacaaataaaacgagcaaaaccccaggaaaaaccatacaccttgaacgatgggcaaggcctgtcattgcttatcaatcccgatggttcgaagggctggcggttccgttttcgcctcgctggaaaagcgcggttaatgtcatttggcaactacgacttgataagccttgctgaagctcgtgaaaagcgcgaggtcgcccgcaaacaagttgctaatggaatggacccggttgaggaacggaaggcgcaaaaactggcacagcagctttcaacagaaaactcattcgaagccatatgccgcgaatggcatgcaaacaaagccgaccgctggacagtcgcataccgcgacgaaatcattaagaccttcgaacaagatgttttcccgttcatcggcaaacgtcctatcggtgagatcaaacctttagaattgcttgaagtgctgcgacgaatagagaaacgtggagcactggagaaaacacgtaaggtacgccagcgatgcggagaggtttttcgctacgcgatcataactggccgagctgaatacaacccagcccctgatttagctatcgcattggccgtgccgaagcaaaagcatcatccttttttatccgccgaagaattgcctcattttatcagagatcttgaagcctataccggcagcatcatcactaaaaatgcgactaagatagtcatgttgactggtgtaagaactcaagaaatgcgtttctctacatgggatgaagtcgatttagataaaggaatatgggagataccagcagaaaggatgaaaatgcgtaggccgcatgtcgtacctttatctacccaagtgattgaactctttaagcaactcaagcccatcactggccattacccttacatttttattggaaggaacaatcgcagcaagccaatctcgaaagaaagtgtgacacaagtcattgaactacttggctataaagggcgggcaacaggtcacgggtttagacataccatgtcgacaattctgcatgaacaaggatttgatagtgcgtggattgagatgcagttagcgcatgtagataaaaatgctataaggggagtatacaaccatgctttatattttgaacaaagaagagaaatgatgcaatggtatgcttcttcactatataaataa

SEQ ID NO: 180824 - DNA, 483 bp, Klebsiella oxytoca
atggaattgaaagagaagatagatatttataaactatgtattgatatggcagataaaactagtgagcgtagactaaagactaacacattcattatagcaattaatacaggtcttatatcacttaatagctatctatcatcaacagggttatcacaaattgcatggagttccattatatgttttgtatgtattatagtgaatctatactggatttttctagtttcaacatacaagaaaataaacgaagcgaaatatgaaacaataaacaagatagaaaatgacaataacttccctttcaagccttttaatgaagagtatgcctaccttaagtcaaagcgttattttcacttaaccacaattgaacgattaattccaataacccttattattttgaatgtagttataatattatttacatctaatccggaaacaaaacccactccacaaacgacaataataaacattatttccgaaagaacttaa

SEQ ID NO: 180825 - DNA, 927 bp, Klebsiella oxytoca
atgaacataattgatattatttctaaaaagaccctacttccatcacctaacgttatggtttttattaatacagcgccatatcgctataaaaaatattatttgccaaaaaatagtggtggcgttcgtgaaattgcccaaccttcacgtgagttgaaggttatgcaacgaattatcattgaaaagatcgcggcttttttaccaattcatgaaagtgcatttgcatatataaaagggaaaagcattaaagaaaatgcgcaaaaacatcaaaaaaatgaatattttcttaagttagatttctcggatttttttaatagcataaagcccagtgatttgcgaaatgccttaataaaaaacggttttgagaatgatgcatttaaccttttattaatcgataaattatttttttataaaaaaacgaaaaaaagcggccttactttaagtgttggtgctccaagttcgcctcttatttcaaatgctgttctttacgagtttgatgtgcaagttacggaactatgtaacaaagagagcattacctatacaaggtatgcggatgacctaacgttttcatgtaatgagaaaggaaagttaataggttttcaaaaaaaaatagtcaaaattttacgaaaaattccgtctccgcatttaagactgaatgataaaaaaacgatctttacatcaaaatctgtaagtcgccgagtaacaggaatagttataaacaatgacgggaaattgtcattgggtcggaaaaataaaagaaaaattagtagcttaatacatcattatacacttaataagttgagtgttgaggatatttataaattgaagggatacctttcttatgcgaagcatattgagagtacatttatcaattcgatggcaataaagtatggcgttgatacgatcaatgccatacttaaagctaattaa

SEQ ID NO: 180826 - DNA, 981 bp, Klebsiella oxytoca
atggaaaaaaataagaaagaaaaatatgaggaaaagttaaaaaagcatgtctcagggtgggatcttaaaaactttcgcgtatgttatgacgagcaaataatttttctttgcggggctaaagttgcaccattcaatgaacctcaaactacaatgagagggatgttttatgaattttgtaaagaaaatgactccagactttttaataaacttctccttgctgaagcatttaaaaattttctaaaagatagtcattatcctgacttgatttcatttgaaaaagacattgcaaatctatcctctttgattattatttttttagaaagtagtggttccattgcagaattaggcttgttttgtaacttggatgatataaataaaaaacttttagttattgtccccgaacatgaagtaaaggatggtaaaaaagagtcgtttatttatctcggcccactatcctatcttcgtgaaaaggttaacgaaaaatcgtatatcgtttaccccggccctgttgacggaaagaattacaacgaacatctggagttaattctcgatgatgtaaaatcattggctccctccgatggaaaggaatataagtttgatgtaaataattcaggtcatttggcctttttacttacacatattatttctttagccatgccaattagactaaaagaaatcatgatgtgtgtaagtgagttaggtattaatgcgactttgcaaaaagacatagaacgaatgctattcttgctcgaaacctttctccatattaaagtatatgaatatggaggtacaaaatattattataccaagagttcaaaaggaagcattagattaggtaaaaataaatctggcttcacggttgatgaggttggtataaaagcagatttgctactttttattaatgatgtagcaaggtgtgatgataagagaaggcggttggcattgaattcgataaaggagatgatcaatgaacataattga

SEQ ID NO: 180827 - DNA, 2334 bp, Klebsiella oxytoca
atgaaaatgaacgtaacggacaccgtaaaacaggcgtgcggccactggccgcgcattctcccggcactgggaatgaaagtgataaaaaaccgccatcaggcctgcccggtgtgtggtggcgctgaccgtttccgctttgacgataaagaggggcgtggcacatggttctgtaaccagtgcggtgccggtgatggcctgaaactggttgagaaggtgttcggcatatcggcatccgaggccgccgggaaggtgaacgccgtcaccgggaatctgccgccggtggccccggagttgattgcagccgcagacgccggaacggaggccgaccgcaaagcggcggccacgctggccgtcagactgatggagaaaacccgcccggtcaccggcaacgcctacctgacccgcaagggctttcccgcccgggagtgtctgacgctgaccacgccgcacaaaaccggcggcgtggcctaccgcgccggtgatgtggtggtgccgctgtatgacgagtccggcgcgctggttaacctccagtttattaatgctgaggggctcaagcgcaccctgaaaggcggcgcggtaaaaggagcgagccacactatcgaagggcaaaaacaggccgggaaacgcctgtggatagcggagggttatgcaacggccctaactgtgcatcacctgaccggagaaaccgtcatggtggcgctgtcgtccgtgaaccttctttctctggcgagcctggcccgtcagaaacacccggcctgtcagattatcctcgccgctgaccgtgacctgaacggcgacggccagactaaagccgctgcggccgcagaagcctgcgagggcgttattgccctgccgccggtatttggtgactggaatgatgcggtgatgctgaaaggggaagacgccacgcggaaagccatttatgacgccatccgcccaccggcacaaagcccgttcgacaccatgagcgaggcggaatttaccgccatgggcgccagcgacaaggcctggcgggtgcatgagcattacggtgaagcgctggccgtggacgccaacggccagctcctgtcccgctatgaaaacggcatctggaaaaatataccggccgccactttttcacggagtgtggctgatttattccagcgcgtacgcgccccgttctcgtcggggagaatcacctctgtggtggagaccctgaaactgattattccgcagcaggatgcaccggcacgccgtctgattggttttcgcaacggggtactcgacacccaaagcggtctgttcagcccgcacagtaaatcacactggctgcgcacgctgtgcgacgtggattttaccccaccggtggagggcgaaacgctggagacccatgcgccgaacttctggcgctggctcgaccgggcggccagtggcaacccgacaaaacgcgacgtgatactcgccgcgctgtttatggtgctggcgaaccgctacgactggcagctgtttctcgaagtgaccggccccggcggcagcgggaaaagtattctcgccgaaatcgccacgatgctggccggagaggataacgccacgtcggcggatatcgacacgctggaagacccgcgcaagcgtgcctccctgattggcttctcgctcattcgtctgcctgaccaggagaaatggagcggtgacggtgccgggctcaaggccatcaccggcggtgacgcggtctccgttgacccgaaatatcagaacccgtactcgacgcatattccggcggtgattctggcggtgaacaacaatccgatgcgcttcaccgaccgcagcggtggcgtgtcacgtcgccgggtgattatccacttcccggagcagatagccccggaagaacgcgacccgcaactcagggataaaatcgcccgcgagctggccgtgattgtgcgccagctgatgcagcagttcagtgacccgatgagcgcccgcaccctgctccagtcacagcagaactccgacgaggcgctcagtattaaacgcgacgctgacccgacctttgatttttgcggctatctggaggcactgccggagccggacgggatgtatatggggaacgccaatattatcccgcgccagccgcgtctgtatctgtatcacgcctatctggtgtacatggaggcccacggctacaggaacgcgctcagcctgaccatgttcggcaaggggctgtcagccatgctgaaagagtacggactgaattatgagaagcgccgcacaaatcagggcatgcagaccaatctcgctctcagggaggaaagcaacgccgactggctgccgaagtgtgatgaacccacagcaacataa

SEQ ID NO: 180828 - DNA, 594 bp, Klebsiella oxytoca
atggcaaatgaacacttaacgtcgtcccccataggcgagttcgttatgtttgccagcggtgatgggaaagtacgtgttgaatgccgctttgaaagcgatacgctttggctctcgcaggcaatgatctgcaaactctatggtaaagcgaaagccaccatcagcgagcatataaagcatatatttgaagaaggcgaacttgaggaaaattcagttgttcggttttaccgaacaactgccagtgatggaaaaaattatcaggttcaacactttagtttgcctctgatacttgccgttggctatcgcgttcgctcccctcgcggcactcagttccgccagtgggcaacccagacgctccaggagtatctgatcaaaggctttgtgatggacgatgagcggctgaaaaatccgcctgttggtacatcggctgtacccgattatttcgatgagatgctggagcgcatccgcgatattcgcgccagcgaacggcgcgtttacttgcgcgtacgagagataattgcctgttgttcgcgcctttctgccgggcggcgccttgcccggcctacgcgatccgggattatctttgggcctgtgtaa

SEQ ID NO: 180829 - DNA, 498 bp, Klebsiella oxytoca
atgatctatattgggcttccccaatgggcgcacccgaagtgggtgcgcctgggtatcaccagccttgaagagtatgcccgccattttaactgcgtggagggcaacacgaccctgtacgctttaccaaaagctgagattgtcagccgctggtatgaacaaacccacgatgattttcgcttctgcttcaagtttccggccaccatttcgcatcaggcatcgctgcgcaactgcgacgacttaagccacgagtttttcacccgcctggcgccgctgtcatcgcgcattggccaatactggctgcagctgccggccacgttcggccctcgggatcttcccgcgctctggcagttcctcgacagcctgccgcgcgaattcagctacggcgttgaggtaaggcatccggagtttttcgccaaagaggaagcggaacaacagctcaatcgcgggctgcatcagcgaaacgtcaaccgcgtcatcctgaagagacctttctattga

SEQ ID NO: 180830 - DNA, 339 bp, Klebsiella oxytoca
atggctgaaacctttattaatcctgataagccgtgtattcattgccgctcacttatccgttatgtgtcgtccggtcgctgtgtagagtgctctaaaacacgcagacagccgcctaaaccaaagccacagattgtacgtgtaaccgcttcagcagcaagagcaccgtttcactctgaaggtggagataaccgaaataacatcattgtgaagctgtctgataaggctcttaaccgtctggatgagattggttactcgttggttaagaagtaccgtttagcaggtcacacgcaagaacgaatccgaatgattgccctgtctcatctgattgaagccgcttaa

SEQ ID NO: 180831 - DNA, 192 bp, Klebsiella oxytoca
atggaagatacgattaacgccccgattaactattacgattctgaaaagcgtctaatcgttggtcacaatctggtaggtaaaattcacccccagctatttggtaagctggttcgccgttcaaacgatggttcaacccgttgccagcaagcccgaatcacagactatttggaggggttactaactaatggctga

SEQ ID NO: 180832 - DNA, 261 bp, Klebsiella oxytoca
atgagtattccaatgaaaggtctatcaaagcgtggcaggtataatcatcttactgactcaatggaatttaaatatttcaacggtcaaacagaaatcagtgaatcaacctttaaagcactctgtgcaggtaataagcctaaaccaactgtgaagccagctaaagcggtcaccacgtataaggtgaagcctaagccaacgattgaacagcaacgagatgcagctttaaaggctgctattaaacagatggtaagcgggggctga

SEQ ID NO: 180833 - DNA, 576 bp, Klebsiella oxytoca
atgaccactttgaatcaagctgtaaaaattgaatcaccagttgcaagtatcagtcacctgttaccgtttgaacagaaagagcatattgaacgtttgtactttccaaaggtacaacaggctactgacagaatgaataaagctgaggctgaatatcaggatgctgtagaaactcgttcagtgttgattaatcagaaagctgctgaatatcttgctaacccgtctgaaagacacggattcattgtgaagcaggtttacccgacaaaccagcagcaagtgattcaaagcatggctgaacaaggttatatggttcatcgtgtatctgttggaatggttacctttatccgtatgccaaagaacgctaaagataatcctcttcaggaaattacagataaagctacagcagaggctgaatcaactaccgacaagatgattgaacgtctgaaggtaaaagcctctgaagctgtccaccagcgaaataaagtcgtgattgaagctcgtaaatctctggattcaattaaaccctttgaaagctatttaaacgtaattgtaactgagcctgaagaggtaaccgaataa

SEQ ID NO: 180834 - DNA, 2088 bp, Klebsiella oxytoca
atggctaactatacagtcgatgaattcatcatccaattaggttttaacgagaacgtttcaaagaatcttcaacgcctcgaaagcagaacattaaaagtcgctgaacgaattgaaaagaaccttaaccgtgcatttaccccaaagggtaatttcaatagtgtgattcaatccgctaatcacgcatcgaaacaaattaaccgtgcattctcaaagagcatgaattttgatgaagctggtaaatcctctgtgaaatctgtagagaatgctgctaaggcttctgcaaaacgcattaaggatatgtatcaggacgcttatggggctaaaggaaaaggccgctcaaatccaccagccggaaagccacaaggcagaggctcagatttaacagccgctaattcaatccgcaatttgtccaatactcagttctattcaaatctgaccagacgcttagagggtatgggttcaactggacaagcaagggcgatgaaattacggcagcagattcacggactccgtgatgacgcactagccaacccctcagccagcctgaaccagttccgtttagctctccgtgcagccactgacagtgcttctaagtgggcttctcagaaccgcaagcaggtatctaatgcagatgggttatcctcttcattcggtcgtctggtaagcgtttcagcagcgttatacgggacatttgaagccgtccgtaaggtggttgaaacaggtgtagcccgtgaaggtgtgaatctctccgctgaagctgtctttaaaggccaatcaaaagacgctaagacatttgccgctcagttctctgaccaaatcggacagggtgtcactgagaccttgaagcagtacactggctttgctgctggtgctcagaattcgttaggttatcagggtacacaggacttctataaaaacgctgctgtattcggtcgtattcgtgggcttgatgctgaacagcttaaaggcatcatgacagcattcacacagatggcatctaagggacgtgtacaggctgaagaactcagaggccagttgggtgaccgcttaccgggtgctgaacagatgtttgctgatgctttgggtgtaaacactcagcagcttgacgcactgatgaaaaatggcaagctactgtctaaagacgttcttccccgtgtatctgctcagatgaaaaagatggctgatgaagcaggggggttagaccgtgtatcacaaatggctgtaacaggtatcggacgagttaaagcagcgatggagaatgaccttaaccgtgcattcaccagctctgaaaagggcttaggccagtttaacgcctctgtagctaacatgctcaacgatgcttcaccgattgctgaggctttaggtcacgccctcggaaaggtcgcttctatgacatctggagcgatagaccacgtggacgaatggagccgaaaactctcagcgttaatcctcagaacttcagcatggtacgatgacttgtcagacggtcaaaagaaactggttgattctgctgaacaatttgctgtaggggctgctggtgttcttgctctggttaagtctatcgctggtgtggctaacaagctgaaatggttaagtgctctgttaggtggtagtgctgaagctggtgcggctgctggtgcaggtggattactcaagggtgcatcccgtttagctggccctgtaggagttgccttagtcgctcatgatgctgtagacgcttcaggagttgaacagaagtacccaaatgctgtagggactgataacccgattgcaaaggctcttaactggctttctaacccttctaaagtgttgggtgctcaggatggtgactcaatcactaatagccctttcacacgtgctatgggttcattgggtgactggcttcagggtaataatgcgctgtccggtcaggctaatacatttgctgtaccgtcaatgtataaccctgctcagacaactatccgaaatgaccagcgtattaacattagtgtgaatatggatagtcagaagattggaacattccagacacaggttttaactggtggctttgaagacctgaatattaatgctgaacatttgagtgattga

SEQ ID NO: 180835 - DNA, 276 bp, Klebsiella oxytoca
atgaagaaccgatttttgaatatgctaaacaatcctgtaccgcatcccgatttaactgatgcaatctttaattcagtgagtgagccggaattgtgtctaaccgtcctaaaaactcttccagagattaaccaaattactattgcaacgttcttcagcggtcaagggttatcactgatgggtgctgcattaatctatgagatggtacttaaagcacacgatgcaatgacagatttaatctggaatgaatacgaggtaaccaatatgactaatggctaa

SEQ ID NO: 180836 - DNA, 144 bp, Klebsiella oxytoca
atgtcggataagaaagaacgttcagtaattaatctgtcggataagacgcttggccttcttaatcagctaagtgaaaaatatgatttgccacgccagcagaccttagcggtattgcttaacaagaaaatgaaggaaatgaactaa

SEQ ID NO: 180837 - DNA, 138 bp, Klebsiella oxytoca
atgaaacgcagaggtacagtagtacacattgcaccagcactaatgaaaaagctggaagaattatcagatgtgtacggtttgagccgccagaaaaccttagaaattatcctgaaagaggaattaaacaatgtcggataa

SEQ ID NO: 180838 - DNA, 552 bp, Klebsiella oxytoca
atgaaactctatgaaatcccgttcacccccgcttatagtgatgtaacccgaatcacttctttcaacggtgttaagttatctctttcagctaaaatgatttacctgtttatggtaggtcttcaaagaaacggtcaagaagtcttcccctcaattaattacctgtgtgaattgttcggtattggacgaaaggttgctttaggggctttaacccaattacatgaatcaggtcttattagttctattcagcgttatgatagttctaaggtgtacacagttgaaatcatgccacctgaattgattaaatgccaccagcaagagaatcaacctgaaccagaaaccacaatcaccagtgattctaataatgtccttccctttccagtgattgaaagagatgagaatccagttattgaagctgtagaagagattgagccagttattatccgtctttctaagccaaagcctaagccagaaagtaagctgaattatctgtttgtcagtgattcagaagaagacgaagaaccatttaaaatgccagcctatgaggaattgtaa

SEQ ID NO: 180839 - DNA, 150 bp, Klebsiella oxytoca
atgagaaaagacatcccacagcaagtaacaatccgcgttgaagtatcacacgccattcaccgtaaaattgttgaaatggcagcgaaacagggtgttagctactcagccctgattaaaaacatgattcgtgaaaatgtaatcacagcttaa

SEQ ID NO: 180840 - DNA, 594 bp, Klebsiella oxytoca
ttgaagccagctaaacgagactcagggaatcacatcatgatttatggatatgcaagagtatcaaccaaagagcaaaacttagaccgtcagttaactgctcttgagcctatatgtgatgtggttaaggttgagaaggtttccggtaaagatttgaaccgccctgagcttcagaagctgtttgagttcatccagtctggtgacacactcatttgcaaaagcattgaccgtcttgcaaggaacacgaaagatttgcttgaagtggttgattcactgattggtaagggtgtgattgttaagtttctggacaactcaatgagctttgacaatacaccagcttcacgattgattctgaccatgatgggtgctgtagcagagtttgagagaggcatcattgctgctcgccgtgatgaagggatagcggttgctaaagaggcaggaaagtacaaaggcaaacaagctaatcaggctcttcatagtaaggttgtaaagtaccttgaagcgggaacttattcacccgatgagatagcaaagctgtgtgaatgtggtagagctacagttttcagaatcaagaaagaatggaaaacagcagcttaa

SEQ ID NO: 180841 - DNA, 906 bp, Klebsiella oxytoca
ttgatacattctccagtgatagaacttcaggctcttgccagtgacccgaattcagacatcgttgctgttttgatgaaagcaaagatgattgcgattaaattagaccttaaagaccttgttgaatggatagaattagagcttaatggctatcctaatattgcctctgcacctgactataggtctggacaaggtatattgaaggcattcaatcctgtgaatggatggattcccgttgatttagggacatctgacccaaagtttacaaaacattttacaacttttgctttaactgaatcagtctcatcaatggctcattcgaaggtcaaagatgcagggactgtcagtctcactgtgcctgctccacttgctgagatgcttttatctggtcagcgttcaagatatgagattcgttggttctttagtgcgggtaagattcagcatataattactacagtgagaaataaaattctcgactggtcacttgaattagagaaaaagggaatactcggagaaggattaatatttactagagaagaaaaagaggttgcaccaatgacggttaataatacgaacatctttcatggctcagtgaataacgccggagctatcggggcaggcaatactggtaacatcagtcaacagaactctatctcagttggtgacattgcatctcttgagcgtgagctaaagagtcacggtctcgatgataatgatgttgctgaattgaaacagcttgttgagcagtccccgaaaccagcctcaaaagaagaagttgaaaaaggtttcggctcatggattggtaagatgacaggtaaggcttttacgggggcgttaaaggtcgctggtgcagccgctcctgctgttcttaccaatgcactttgcggttacttcgggatccctgtttaa

SEQ ID NO: 180842 - DNA, 903 bp, Klebsiella oxytoca
atgaaaaattcgccagttcttgagttgcagggtttggctgctgacgtcagtaacgacattgttggggttttaatcaaagccaaaatgattgcagtgaaattaaacctccctgaattggcagaatggtttgattatgaacttgatggctatcctgatggggttgaactccctgattatcgtataggacagggcatagtaaaaggttggaatccttatcacggatggataaatgttcaatatggtgatactaaacctgaaattattaaaaaaattcagaaatatggtttaagtgaatctatttcttcgctcagaaatttacgtgatgctgatgatagtgttaggttagtaatgcctgctgagcggataaaaagaattttcccttcaagaaacgctccctcagaaatatgttggtttattaacgcttcaaaattggaatgtatagtaactactgtaagaaatagaatattaacatgggctttggagttagaaacaaagggaatattgggagagggtgtcgtgtttagtgcagaagaaaaagaaattgcacctgcaactttttataacactaataatttttatggttcagttaataattcaggggcgataggtgcaggtaatcacggtagcatttatcaaaataatgaaaccttgattaacgactttgagtctcttagtcagacacttaaagaatatggtttagctgatgaggatattagagatttagcaagggtttttagtgagtctccacttcctaaaaacaaaaatgaggtgagagaatgctttggtgattggattggagttatgacagcaaaagcattaaagggtggtcttgtaatagagggaacgaacgtccctgacattttaatgaatgatttgtatagctacttcaatctacaaagataa

SEQ ID NO: 180843 - DNA, 1626 bp, Klebsiella oxytoca
atgccaaaagcaatctcatacatacgattttctacaaagattcaatcagttggtgattctactaagcgtcaaagcaagtacattaacgattggttaaaacgaaatcctgattactatttagacgaatcattacgctttcaggatttaggcataagcggcttctcaggagctaatgctaagtctggtgcatttggagaatttctagccgctgtggaatctggctacattgaagcgggttcagtgttactcgtagagtctctggacagggtttcacgacaggacatcgacacagcaggagagcagcttagaaagattctcaggtctggcgttgaagtggtgacacttgtcgataacgagtggtacacgaaagaaagtctgaaagattcactgtccatgattaaagcgatgctggtgatggaaagagcacatgaagaatcagcgatgaaatctacccgcttgcgctctatgtgggctgctaaaagggaaagggctgcaaacggtgaaataatgtcaaagcgttgtgcagcatggttaaaggtctctgatgaccgttcacactttgaattcatccctgagaatgtgaaagctgttcaacgtgtctttcagctacggttagagggcttgtctcacgtcaagatagccaaacaaatgaatgatgaaggtttttcaaccctgaaccagttcaaatccgttacaggtggctggtctcaatcgtcggtcacagagttactttcaaaccgttcagtgattggtttcaaagtcccttctaaatcaatggctgtaaagggtgtgtctgagattcctaactattacccctcaataatcaccgatgagcaattctacgctgtacagcagcttaaacagggctcagggcgcaaaccctcatctgacctacctctgctaacaaatctcttcaaaggggttctcaggtgctctgagtgtggctttattgtcgttgttgcgggtgtctctgctaagaggtctggtatatacaaatgctcgatgaagagtgaagggcgttgtaacagtgttgggttcagcagattgcagactgaccgcgcattggttcaggggctgctttacaatactaaccgtctttcactcaatcgtgataacggctctgctattggtactcttcaaagtgaattagaacagcttcagaaacagcgtgagaggctcattaagctggctatgctggcagatgatacagaatctatggctaaggatttgaaggcgctcaacagtcagattaaggacgctgaaaaggctgtctcagaggttcaccagcgagagcaatcaagccagcttgagacaatcagccatttggatttgactgtgaagaaagaccggatagaggcgcaaatcatcatcaaacggatagtgaaagagattcgactaaacacggctcaaaagaagtgtgatgtcttcttacacaacggcttgaaattgttaaatttcccactggatagggttgttgatggagcgcaatggctggaggttttaccgctgattgacggtgatgaattcgactttgcagagttcacggctaagcctcgtcacatagccttagaagaggctccagagtgggtgaaagagatggaagagcaacctaatcagccgctgtga

SEQ ID NO: 180844 - DNA, 3606 bp, Klebsiella oxytoca
atgatgcaaaactcgtctaaagatatcctttcagcgtggcatgattatgtgaaattcagtggcgcagaaaagagtaaaataccggccagcaaggtgcatgagcatcaacaactcatgctcggtataaataactgtgaagaaaaccagagcggagtagtactccgtgttacgcctgaaatgcgcaaccactggcgccggcgtttcgttaaatatgacgaaaagggtaaaactacccacattgagcctgttaacctgctatttccggtactgcgctgtatcgaaaatgagcgaggtaaggccaatgtaaaataccttccgctgttctctttccccctcccaaaatcattttttgaacagaacgaaaacaccctgctagttcccgttaaagatgggcaacttgttagcgcattccccttcgcttttcgtgaaatgtttggtgttcagctggatgagctcggtgaaaaccgtcatatgatgagtatcgtcagcgcgctcacgggatgtaaatatgacacgttccttgaggcgtttaaggctcttctgaaatgggtcactcagcaatcaaacagtaaatatcaggggctggaaactgcgtttaatgccctggtggctccgctgcataatgaggattacaacctcaagcgtgatgcggaagatttcacctggctttgtgataacgcggttggtgatttcccgttgctggaacagtatctcagccatatccatagtgacgagaaggccccgcatattcacgaagtggtgactggcggtttgtttgaaacgcaatatcctctgggccatgggcagatggcggcaatacaggcgattaatcaggatgagcgcctgattgccgtacaaggtgcgccgggtacgggtaaaactacgctattcaagtcactcatcgcacaacaactggttgccagagcactggcaattgctgatggaaaggaccagaacttcggcatgctggtcacgtccactgcaataaaagcggtggagaatatcattgacgatctgcgcagtgaccctgcaactcaggatctagactggttatggtttcatagcggctcgaacgaacaggttcagcatgagcttacccggcttgaaaaactgattggtcgctggcgacaggaaagctatgaccaacagcagcagcacgattttttagcggttttactcaagcatcgcgaggagatgaacgcttgttaccgggcgtatctgaatgaaaaggcagtcgcgatacaatctgttgtggattgtggtctggacacccgactagcaaaagagctaccagctcgtttcatggaaaaaatgcccccgctcgccgctcatgcacagatactcggcattgatgtttcgcttcatcaccccgacgacctggataccttagcctgtcagttagaacagcgcctgcaggaatttagggagataaaagcgcagcgtctacaggccagcagaatttaccagacgttgcaggcgacatggccgcagcagcatagtctggagcagatacttagctggatggattcaccgctacgcccggccctggaactgcattaccgcgactatccgcgtaaagggataaagcgttatctggctcgttttttcgagaggaaatatccagcaaggttgcaacagatgagcctggctgcaccggaggactttcgcaaattcagtctttcttcccttccccatcgtcagttggctgctctggctgatgctggggaaatactttcacagcaagtagacagcttagcgctactggcgctgctcctgcatgcggaacccgaagctcaacaggaagttggcctgttggctcttaatactgaagtagcagaattgcaggcacaatggcgtcaggtcatccgggcgcaacagctaacggcacagtatcaacagctttatccggaaggtaactggtgcgacattttgcgtaaacgctttatcaggcaacaccgggaaatgttcgaagctgctatcggttatctctggcaagagcaactgaagcggaaaattgagctggaagaggtactgactcactggcgggcgttgatgagtaagcgccttagtgcgggctattatcgctggctggataagcttgatgatttctattgcgcactgtctcttgtatatccggtaatggcgaccacgctggtttctgcgtggaaggttgctggttatcgtaagcttgatgaactcaaggggcataaaccgtggcacctggcactgtgcgacgaagcgggtatgatttcgcttgaatccctggtgcccctattgagtcgcagtgagaaagcgatgattgttggcgatcctctgcaaattgaacccatcagaaacctgtcagaaaatctgcaaacacagttgcgtgagcgtcatttcgccagcaacaattcgttgtatgagcgtgtctcacctgcaagcgtcacgggctggcaccgtgctgctggtacgctttccggcaaggtagacgatacgggtaatggcattattctcgatgagcatcgccggtgccagcaacctattgccgaccttttcatccgactggcgaactatcatggcgtcagcgtggaaacggcctccccgtctagccatattgccagcgcgtttgagaaatcaggcggacatcatttgatgttctacagcgtagaaggtcagaaaggcgatatggttaacactaatctggatgaagttgatgctattgagctattgctggataagctggaagaagctggttacgatctgactgccgatgttggcatcgtcacaccctatagcaatcagaagtcattgttgattaaacgtcttgcgcaacgaatgaatcactggcagaaaaactgcattggtacagtgcaccagtttcagggcgttggctttgaggtcatcatttatagtccggtaatttttcatcctcttgataatccgaattttcaaaacgatgcaccaaacatgctgaatgtcgtggtttcacgcgcaaagcagcaatttatcgttgtaggtaaccatcatcgattgcggcaagcaggtggatacctgaaagtccttgctgatagcgttgctgaaagcttccttcttgaacaaggtagccagcatccgaattttgccagcctaagccagcccccccgtctacagcgttattatcgcgactgtgaacatattgccgcatttagcgcgctggccagtcagtgtgaacaggagctggttatcatcgctccgtggatccgccggggaggtaagcattatcagaggccggagctggcgcagttggtagccacgcagcggcgtggcgtcagggttaaagtttattacggctactatcatcagcgcatggatcgtgcggatgataatgatgagactctggttgccgagtaccgcgaacaactaggaaaagagaatattatccggttgacggaagggacacatgaaaaggtaatgatgatcgatggccgttacattgttatcgggagttggaactggctatctcatggttatcaccatagctgcgagcgcagtgaacagttcactaatgcgattcgtcatgagatcagtgcagaactggatgatgcgtcgctggtgaaggagcttagggagcggctgaggctggagtaa

SEQ ID NO: 180845 - DNA, 147 bp, Klebsiella oxytoca
atgggcagaacgctggaacagcttattgcggatgaaaaacccgaagtcgcggccgaagctcaggcgatggcggcagacatcctgctcaatatccacctcgccgaactgcgtgaaaaagtacagaaaactcaggtggaaatggcgtag

SEQ ID NO: 180846 - DNA, 1002 bp, Klebsiella oxytoca
atgaaatttttagtaactggagccgcaggattcatcggctttcatacctgcaagcgccttctggaggcgggtcatgaggttgtcggcctcgacaacatgaacgactattatgacgtcaatcttaagcaggcccgtctggatttactgcaatctcccctgttcagttttcacaaaatcgatctcgcggatcgtgaaggtattgcccggctttttgctaacgagaaatttaaccgagtgatccatctcgccgcgcaggcaggagttcgctactccctggaaaacccgttcgcttatgctgacgctaacctgattggttatctgaacattcttgaaggctgcagacacaacaacgttgagcatttgctctatgcctcatccagttcggtctatggtctgaaccgtaaaatgccgttctctacggaggattcggttgatcatccggtttcgctgtatgccgccaccaagaaagcgaatgaactgatggcgcacacctactcgcatctttatggcattccaaccaccggactgagattcttcaccgtctacggcccgtggggccgtccggatatggcgctgttcaagttcacgaaagccatgctggaaggcaagagtattgacgtttacaaccacggtaagatgaagcgtgatttcacctacattgatgatattgtagaagctatcattcggttacagaatgtccttccaaatgaagatcacgagtggagcgtagaaagtggttcgccagcaacgagttcagcgccctatcgtgtatataatatcgggaatagctcaccggtcgagttgatggattatattacagcactagaagaagcgctgggaatggaggctgtgaaaaatatgatgccgatgcagcctggtgacgtaatggaaactagtgcagatactgcggctttatataatactattgattttaaaccagaaacttctgtaaaaaagggagttgaaaattttgtcggttggtataaaaaatattatcaatag

SEQ ID NO: 180847 - DNA, 1377 bp, Klebsiella oxytoca
atgacaaacaaactatcttgcttcaaggcatatgatattcgtgggaaactcggtaacgaattaaacgaagatatcgcttatcgcattggtcgcgcttatggtgagtatttaaagccaaaggacattgtccttgggggtgatgttcgtctgactagcgagagtctcaaacttgccttggctaatggattacaggatgctggagttgatgtcatcgatattggtcttacagggaccgaagaaatttattttgctactagttatttaggcgttgatggtggtatagaagttactgctagtcacaatcccatggattataacgggatgaagctagttagagagagctctaagccaattagcggtgatactggtcttcgccatatccaaaagctcgctgaagagaatgcttttactactgtatcggctgataatcgcggtcgttataaaactatgtcgattttagtgccttatatcgataaaattttgtcttatgttgaattaactaatttctcgaaacctcttaaattagtgcttaactccggcaatggcgcagcaggtcatgttattgatgcaatagaagaacgattcaaagaaaataatttacccattaaaattgtaaaaattaataataatcctgatggtcattttcctaacggcattccaaaccctttattacctgaatgtaggcaggatactattgatgctgtcgtagcacataaagccgatatggggattgcatttgacggtgattttgatagatgcttcctttttgacgaaaaaggtaatttcattgaaggatattatattgttgggcttttagctcaagcatttctcgaaaaagcacccggctcaaaaatcatccatgatccacgtcttagttggaatacaattgatttggtaacggagtctggtggtatacctgttatgtctaaaactggccacgctttcattaaagaaagaatgcggcttgaagacgcaatctatggcggggagatgagtgctcatcattattttcgtgatttttcttattgtgacagtgggatgattccgtggttattagtagcggagttaatttgtaataaaaatcagactttgagccatcttgttagcgatagaatgacggcatatccagcttctggtgaaattaatagttcacttgcagatcccaaaacagctattgaacgagtattagaaaaatataaagctaacgctgtatctatagattatactgacggtataagtgttgagtatccgaattggcggttcaatctacgcagttccaatactgaaccggtagtacgtttaaatgttgagtcaagaggagatcaggatttaatggttgagaagactaatgagattctggctcttttgagatcttaa

SEQ ID NO: 180848 - DNA, 1764 bp, Klebsiella oxytoca
atgaaagatcagaccctgcgctattttgatgcagaaatgcgctacctgcgtgaagccgcaaaagagttcgcgcaaacccatcccgatcgtgcagcgatgctcgacctggataaagctggtacaccggatccgtatgtcgaacgcctgtttgaaggctttgctttctcgatgggacggctgcgcgaaaagattgacgacgacctgccggaactcaccgaagggctggtcagtatgctctggccgcattacctgcgtaccattccgtcgctttcggtggtggcacttaccccagcgctgcatgccatgaaaatggccgaagtcgtgcccgcggggttggaggtgtactcccgcccggtggggccgaagaacacggtctgtcgttaccgtacgacccaggatgtaatgctcaatcccctgagtgtctcagcggtcaccatgaccaccgaacctgacggacgttcgctgttgcggatgcgcatggcctgcagtagtcaggcggactggtcgcatgccgacctcagccgcctgagcctctatctcggcgcagatgcacccgtcagcagtcagctgcacctgatgctcacgaaacgacaggctgccctgtatatgcgtctgcccgggcagaccgatcgtattcggcttgacgggtacttctcgccgggaggatttgcggaggaagacgggctgtggccgaagggggataccgccttcagcggctaccagttgttgctggagtacttcaccttccgcgacaagtttatgtttgtccactttaatggcctggacggcatcacgccgcctgccgggacagagtacttcgacattgaagtggtattcagcacgccgtggccgtctgatctgccggtcaccgatgacgcggttcgactgcactgcgtgccggtgattaatctgttcaccctggaggcggacccgctcaccattacgggcctggaaagtgagtacctgctgcgccccaaacggctgcaggacggacacaccgagatttactccgtggattcggtcaccggctcaaaccggacgaacgacgcggagtatgtgccgttcagctccttccgccataaaggcgggatgatgcgccgccaggcaccaccgcgttactaccatacccgcgtgaagcgcagtgtgaccgggctgtatgacacctggcttatcctcggcggtcaccagtgggaagatgaccgcctccttgaccgcgaagccgtgtcgctacaaatcaccggcaccaacggtcagttaccacgccgggcattgcagagcacgctgctggatagctgtgagcaggtggtcagtacaccgctttcagtacgcaacctctgcaaaccgacgctgccggtctacccgcctgcggaagaccgattccactggcgggtgctgagccacctgggctccggattcctgaatatgctgagtaccgctgaagtgctgcgcgggacgcttgcgctctataactggcaggaagatgaactgaacacccggcgtctggaggctattcagcatgtggagcatcaccgccttcagcgctttgagcagggctacctgctacggggcctggatatcgaagtgatcctcgacagcaatggttttaccggtgagggcgatattcatctgtttggtgaaatgcttaaccggttttttgcgttgtatgtcgatatgaaccagttcaaccagcttaccctcatcgttcagccagaaggaaaatgcatccggtggaaagagaatcacagtccgcgcctgccaggctga

SEQ ID NO: 180849 - DNA, 1059 bp, Klebsiella oxytoca
atggagcggctgggtgaccggctgccatatatcaatttttaccgcttctgtcagttgctggagcagagccagccggacaaaccggttacgggcagcacctggcaggtacgtcatgagccggtacgttttaggccgcacccggggatgggcttcccggcttcagaaatcaggtcattcgacgctgctgagtacccgcatcttccgccgacggtacgtatcacctttatggggctttatggcgtggagtctccgctgccgacgcactatatcgatgatatcacccagcggcgggaagggtacgaagccacggcggatttcctcgatatcttcaatcaccggctgattgcccagtactaccgcatctggcggaaatattcgtatccggcaacttttgaggaaggcggtaaggacaaaacttcgcagtacctgctggggctggccgggctcgggattgacggctgtacagacagtatcgccgcgccagcctcacgctttctggcgctgctgccggtcatgatgctgccggggaggactgcagaaggcatggcctcactggtgcgtctgctggcacccggcacgcaggtaaaaatctggcaccacgacaaacgccgcgtgccgctgaagaagcccctgaccatgagcgtcagccagcccgtcaccctgacaaaccgtccggtgatgggtaactatgccaccgatgtgaatagtcaggtactgatgcgtctgaccaccactgacccggctgaagtgccgggctggctaccgggcggggagcttcacacggatttaatggctctgctgcatgtgtatcttggctcacggctcgatgtgcgcctgcagttatgtgtcgaccgttgcctgctgccggatgcgacgatgagtactaaacccaaagctggtgcagtgcagctgggccgcaccgccgtgatgcggccgctgaatgcgacgaataccgtcgtacaccctcaaattataaacatcaatcttggccgctatgagcgggtccaggaaaatattcaccgcagggagaccgatgaagatggcgattatcgctggtaa

SEQ ID NO: 180850 - DNA, 537 bp, Klebsiella oxytoca
atggcgattatcgctggtaattttcctcagattgcgctggccgcgggtatcacactgatactcgctggctgtgggctgacgcaaaaagtgacagacggcaccgttgccgtgactaaatcaattttttataagcagataaagaccctgcatctggatattcgcgcccgcgaggccgtcaacagcaatgcaggcggcgtggcactgtcgacggtggtacgtatttaccagctcaaggaccgaaaaaccttcgacacgacggactacccgtcactgtttaaggctgacagtcaggctattaaagcagacctgatagcggagaaagatattcgtctgcagccgggtggggcggtgatggtggatatgccgatggaggaaaccgcgcagtatgttgcggtggctggcatgtttatgtcgccggaccaggagaacaacacctggcgggtggtgctgagccgcgatgacctcgatccggataaggcacgcgtcatcgaagcgggcaacaaccggctgaccctgcaggcgctgaaagatgagtga

SEQ ID NO: 180851 - DNA, 453 bp, Klebsiella oxytoca
atgagtgagtcaccccgtccgtcactatatgaaacgctctacggcaattttactggcggcattgatctgtatcaggtcagcgagcagaaccagaccatcatttctgtgctggacaatatgcagcgtatcctcaactgccgcgccggtacgctggcgcacctgccggactacggtctgccggatatgactaaaatcctgcaggggatgccagggactgcccatgaactgatgggagcgttatcggctgtactgctgaagtacgagccgcggcttaagaaaattgatgtggttctgcttgagcagactattccgggggaattgcgttatgccattgatgccgaactcaggggcatcggtctggtgcgttacggcacggcgttcatgcctgaagggcgcgtgctgatacgctaccttaaacagcagcagtatcttgatgcacagacccacctctaa

SEQ ID NO: 180852 - DNA, 1275 bp, Klebsiella oxytoca
gtggcaagtgcaaacaaactcacgctgttcatcgtcatcttcatgctgttggggatcctctccggcgcggccatccacgcttacgccgggcaaacgactattaccgcatggtcggaaaacattacgctgcttaccgacgtgtttctgcgcctgattaagatggtcattgcgccgttggtgttcagtaccctgacggtggggattatgcggctgggcgaaacggcgaccattgggcgggtcggcggtaaagccatggtgtggtttattacctcgtccattctctccattctggtcgggctggtgattgttaccctcgagcatcccggcgccggtttgaacctggcgatcccgaaagagtccgtggataccgggctggcggtgagtgggatgagcctgaaaggctttctgacccataccatccccaccagcattaccgaggcgatgtccaacaacgagattctgcaaatcgtggtcttctctatgttcttcggtatagccggggcatcgctgggggagaaattcaacgccccgctggtggcggcgctgaacgtggtttcccatattatgctgaaggtgaccgggtacgtgatgtacgtcgcgccgctggcgattttcgccgcgatctcttcggttatcgcctcgcaggggctggggatcctgcttaattacgcctcgtttatcggcggatactatgtcgcgattctgctgaccagcgcggtgctgctggcggtggggtatatggtgctcaaaaaagaggtttttcgcctgctgaacatgctcaaagatccggtgctggtggcgttcacgaccagcagctccgaggcggcctatccgaagaccctggagcgtctggtggaatttggctgctcgcgtaatatcgcgtcgtttgtgctgccaattggctactcctttaatctggtcggttcaatggtgtactgctcttttgccgccatgtttatcgcccaggcttacaatattcagctgagctttagcgagattaccgtaatgatgctgacgctgatgctggcttcgaaagggattgccggggtaccgcgttcggcgctggtggtgctggcggcgaccatcccgagcttcaatattccggtggcgggtattttgctgctgatggggattgaccattttctcgatatggggcgttcagcgattaacgtactgggtaacgggattgcgacggcgatgctgtcaaaaaatgaaggtctgtcgcagaatgaggtacctgaggctgaagtcgcgcctcagcaggcgcaagcctga

SEQ ID NO: 180853 - DNA, 447 bp, Klebsiella oxytoca
atgacgacgaaatcgctaacgctgtctttggatgaacaacagtccattccgttgagtacggtctcagggacgcagggctatcccggcatggatattcgtccgctggcgtccgcaggtatatgcagtttcgaccccggttttgctaacaccgcaggctgtacgtcggccatctcctggattgataccgaaaacagcgttttgctgcaccgcggctatccggtcgatcagctggctcgccagtgcgacttccttgaggtggcctggattctgctgcggggcgatgcgcctgacgaagccagctatcaggcgttcaaaaacacgattacccgccatagcctggtacacgagcagattggccgcatgtgcagcagctttcggcgcgactcgcatccgatggcctctggtgggcacgctggcggcgttctatcacgatgtgctggacgttga

SEQ ID NO: 180854 - DNA, 1353 bp, Klebsiella oxytoca
atgtttattggttttgactacggtaccgctaactgttcagtggcggtgatgcgcgacaatacgccgcagctgctgacgctggaaaacggcagttcactactgccatcaatgctttgcgcgccgacccgcgaagcggtcagcgagtggctctaccgccaccacgacgtcccgcccaacggtgatgaaaaccaggcgctgctgcgtcgcgcgataagcttcaaccgcgaggaagatatcgacgtactcggcaacagcgtgcagtttggtctcgcttcgctgcatcagtacgttgaagacccgcaagaagtctactttgtaaagtcgccgaaatcgtttctcggcgccagcgggctcaagccgcagcaggtagcgctgtttgaagacttagtgtgcgccatgatgctgcatatcaaactccaggcgcaaacgcagctaacggataccatcgaccaggcggttatcggccgcccgattaacttccaggggctgggcggcgatgatgccaacgcccaggcgcagggcattctcgaacgtgcggcaaagcgcgcgggctttcgtgacgtcgtgtttcagtttgagccggtcgccgccggtctggatttcgaagcgacgctgagcgaagaaaaacgcgtgctggtcgtcgatatcggcggcggtaccaccgactgttcgctgctgttgatggggccgcagtggcgggaaaaagccgatcgccagcaaagcctgctcggccacagcggctgccgcgtcggcggtaacgacctggatatcgccctggcctttaaatgcctgatgccgctgctggggatgggcggcgataccgaaaaaggcatcgcgctgccgattctgccgtggtggaatgcggtggccattaacgacgtgccggcgcagaccgacttttacagtgccgccaacggtcgcctgcttaacgatttgctgcgcagcgcccgcgatagcgaaaaagtctcgctgctgctgaaggtctggcgtcagcgtctgagctatcgcctggtgcgcagcgcggaagagagtaaaatcgccctttccgcgcagccgagcgtcaccgcggggctgccgtttattagcgacgagctggcgacagctatcagccagcagggtctggaagctgcgctggatcagccgctggcccggatcatggagcaggttcagctggcgctggataacagtaatgaaaaaccggacgtgatttacctgaccggcggcagcgctcgctcgccgttgattaaaaaagcgctggcggcgcacctgccgggtattccggttgccggaggcgatgattttggctcggttaccgccgggctggcccgctgggcgcaggtgatgtttcgctaa

SEQ ID NO: 180855 - DNA, 801 bp, Klebsiella oxytoca
atgaccgacaatttgttttctcgcgctaaaccgaagcttaaccctcccgtcagtgcctggaaagcggatatgccggaaaacagtgagccacagctggtgccacctcagttgctctggatgaataagataaatgatgtgtatcttgagatcccccgttatgacaaagggatgacctggtgggggatgttaccagcaggaatattaatgctgtgtttaatgtcttttatgttaatgatttgtctaaagatgcaaccttatgttgagggttttacaatgcccgcaattgcattgcttagtactagtgtttttattacgttgtcattcttctgtatgaaaatatattttacaactccccgagatcagccagttcgtttaaatcatagccgatgtaaaatttacgtatataaatacaaaaaagaccgtatcccctggtttaaatggccggtcattatcacccgatataactgggctgatgttcatggtgaaatccggtactgcagcgatcgctaccgttcgggccatcagctatggggctcggtctgcgaaccgggaacgtataatgtcatccatcgttttcagcttgcagacggagagcccgcagagttacagcaagtctggagtttcctctgcctgtatatgaaaggcgagccagtgcccgcagagcccaaaaataaaggcagacccgacagctggcgtccacgaaaagcagacaaatggccggaagagtgggggcgggaatccaccaccgcaccagatggtagcactcctgttattcggtctcgtgaaacgctgccggaataa

SEQ ID NO: 180856 - DNA, 186 bp, Klebsiella oxytoca
atgatcgtcagcctgctggtctttatcgtggtgtactgttcggtgtttggcgtaggttattactacattatccggctgattcagaaagggcctcagcccgtcagcgaattgacatcgacaacctccggtacgccggctcgccccctttccgccgcagaggccgtgcctgaagaggagactcgctaa

SEQ ID NO: 180857 - DNA, 873 bp, Klebsiella oxytoca
atgttccgacacgttaagcagcttcagtataccgtaagggtcgccgagccgaatccgggactggcgaacctccttctggaacaattcggcgggccccagggcgaactggccgccgcatgccggtattttactcagggcctgagcgatgacgatccgggccgtaaagatatgctgatggacatagccaccgaagagctgagccaccttgaaattatcggctcgctggttggcatgctcaataaaggggccaaaggcgccctggcggaaggcgtggaaaacgaagccgacctgtaccgctcgcttaccgctaacggtaacgacagccatatcacctctttgctatatggcgcaggcacgccgctgaccaactccgccggggtgccctggaccgccgcctatattgatacgattggtgagccaaccgcggatttacgctccaacgtagcggccgaggcgcgagccaaaatcatctatgagcgcctgatcaacgtcactgatgatcccggagtcaaggatgcgctggcttttctgatgacccgggaagccgctcatcagctctctttcgaaaaagcgctccagtccatcagaaacaactatccgccggggaaattaccgcccgtcaatgaatacgccagcacctactacaatatgtcagagggcgacgacattcgcggtagctggaatagcgatcggcactttgagtatgtggcgaatccccagcctgcagtcgacggcggagacggaggcgtcagcgtcaagctaagtgccgagcagcaggcgctggttaaagccatggcggaacgaacccaatccgacccggatggcgatcctcttaccggcgcagagctcggcgcaggcaagaagaagccctaa

SEQ ID NO: 180858 - DNA, 690 bp, Klebsiella oxytoca
atgacagctcaataccttgaatttgttcgccagcagatgatagtggccaccgccgatctgagcggcgcgacgaaagggcaactggtggctttcgcagaaaacgcgcaattcaccgctacggcgcgcagccggggaagaaagaaagtagccgacccggtaaccggccgcatggtaaacccatccagcccgccaattcccgggcagcagtcccgcgcaaagggttcatcaatcgctctcgttttgcctgttgagtattcgacggccagttggcgccgggctctgctgtcgctggaagagcatcagaaagcgtggctgctgtggaactacagcgagaatatccgctgggagcatcaggagacgatcactcggtgggcatgggagcaattcagccagcagttggccggcgtgcgcatcgcaaagaaaacggttgatcgcctgcgtcagcttatctggctggcggcgcaggacgtcaaagccgaactagcagggcgggagacgtatgaataccaaaagcttgccgccctggtcggagtgaccccgaagaactggtcagaaacgtttacagagcggtgggaggagatgaaaaccaccttgcggcgccttgatagcgatgccctgttgcaggtaacgcgatcacgttcacaacaaaaggcgacaaattttgactcaagtcttgcaaaactggattaa

SEQ ID NO: 180859 - DNA, 141 bp, Klebsiella oxytoca
atgagccgtgacgcaatagagcggatccgccaccgctggcaaaagctccgcctctgccggcaccgcggcaccgtactggttgactaccgcattttgaagaacttcatccgcatctatcagaccctgggagagacagcatga

SEQ ID NO: 180860 - DNA, 597 bp, Klebsiella oxytoca
atggcgcaaacactgcaatttgagaagagttatcaaaacgtactgattcccgcagagccgggaaccagcgaatacctgcaacttattcccgtagggcagctgctttgcggtgagttccgcaagccccggaattacgcattccacaagaagttcttcaaacttctgactctcgggtatcactactggacgccttccggtggcctcattgagcccgctgagcgcaccctcatatccgggtttatcgacttcctttcatccgacctcgatcagcgcgctgcgctccagaacgcctccgagatgtatctctcatcggtcggtatttctcgctcccgagatatggcccttctgaaacacttcgaatccttccgcgagtgggcaaccattcaggctggcttttacgacgaataccagatgcctgacggtagccgtcgtcgtgtcgcaaagtcgatctccttcgccagcatggacgacagccagttcaacggcgtctacaaatcagtgctgaatgtgctctggaactacattctgcgtcgcaaattccactcgccggctgaggctgaaaatgccgccagtcagctgctgagctttgcggggtga

SEQ ID NO: 180861 - DNA, 981 bp, Klebsiella oxytoca
atgtctgacgaaattgaaacgatagatagaaatccgaaatcatgggcagcatggaagcgcgaagcggaaagattgcaaaaaatcatcgatggcatggcgctagccgcaatggacggcgagccggttgaactgccgcttgactacctgcaggggcacaaagacggtctagaatgggccgcacaactggcagaagccaatcaccctgagaccggagactggctttacgatgaccctatcgagctggcaaaagctattcgcaaaggtccagatatgcctccatcgcagccagctctggacaccgagccggatcgcaatcctgtgctggcgtatgccgacagttatcgtgatatggcgaaacaaggcgttgagtcagtcccaatatggagcgtcattaccgacttagagcgaaacatagcgccgctctatcgccacgcgcagcagccggtagtgccggatgatatcaaattgcgagaactgttcgattcctggtttgcgtcagattgttctttcgatcggtccccggaggcgtcagaggaagacaacatcgcatggcgtgaatcttactggtacgtatggcagcgttgccgcgccgccatgctccaggctggcaactctccggtgattccggatggtttaatcgccgctgttaatcgtctgctcgatagcgacggaagccgtggttgttatagcgcaattcaatgcggtgacgctcacgatgaaatagagcgcttgctcgcagccgcgccgcatgatacccccgctctcaactcggtgcagagcgtcgttactgtgccgggtaaatggattccggtaagcgagcggatgccggaaaatgatggggcatatctttgctgggataatcgttacgtaactacctacgcattcatatttggtgcttggcaggcaaaccaattcattgccaagaatataacccactggatgccgctgccggcagcgccgcaggaggtgaatcgtgaataa

SEQ ID NO: 180862 - DNA, 165 bp, Klebsiella oxytoca
atgcgcgactggagactggttttacgcgatatggagcgagaagaggagcgtaagcgctctatggtaaaaatcgttccaggtgaattacgcaatcaaaaatgcccatgtggtagcggtaggaaggctaaaaactgccagtgcgatatgtttaaggggaataaataa

SEQ ID NO: 180863 - DNA, 435 bp, Klebsiella oxytoca
atgaaaactgatatcaccgaactggcgcagagagataaattcgaggctttgctttctgacaaaccatttcacgcgagatacatgcattggagtaacacgctcaatgcttatgactacaccggcattcaactggcatgggaggcatatcaggccggtggcgctgagctggtagaggcgctggagaaggcgcaggccaaagcagatgtatatgacatgcttctggatgactacggtttgcgcgaaaaaggtgttgggcttgcagacttcgttgactggcaggctaagcgcatcgccgagctggattcccgcgccgtgaagctaccgccaaaggtggatagttcaaacattccgtttgcagggcatacctggaattgctgcctagatgaggttgagaagcgcctcgccgccgctggcatcaaggtggagactgagtga

SEQ ID NO: 180864 - DNA, 645 bp, Klebsiella oxytoca
atgagccaacgtttttacatgctctgcacgcgcgaaactgtggggagcaacgcctcgtttcattgccataacggaaacggatatagctccaacatcgaccgcgcgcacgtttacacgcaggaagaggctcagagaagttgggacaacgggagagagattgaccagccaatttgcgctgacgctgttgatgccctagctgtatggcatgtggattgccagtacatccccaacgaaagcacagttgaagctggttgcagcgcatacgttgcgtataaaaaaggcgattggaacgggaacgatgtttactggctacaaagcggagggttgccaaccgatgatttcagcaaggcattcgtttttgtatccgccaacacggatgagcccggcgttgtgtggctgccattccatatggcagatgcagtaaagcgccgcacgttcaatatcaatgatttcaaccgccgaactatggttcaaggtgccggactgctgatgccggaatggctaaaaaaatacaatcgcagacagaaggcaaaaagtggaaaggttcgctggaactgcccacattgtggccgcattacctggcaatacaacccatacgactttgatggatgcagcaattacagctgcgaaggatggcgagcatga

SEQ ID NO: 180865 - DNA, 306 bp, Klebsiella oxytoca
atgaaaaacaataccggcagacaggctgtaatcaacttcatcgggcagcaccctggttgctcatttcaggatatccgccgcgggactgggctagacaagtccgttgtcaattctgctttgtggcagatgaaccgcgatggacgcgttaagcgcgaaggagaatgtcggagctatcgctacacccttgcagagcagacaaccgtaaccgaaagcacgtcggcggattttcagtttagcaatcatcattgcggcgccaacaagctgaccaacctttttaaccagtgcctggcgggggtaagaaaatga

SEQ ID NO: 180866 - DNA, 1431 bp, Klebsiella oxytoca
atgaccgctgatttcatgacacctccgcacagcattgaagcagagcagagcgtacttggcggactcctgctggacgacgacagcagcgagcgtactcagaaggtgctttcgatcctcaagccggaatctttctactcgcgtcagcaccaggtcattttcgctgaaatgcgccagatgtaccgcgaccataagccggttgatctgctgaccctgtttgatgctctggaaagcaaggggctgacagagaccgttgggggctttgcatacctggctgaaatgtcgaagaacacaccaagcgcggcgaacatcgtggcctatgcaatgcgtgtccgtgagaccgcgatggaacgctacggtatcgagaaaacaacgaaggcgatcgaattgctttatgcccgcaacggcatgacggcagagcagaaatttgacgctattcagggattgtttaccgagataaccgagcacgtaaaaacaggtcgacggacagggcttcgcacgttctatgacgctgtgaatgactggtcaaatgagtttgacgatcggatgaaacctgatggtcgttcccgtgggttatcgactgggatccgctctctggatgatcttctcggtgtgaagcgcattgtgcgcggcagcctgtttgttataggcgctcgcccgaaaatgggtaaaaccacgctctatacccaaatgggcgttaactgcgccacggtcgaaaatgagccggccctgatgttctccctggaaatgccggaagggcagatggtggagaaaatcactgcccagaaggggcggatctctccaaacctgttttacccggacatgactaaggatgactacggctatcgcggggactggaacagcgatctgcaaaaggccaccggtgtaatgggcgcccttattgaaaccaacaacctcctgattgatgacaccccgggtatttcactggcgcatgttatggccgagtcgcgccgaatcaagcgcgagcgcgggaaggtcgggatgatcctcgtcgattacctcacgctgatgaccgccgataaggctgagcgaaacgacctggcctatggtctgatcaccaaaggcctgaaaattcttgctaaggagctggattgcgtcgtcgttctcctgactcagctcaaccgggatctggagaagcgaaccaacaagcgaccgctgccgagcgactcccgcgacacaggccagatagagcaggactgcgactactggcttgccatctaccgggaaggtgcctacgacgaaaacgcaaaccagagcgacacagagctgctgctgcgccttaaccggcatggtgagacaggtgttgtctattgcgagcaacgtcacggggcgatttatgactgcgaccaggaggctgccagtcagcgccggcgcgagaaagaagaaaaaccaaccaagcggggtggattttga

SEQ ID NO: 180867 - DNA, 900 bp, Klebsiella oxytoca
gtgagtaacgtatccaatttagccgaagccagagaggccagaaggctccagaaaccgcgcacgaatgacggtaaggggtttgccttgctgcaccgtaaaattatggatgtgccgttctacaaggatgctgaggcggctcatctatgggttcacctgctcctgcgcgctaatcacgaacagacactggtatcgactgatgtcggcgatgtgatgtgcgaaagaggggagttcatcaccgggcgaaacacactggcaatggaaacggggttaaccgctgatcgcgttaaatcactgctccgtaaattccagaacctgggcatgatcaccaccaaatcgaacaaccgttttactgttctaaaagtggtcaaatatgacgaatatcagtcaaatttttgtccagccgatgtccagccgatgtccagccaaaacgcagtcgtaccaatgcctgcggaggtggagtgtccagccggtatccagccattgtccacagataacaatatattaaataacttactacctaacggtagtaagtatgtcgcaaatgaccagaaaccggctgaagagaaaaagtcacgtttgtcatgcgatgaagtatggcaatgcctgaaagatgaactacctgaagccaggggttggagatgcctcactgatgagcgacgaaatctgatccgcaccttctggagcaaggcgaacaaaatcgcacgcaatctggatggtaagccgatggacatggatggttttcgcgactacctccgctacatcgctcagaactgtcgctggatgctggaagaccgaccagaccagaagtcagggaagacatggcgccgcatgaaattcgataagtttctgacggaaaaactctacatcgaagtgcgtgagggggaccgtgatgaccgctga

SEQ ID NO: 180868 - DNA, 147 bp, Klebsiella oxytoca
atgcctaagagcaacagattttaccaggcacaaacacacaaaaatgttacccgctatcgcttcattcgctcggttaacccggtggttggcatgaaaatgcgcgccatcctggaagagctgaaacggaaggaggaaggccgtgagtaa

SEQ ID NO: 180869 - DNA, 222 bp, Klebsiella oxytoca
atggggacctcaacagcacgcaacaaagtggaggctcagaggatagagagctggttacacagccagatatcagaactgggtacaacgacaatcgcaaaagttgccggcgtcaataaatcgacggtgagtcggtggcgggaaagtttgctgccgaacatgtctctgctgctggcaattctgatttcgaacaggccgggagagaagggggattttgaagcatga

SEQ ID NO: 180870 - DNA, 234 bp, Klebsiella oxytoca
atgaaaaaccccgcagtagaaaaagcgatttctatcgtaggcagtcaaaaagaactagccaagcgatgtgggaaagcgcagtcgacgatctgcgactggctgaatggaaaaaagagaatttcgcccattaacgtcccagatctggtggccgctgtaaatggagagatcaaagcgtatgagtttcgccctgacctcccatcaattttcccgccaccaaataataacgccgcctga

SEQ ID NO: 180871 - DNA, 690 bp, Klebsiella oxytoca
atggatttctctgggcgcttggcgcatgcgatgtcattagcgggatatacacaaggccgactagcaaaagaagtaggcatggctcagtccagcgttaataagttgcttaatggcgctaatggctcacgcaagacagtagagatcgcatccgttctcggtgttcgacctgagtggctatcagctggtgatggggaaatgttttctgagccagggaggggatcactagcagctccgcaagtagaaccccagaaaggaatatatcgtgttgacgttcttgatgttaaggctagcgctggaccaggggcattgatcactaatgactttatcgagacgatccgagcaattgagtatacatcggagcaagccagagcactgttcggcaaccgaccatctcaaaacattaaggtaattactgtcaccggcgatagcatggacacgactatttctcctggtgacgagatttttgtcgatatcagtgtgacccatttcgacagtgatggcgtgtatgtttttgcttttgggaaaacccttcacgttaaacgcctgcagatgcaaagagaccgtctggcggtcatttcagataacccgatatacgaaaagtggtatgtagaacctggtgacgaagaccagttctatgtgatggcgcgggtccttctcaggcaatcaatagaatacaaacgatttgcataa

SEQ ID NO: 180872 - DNA, 396 bp, Klebsiella oxytoca
atgcaacctttaccgcgtttaacttctgaacgtcttgcctctttgcctgcaggcacacgcctgaaaatgggtggacacatcgtgaaacttgtcggtcgtggtgtgtttaccaacgatgccggcatcacccagaacatggtcgattacgttgattcccgcggcgtaccaggcagctttgaggaaaaaattttcctctccacggcaaccgaacacctcaacgcagtcatgtgcgaacactgctacgcacttcgccatccgaatgattgcgtcgtccgtaacatcacgaactacatgaccagccgccaggcgcatttctgcgacgacaaaggttgcgccgagaaatatttcattaaacacccggggcaccagaagtcctcacggagaacgagatggtaa

SEQ ID NO: 180873 - DNA, 156 bp, Klebsiella oxytoca
atggtaagtcaggaaagcggaatgctggctctggccatggtgattgttgcctatgacctgcagccagaagaactcgataacgcggccaggcaacttgccgaatatgacgcagtaagcgacgccaatacggagatgaaagatgttgcgcgtaattga

SEQ ID NO: 180874 - DNA, 660 bp, Klebsiella oxytoca
atgttgcgcgtaattgataccgaaacaaccagctttgaaggcggaattgtggaaatcgccagcgtcgatattgaattcggcgcgatttgcaacccgatgagcgattttgttcgccctccggaagcgatcggttttgaggctatggccattcaccacatcaccgaagacatggtagccgatgctccgttcatcagcgaggtaatcggccgctacctgggggccagtgtttatgtggctcataacgccgcattcgacaagggcaagcttccacagattgatgccccatggatttgcacgctgaagctggctcggaagctttatccggagtttgaaagccatggcaaccagtacctgcgttaccgccttgggcttaaaccgacccttcctgaagggctctatgcacaccgcgcgctgtatgactgctatgtcaccgcggagctgctgatgtacatgggccgcgaggcgcagtggacgatccgcgagatgcgcgagatatcggcaagcccatctcttctctaccggatgcgtttcggtaagcacaagggaaaaacctttgaggaggttgccgcagaggataaggggtatctccgctggcttctcgggactgatctggacgaagacatggaattcaccgttaagcactggctgaaaggagcctga

SEQ ID NO: 180875 - DNA, 669 bp, Klebsiella oxytoca
atgggaacgcctgtactcatcctgggtgatagcggtgccggcaagtcatacagcctgcgcaacttcacacctgacgaagtgattttactgcaatgcattccgaagatgctgccattccgcgctaccggctggaagctcaacgggaaagagctgccggatggctctgtgcaacgtggaaacatcatccggtttgatgcctgggatgcggtgctggactccatcaaccgcatggttctttcgaagacaagacgcgtactggttatcgacgatttccaggtcgtcatgcagcacgaaaacatgatgcgcgcataccagaccgggtatcagaagtttacggaaatggcagatcacgtttggcaaatcattatggccgccacacggctgccggacgacttcagggtttacttcctggcccataccgaagagtcggacgggaaaatcaggatgaaaaccaccggcaagatgttgaacgaaaagcttacgcctgaggggtatttctccatcgttctgcgggccatcaagaaagacgggaagcacgtttttttgattaagggtgacgacaacgacaccgcaaaagcgcctccggacctgttcccggggctcactgaaatggataacgaccttaaagccgttgatgtcgctatcactgaatttatgaccgaattataa

SEQ ID NO: 180876 - DNA, 705 bp, Klebsiella oxytoca
atgaaccagccaatgtcttttgtatggaataccgaagctgccagcctggcgaagaaagcaggcgccactggcggaattagcgaaactggtgcttatgagggattcattacctcagccatttataccttcggtaaggatggcagtcagtcacaggcgcttgagctgagcctggacagtgacggcgccaaagccaactacctgcgcatcaactacatcgggaaagatggccagcaaacttttggcatgggtttgatctctgcccttctctgggctgcccaggttaaaagcgctcagccagaacaggtgcaaacagaaaatggtgttgagtggcattgcccggcgctggttggcaagaaagtgggcctgttcctgcagaaagtcctgtacaccaaaggcgatggaactgacggctataaattcgaagtccgccatgttttccagcctggctcgcgtcgcacttatgccgaatacagcgaaaacgaagcggcaaccgctatcgctgccctggaaaagtcgatgaaagataaagacgatcgcgtccagggtaatcctcagttttctggtggcggtcgccagcaggctggcgctaacccttatgcgcaaaaccctaacgcagtacctcattcccggctgcagcaagctgctaatcagcacgctcaaaacatccagaatccgccggacttcgacgacgacattcccttttga

SEQ ID NO: 180877 - DNA, 657 bp, Klebsiella oxytoca
atgaaacgctactcacttatctatgccgacccggcctggtcttacgggaaccagatcagcaatggcgccgccgtcgatcactacccaaccatgagcttgctcgatatgaagcggctcccggtatgggagctcgccgcggataacgccgtgctggcgatgtggtacacaggcacccacaaccaggaggcgatcgagctggccgaggcctggggctttacggtgcgcacaatgaagggtttcacctgggtgaagttgaatcagctggccgaactgcgcattaccaaggctctggcagagggcgatgtgaccgatttttacgacttcctcgacctgctgaatgcagagacgcgcatgaacggcggcaatcatacccgcgccaacacggaagacgtactgatcgccacccgcggcgccgggctggagcgcaagcacgccggcattaagcaggtggtctacagcccgctcggcgcgcacagcgagaaaccgtgggaagttcgccaccgcctggaactgctctacggcgacgtgccacgaattgagcttttcagccgcagcgcagcgccagactggagccactggggcaaccagtgcgccaccgcttccgttgaactgatccccggctgcgccatcgacgttgtgaagacggaggcagcatga

SEQ ID NO: 180878 - DNA, 222 bp, Klebsiella oxytoca
atgacgccagaagaacaggaaaacgctctccgcgcccaggctcgtcgctgcgcagaagagataaccaaagcgatgaacgtaaagcctaaaccgaagtggaacgctgtatgcccccccatccttcgcaagcactacgagaaggtaaagtcgatgggcgtcagtctggtgaaatttgtcagtgttattgggcggcttagcggccgctatggagtggaatcatga

SEQ ID NO: 180879 - DNA, 249 bp, Klebsiella oxytoca
atgagcaaccctattactgtcggcctgtcaggcttaactaaccgtatctttgctgggcgctctaagcctagcaaattggccccaggcgtgcgcgaattcaccggggaaaagttcgatgttacggatgacgtcctgtttgctgtagcccatctgatgatttcccgcgatgacgtgcttattttccctgcggcaaacggcaaggaaatccacctgcgcgctgacctcaaagacaaggcaggtgcagcatga

SEQ ID NO: 180880 - DNA, 705 bp, Klebsiella oxytoca
atgagcttctttgaaattgactcccgatttttaatcgatacagcatttcatcgtctagaaatcatccgtgacgatgggctttatcgtcaccttcgcatgcagcagccgggaaattcttgctactactacgacgttatcacctggcctggttacttgaccgtaaccggcgacatgggaacctggacattcagtcgcatcgcggacatgttcgacttttttggcgcctgggaaggtggaatcaatacccattattgggctgaaaagctggaggctggcgcgggatgttcggcacgcgaaatgctggcgaaagagtatgaccacggcgcgttctgcaaaagcctgaaagcgtctctgagtgattacctggaggataatgatgatgctgagacagaagaggatgaaggctgggacgacgatgacgatacaccggatagcgacaaagcagtggtacgcgaaatcgtccgtgacttgtgccgggctgggttcaacaacgaatgggaagcctatcaagctgtttatgaagctgattggccatctggttggagcgcttgggatatctgcgatggactgacatttaaaacgtataccagtcacttccggtggattctgttcgctatcacctgggcgatcagcaaataccacaattcgaaaattgttgataaagcgatgactacgtttctggcagttaaaggagtttcagcatga

SEQ ID NO: 180881 - DNA, 405 bp, Klebsiella oxytoca
ttgaacgcggcgtcattaaacgtcttcaaggagctaagctgggatttcaagacaaactcgccctgcaaatttggtgcgaaaatcatcgtcacggaactggtcaaattcgacaggtggggatttgggcttaactggggctggcagcgtaaccgcttagcagaccttgaacgtatgctaatgcttctggatggcaagcctgtccccgacaaccgcgctgacgttacccgtcggctgggagaccatatccatgagaataggcacagtaatcgttatgaggatgagatgtttgcgatcaaatactttcagaaggggacggcgcatatcactttcaggcgacctgagctggttgataagcttaacgacatcattgcccggcactatccgggagcgctggcggcaaagtaa

SEQ ID NO: 180882 - DNA, 156 bp, Klebsiella oxytoca
atgaagcaggattttcgttgcggctgctggttgatggagaaaagagaagcggcgatgaaagccattacccgcaatctcgatcacggtatatggcgggatttaatgaagcgctcaggaatgctgtcgattatggacgctcaggctcgtgaccagtga

SEQ ID NO: 180883 - DNA, 132 bp, Klebsiella oxytoca
atgatatcagaccttactctcaccgaacccgaagtattaatcagccacaccgatgtgatttgctccaccagcattgagcgtattgtcacgggacgtaatgtcgctctggcgcagattgaagcgctgatatag

SEQ ID NO: 180884 - DNA, 204 bp, Klebsiella oxytoca; identical to SEQ ID NO: 83442

SEQ ID NO: 180885 - DNA, 492 bp, Klebsiella oxytoca; identical to SEQ ID NO: 83441

SEQ ID NO: 180886 - DNA, 378 bp, Klebsiella oxytoca
atgcaaacccaaacactatccccaacgcgggaggcttcaccacgcccgtctcccgtagagatctggcagcagcttctaagccacctgctggatcgtcactacggtctgacgctcaacgacacacctttcggcaacgatggcgtaattcaggagcatatcgacgtcggtatctcactgtgcgacgcggtgaactttatcgtggagaaatacgatctggtacgcaccgaccgtcgcggtttcagcgcagaaacacagtcgcagcttctcaccagtatcgatattctccgcgcccgcaaagccaccggactgatgacccgcaacgactacagaacggtgaccgacatcaccaccggcaaataccgggaggtgcagccatga

SEQ ID NO: 180887 - DNA, 375 bp, Klebsiella oxytoca; identical to SEQ ID NO: 40213

SEQ ID NO: 180888 - DNA, 357 bp, Klebsiella oxytoca; identical to SEQ ID NO: 40214

SEQ ID NO: 180889 - DNA, 645 bp, Klebsiella oxytoca; identical to SEQ ID NO: 83437

SEQ ID NO: 180890 - DNA, 222 bp, Klebsiella oxytoca
atgaaaatcatcagcaaacgtcaggcaatggcgatataccgccagcatccgcagtcccggttatttagcttctgcacgggtaaatacacatggtccggtagcatctgccactacgctggtcgtgaggtccaggatatcagcggcgtgctcgcggtattcgctgaacgccgtcaggaccgcaacggtctgtatgtcatcctgcgcagtgtcacgctgaactga

SEQ ID NO: 180891 - DNA, 480 bp, Klebsiella oxytoca
atggaacaccagttaccgttgtttgcccgtgaattatcccctgccgaccagcaaaccatcagggaggcattaaccctgctggcgtgccagctacgcgaacccggcgcgtcatttacctccagccatgccgtccgcgactggctgtgcctgcagctcgcctcagtggagcgggaagaatttaccgcgcttttcctcgataaccagcatcggctgatagcccacgaaacgctctttaccggcactatcaaccatacgcaggtccatccccgggaagtggtgaaagccggtctgaagcataactgcgccgctgtcattgtggcccattgccacccgtcagggcttgccgaacccagcaaggccgatcgtcagatcaccacgcgtattcagcaggcgctggaactggtggatatccgtctgctggatcacctggtggtcggcggcatggaaatagtttcgttttctgagagaggctggctttaa

SEQ ID NO: 180892 - DNA, 471 bp, Klebsiella oxytoca; identical to SEQ ID NO: 40216

SEQ ID NO: 180893 - DNA, 822 bp, Klebsiella oxytoca; identical to SEQ ID NO: 83434

SEQ ID NO: 180894 - DNA, 234 bp, Klebsiella oxytoca; identical to SEQ ID NO: 40218

SEQ ID NO: 180895 - DNA, 948 bp, Klebsiella oxytoca; identical to SEQ ID NO: 83432

SEQ ID NO: 180896 - DNA, 216 bp, Klebsiella oxytoca; identical to SEQ ID NO: 40220

SEQ ID NO: 180897 - DNA, 147 bp, Klebsiella oxytoca; identical to SEQ ID NO: 40221

SEQ ID NO: 180898 - DNA, 714 bp, Klebsiella oxytoca; identical to SEQ ID NO: 83430

SEQ ID NO: 180899 - DNA, 876 bp, Klebsiella oxytoca
atgaataaaactgatggccttcaggccctggaaaaaccgctggcgtcgcttcccgatacgcttcgccagcttattcttgaacgtattcagaatctgacccactacgagccggtgattggcatcatgggcaagagtggtgccggtaagtcgtcgctctgtaacgaactctttcgggggaaagtctccgccgtcagtgatgtgaacgcctgcacccgcgacatactgcgcttccggctgcgcagtggtcgtcacagtctggtgattgttgatttaccgggcgtgggagagaacggacaacgggaccatgaataccgcgccctgtaccggcgtatgctgccagagcttgacctggtgctgtgggtcatcaaagctgatgaccgtgcgctgtcggtggacgagcagttctggaacggtgtgatgcaaccttaccagcagcaggtgctgttcgtgctgaatcaggccgacaaaatcgaacccagccacgaatgggatactcgtaccggcacaccttcaccacagcaacgggaaaacctgaaggcgaaacaggccgccattaccacgatgttcactccccgtcatccggtctgcgtggtgtcagcgttgaccggctggggcgtggaagcgatggtggcaaccatgatgcgctgtcttccggaccgcgccaccagcccgctggcgacacaactgcacgggaggttctgcacggagccggtaaagtcgcaggcccgtgacggcttcggtgaggcggtaggccgggtgttcgatacggctgagtcatcgtcgttcctgcccgccccgctgaaggcggtgattcgtaccgtgcgtgatgtagtggtgtcggtggcgcgggctgtctgggattggattttcttctga

SEQ ID NO: 180900 - DNA, 1890 bp, Klebsiella oxytoca
atgaaaaaaacgctcaatgtttcgttactggctctgcttatttccaacggggctttcgccgcccaatatgcactggacagcaaataccttgccgtttcatttaacgatgcgaattctgtgatggcgcttaaagacgttaaatcacagcatcagctttcacccgaagagcttttctttcttactcttccggatgaaacggtcattcacgccgctgactttaaaataaagcatgtagataagaaagataacaccattatcattgattatgctcatccggattttaacgtcgaggtaaaactgaatctggttaaagataaatacgccagcattgattatacgattaccgccctcgggaaggcgcaagaggtctctaaaatcacgtttttccccaccagaaaacagtcacaagccccgtgggtagaaggttcaataaatagctcgccgattattgctgattcattttttatattgccgaataaacccgtagtgaacacttgggcttatgaagcaaccaccaatcttaatgttgaactaaaaacacctttacagccaggcaccgccgttagctataccacctggttcggtacattcccggaaatcaaccagctacgccgaagcgtcaaccagtttatcaatgcggttcgcccgcggccctataagccctatctgcactacaacagctggatggatattggattctttaccacctataccgaacccgaagttctacagcgtatggatgaatggaataaggaattcattaccggacgcggtgtaatgctggatgccttcctgttagatgatggctgggatgatcggaccggaagatggttatttggtccggcttttagcaacggattcagtaaggtaagagaaaaagccgatagcttgcatagttcaatcggactctggctttctccctggggcggatataacaagccgcgggatattcgcgtatcccatgctaaagaatatggcttcgaaaccgtcgatggaaaatttgcgctctccggccctaactattttaaaaactttaatgcacagattattaatttaattaaagaagagcatatcacttcatttaaactggatggtatggggaacgcaaattcacatattaaaggtagtgagttcgcatctgacttcgatgcgtcaattgccctacttcataatatgcgtagcgccaacccaaatcagtttattaatttaaccaccgggaccaacgccagcccctcatggctgttctatgctgacgctatctggcgtcagggtgatgacattaatctctacggtcccggcacgccagtacagcaatggatgacttatcgggatgcagaaacctggcgctctatcgtacgaaaaggtccactatttccacttaactcactgatgtaccacggcatagttagcgctgaaaacgcctattacgggcttgagaaggtacaaacggatagcgactttgccgatcaagtatggagctatttcgctaccggcacccagctacaagagctttacatcacaccgtccatgctcaataaagcgaaatgggatgtcctggcgcaggcggcaaaatggtcccgcgctaacgccgatatattagtcgatacccactgggtgggcggcgatccgactgcgctggaagtgtatggttgggcatcctggagcaaagaaaaagctatcctggggatacgtaacccatcggataaaccgcagcaatactatctcgacctgacgaaagcgtttgagcttccgcatggggcaacctcaaacttcacgttaagaagcatctacgggagcaattcgacattccctgataaataccagtccccaattgtcgtcacgttgcagccattacagatgcttgtattcgaagcaacccccgctaaataa

SEQ ID NO: 180901 - DNA, 873 bp, Klebsiella oxytoca
atgagcattatttctaccaagtatctcctgcaggatgcccaggcaaaaggctacgcggtacccgcattcaacatccataacgccgaaacgatccaggcgattctggaagtgtgcagcgaaatgcaatcacccgtgatcctcgccggaaccccgggtacttttaagcatattgcgctggaggagatctacgcgctatgccgcgcctactccaccagtttcggcattccgctggctctgcatctcgatcaccatgaatcgctggaagatattcgccggaaagtggacgcaggcgtacgcagcgccatgatcgacggcagccacttcccgtttgaagagaatgtgaaactggtaaaatcggtggtggatttttgccatgcccgcgactgtagcgtagaagctgaactcggacgcctgggtggagtagaagacgacatgagtgtggatgcggaaagcgcgtttttgaccgatccgcaggaagccaaacgttttattgagctaacgggcgtagatagcctggccgtagcgattggtacggctcatggcctttacaccaaaaaacccaaaatcgacttccagcgtctggcggaaatccgtgaagtggtggatattccgctggtactccatggcgcaagcgatgtgcctgatgagtatgttcgccgcaccatcgaactgggtgtgtgcaaagtcaatgtcgctactgaactgaaaatcgcctttgctgctgcggtgaaaaaatggtttgccgaaaacccgcaaggtaacgatccgcgttattacatgcgcgttggcatgaacgcgatgaaagaggtggtacgcagtaagatcgccgtatgcgggtcagccaaccgccttttacaaatcgccgaagcctga

SEQ ID NO: 180902 - DNA, 1155 bp, Klebsiella oxytoca
atgtcagaaatttatacccctgctgccgcggcgaccggaacctggacagaagaagagattcgtcagcagcctgtctgttggatgcactcactgaaaaacatcgacaatattcgtccggcgatcgacaactttctcacgccactgctgcataaaaacgatctgcggatcatcctgaccggagctggcacttcggcatttatcggcgaaatcatcgctccatggcttgctaatcacagcgcaaaaaacattagcgcggtaccaactaccgatctagttaccaatccgatggattacctgaacccggcgcatccgctactgctggtctccttcgcccgttccggcaacagcccggagagcgtagccgccgttgagctggcaaaccagttcgtcccggagtgctatcacctttcaattacctgcaacgaagcgggtagcctttatcaaaacgctcttgagaatgggaacgcctttgcgctattgatgccagcagaaacgcacgatcgcggctttgcgatgaccagcagtattaccacaatgatggccagctgcctggcggcctttgcgccagaagttattaacagccagacattccgcgatgtggccgatcgctgccacgcaatactgacctcactcggcgatttcagccacggcgtatttggcagcgagccctggaagcggatcgtttatctcggcagcggtgggttacagggcgctgcgcgtgaatcggcgttaaaggtcctggagctaacggcgggtaagctggcagcgttctatgactcaccgaccggtttccgccatggaccaaaatcactggtcgataacgaaacgctagttgtggtgtatatatctagccacccctacacccgccaatacgatctcgacctgctggcagaactgcggcgcgatcggcaggccatgcgtgtggtggccatcgccgcggagagcgatgccgttattgaagctggcccacatatccttctgccgccagcgcgtcacttcgttgatgtagaactggccttctgcttcctgatgtacgcccaggtattcgcccttacgcagtcgatcgccgtaggaaatacgccggataccccctccgccagcggcacggttaaccgcgtagtgcagggcgtcgttattcatccatggctggcttaa

SEQ ID NO: 180903 - DNA, 1134 bp, Klebsiella oxytoca
atgacacaaattctgcgcgccagacgtctgctgacggaacaaggctggctggacgatcatcaactgcgtattgaagagggtgtcattacggcaatagagcctatctccatgggaaccatgctccgtgatgctgagctactcgctcccgcttacatcgatactcacgtccacggtggcgccggggtcgatgtgatggacgatgctccggatgtacttgataaactagccatgcacaaagcacgtgaaggggttgccggctggctccccaccaccgttacggctccgttagagacgatacaccgagtgctggcacgtatagcgcaacgctgctattccggaggtcccggagcgcaggtgctgggaagctatctggaaggtccttattttacgccgcagaacaaaggcgctcatcctgcggaatggttccgcgaactggatctcgcagaactggatgaaatgatagccatttctcgcgataccctgcgcgtggttgcgctggcaccggaaaaaaccggagcacttcaggcgattaaccatctgaagcatcgaggtctgcgggtaatgttggggcatagcgcggcgacctgcgagcaaacccggagcgcttttgatgccggtgcggacgggctagtgcattgctataacggtatgacgggattacaccatcgggaaccgggcatggttggcgcagggttaaccgacgcacgtgcatggctggaacttatcgccgacggacaccacgttcaccccactgccatgaagctatgctgctgctgcgcgcaagaccggatagtattaattaccgatgcgatgcaggccgcgggaatgcctgacgggagctataccttatgcggccaaaaggtagagatgcgtggtggtattgtgcggaccgcttccggtagtctggcgggcagtacgctttcggtagatgcggcggttcgtaatatggtcgaactcaccggtatctcccctgagaatgctatccatatggcttcactacatccagcccgtctgctgggaatcgaccatcagttaggttcgctaaaggccggtaaacgcgccagcgccatcgcccttaacggtggactgcatttacaacggatatggattcagggccaggttttccctctatag

SEQ ID NO: 180904 - DNA, 435 bp, Klebsiella oxytoca
atgttaggtatcattttgacggggcatggcggatttgccagcggcatggaaaaagcgatgaagcagatcctcggcgagcagtctcactttatcgctatcgattttcctgagacttccaccaccgcgctgcttacctcgcagcttgagcaggctgttggagaactggacggcgaagaaggcctcatattcctgaccgacctgctcggcgggacgccattccgcgttgcatcaacactggcgatgcaaaaaaccggccgtgaagtgattaccggcaccaacctgcagctactgctggaaatggtgctggatcgcgatgaactcagcggcgaggcgtttcgcatacaggccctggagtgcgggcaccgtggcttgaccagtctggtagacgagctaggacgctgtcgcgaagagagcaccgccgaggaagggatatga

SEQ ID NO: 180905 - DNA, 879 bp, Klebsiella oxytoca
atggcatctaaccaacataccttgtcgaatacgactgaaaatgaagaaacgctgctcaccggggtgaatgaaaacgtctatgaagatcagaatattggcgccgatctcactaaaaaagacattaaccgcgtggcctggcgttccatgctgctgcaggcttcttttaactatgagcgtatgcaggcatctggttggctatacggtctgctacccgcgttgaaaaagatccataccaacaaacgcgatttggcccgagccatgaaaggccatatgggattctttaatacccatcctttcctggtgacgtttgttattggcatcattctggcaatggaacgctccaagcaggatgtcaacagcatccaaagcaccaaaatcgccgttggcgcaccgctcggtggaattggcgatgccatgttctggctgacgctgttgccgatctgcggcgggataggagccagcctggcgctgcaaggctctatccttggcgcaatagtctttatcgtgttgtttaacgtcgtccatctcggtctacgctttggtctggcgcactatgcatatcgaatgggcgtcgcagcaattccgcttatcaaagcgaacacaaagaaagtgggtcatgcggcgtcaatcgttgggatgacggtcattggggcgctggtagcaacctatgttcgcctgaatacgacgctcgaaatcaaggccggcgatgcggtggttaaactgcaggccgacgttattgataaattgatgcccgcatttttgccgctggtctataccctgaccatgtactggctggtacgcagaggctggagtccgctgcgccttattggcatcaccgtggttctgggcgtcgtcggtaaattctgtcacttcctgtaa

SEQ ID NO: 180906 - DNA, 780 bp, Klebsiella oxytoca
atggaaattagtctgttgcaggcttttgcattaggtattctcgcctttattgccggcctcgatatgttcaacggtttaacacacatgcaccgtccagtggtacttgggccgctggttggtctgattctgggcgatctgcataccggtattttaaccggcggcacgctggaactggtgtggatgggtctggcgccgctggctggcgctcagccgcctaacgtcattattggcactatcgtgggaacaacttttgccataaccaccggcgtgaaacctgacgtggctgtaggggtcgccgtaccgtttgccgtcgcagtacaaatgggcattaccttcctgttctccgtcatgtccggcgtgatgtcccgctgcgatcgcatggccgcaaatgccgatacagcaggtattgaacgggttaactatctggcgctgctggcgctaggcattttctacttcctttgcgctttcctgccaatttacttcggagcggaacacgcgaaaaccgccattgatgtgctgcccgaacgtctgattgacggcctgggcattgcaggcggcatcatgcccgctatcggctttgccgtactgctaaaaatcatgctgaaaaacgtctatatcccttatttcatcataggtttcgttgccgcggcctggctcaagcttccagtcctggctatcgccgcggccgcgctggcaatggcgctgatcgatctgctgcgtaaatctcccgaaccgactaaaccagcggcacagaaagaggaattcgaagatggcatctaa

SEQ ID NO: 180907 - DNA, 474 bp, Klebsiella oxytoca
atgccaaatatcgtactgagtcgtattgacgaaagactcatccatggccaggtaggcgtacagtgggtcggatttgcgggggcaaatctggtactagtcgctaatgatgaagtcgctgaagacaccgtgcagcagaatctgatggaaatggttttggccgaagggattgccgtacgtttctggtcgctgcaaaaaacgatcgataacattcaccgcgccgccgaccggcagaaaattttactggtatgcagaacaccgactgattttctcaagctggtcgaaggcggtgtgcccgtcacacgcatcaatgtgggaaacatgcattacgccgaaggtaaaaaacaaattgccaaaacggtttctgtcgacgcgaacgatatcagcgcctttaacggtctgaaagcgtccggagtggaatgcttcgttcagggtgtcccgacagaacctgctttggatctctttaaactactttga

SEQ ID NO: 180908 - DNA, 1302 bp, Klebsiella oxytoca
gtgaaacatctgacgactatggtggaacagcataaacgggggaaagcaaacggtatatatgccgtttgttcggcgcatccactagttctggagtctgcaatacgctacgcacatgctaaccgaactcctctgctgatcgaggcaacctccaatcaggttgatcagtttggcggttatacgggaatgaccccagctgattttcgccactttgtctgccaactggccaactcgcttgatttccccgaagagcagttaattctgggcggcgaccatctcggcccaaatcgttggcagcatctgccagcagagcaggcgatggccaatgctgacggtttgatcaaaagctacgtggcttctggatttaaaaaaatccatcttgattgcagcatgtcctgtcagggcgatccggttccgctaaccgatgctatcgtcgctgaacgtgctgcacgtctggcaaagattgccgaggaaacctgcgtggagcagttcggcgaatcggatctcgtctacgtcattggcaccgaagtgcctgtaccaggcggtgcccacgaaacattagccgagctagaggtcactacacccgatgcggcacgcgccacgctgaaagcccatcgccatgcgtttgaaaaactgggtctggataccatctggtcccgcatcattgccctggttgtgcaacccggcgtcgagttcgatcatacgcacatcatagattaccaaccgcaaaaagccgtcgctctgagcaaaatggttgaagcttacgacacgttggtattcgaagcacactccacggattaccagacgccgcaatctttgcgccagctagtgaaagatcacttcgccattctgaaagttggtccggcgttgactttcgccctgcgcgaagcgctgttctcgctagcagccattgaggaggagctgttgccggccaaagcctgctctggcctgcgtcacgtacttgagagcgtaatgctagatcgcccggaatactggcaaagccactatcacggcgatggcaacgcacgtcgtctggcccgcggctacagctattccgatcgcgttcgttattactggccggacagccagattgatgacgcattcgaaagattggttcgcaatctggcgggtgagccaatcccgctaccgcttatcagccagtatttacctttgcagtacgtaaaagtacgcgagggagatctcagtgccacgccgcgggaactcatcatgagccacattcaggacatactgcagcagtaccatgccgcctgtcagggcgttacttccataacggataacaactaa

SEQ ID NO: 180909 - DNA, 810 bp, Klebsiella oxytoca
atgagcaacacagaccatgctgcagataagcgggtacccggtaccagcgaaagacgagagcagatcatccagcggttgcggcagcatggaagcgtgcaggtgaacgatctttctgaattgttcggcgtttctacggtgacgatccgtaacgatcttgcgtttctagaaaagcaggggatcgccgttcgggcttatggtggtgcactgatttgcgacagtaatatccccggcggagagccttctgttgaggataaaagctcgctgaatacggcgataaaacggcgtatcgccggagctgctgttgcgctgatcgggccggggcatcgcgttattctcgattccggtaccacgacatatgagatcgcccgtctgctgcgcgagcatactgatgttattgctatgaccaacggtatgaatgttgctaatgcattacttgaagcggatggtgttgagctgttgatgaccggtgggcacttgcgtcgtcaatcgctttcgttctatggcgaccaggcagaacagtcgttgcaaaattaccactttgatatgctgtttcttggtgttgatgcgatcgatctggagcggggcgtcagcacccataatgaagacgaggccagactaaatcgtcggatgtgtgaggttgcggagcgcattatcgtggtcaccgactcgacaaaattcaaccgttccagcttgcataagatcgtcgacactcagcggatcgataccatcatcgttgatgatggtatcccgccagaaagcctggaggggctgcgtaagagcggcgttgaagtcattctggtgaatgcgtaa

SEQ ID NO: 180910 - DNA, 1335 bp, Klebsiella oxytoca
atgagtctggatgcaacgatagaacagaaaaaggaagtgccaactcgatatttaattttgttgatcattttcattgttaccgccgttaactatgccgaccgggcgacgctctcgatcgccggtacagaggtggcgaaagagctgcagctgagcgcagtctcgatgggctatattttctctgctttcggctgggcctacctgctgatgcagatccccggcggctggctgctcgataaatttggctcgaagaaagtctactcttacagcctgttcttctggtcgctgtttaccttcctgcaaggctttgtggatatgtttccactggcgtgggcgggtatctcaatgttttttatgcgctttatgctgggtttctctgaagcgccatctttcccggcaaacgcccgtatcgtcgcggcgtggtttccgacgaaagagcgcgggaccgcatcggcgatctttaactccgcgcagtatttctccctggcgctgttctcgccgctgctgggctggctgaccttcgcctggggttgggagcacgtcttcaccgtcatgggcgtgattggctttgtgctgaccggtctgtggataaaactgatccacaaccctaccgaccacccgcgcatgacgcaggaggagctgaagtttatctccgagaacggcgccgtcgttgatatggaccataaaaagcccggcagcacggcggccagcggacctaaactgcactatatcaagcagctgttgaccaaccgcatgatgctgggcgtattcttcggccaatattttatcaataccatcacctggttcttcctcacctggttcccgatttatctggtgcaggaaaagggcatgtcgattctgaaagtgggtctggtcgcatcgattccggcgctgtgcggttttgccggcggcgtgctgggcggggtgttctccgactatctgattaaacgcggtttttccatcaccgtggcgcgtaagctgccgatcgtcctcggaatgctgctggcttccaccatcattctgtgtaactacaccgataacaccgcgctggtggtgaccctgatggcgctggctttcttcggtaaagggttcggcgcgctgggctggccggtgatttccgataccgcgccgaaagagattgtcggcctgtgcggcggcgtctttaacgtatttggtaacgtcgcttccatcgtaaccccgctggttatcggttacctggtgagcgagctgcactcattcaacgcagcgctggtcttcgtcggatgctcagccctgatggcgatggtttgctatctgtttgtggttggcgacatcaaacgcatggaactgcagaaataa

SEQ ID NO: 180911 - DNA, 759 bp, Klebsiella oxytoca
atgaaaattcgctcagctcttcttgcccttgggatcgcagccacgcttaccggatgccagaacatggattccaacggcctgcttagctccggcgcggaggctttccaggcttattcgctcagcgacgagcaggtgaaagccttaagcgacaaagcctgtcaggagatggatgcgaaagcgactatcgcgcctgccagcagtgaatacagcaaacgcctgagtaaaatcgccgcagcgctgggggacaacatcaacggtcagccggtgaactacaaggtgtatcaaactaaagacgttaacgccttcgccatggctaacggctgcatccgcgtttacagcgggctgatggatttgatgaatgataatgaagtcgaagcggttatcggccacgaaatgggtcacgtcgcgctgggccacgtgaagaaagggatgcaggtagcgctgggcaccaacgcggtacgcgcggcggcggcctccgcgggcggcatcgtcggcagcctgtcgcagtcgcagctgggcgatctgggcgagaagctggtgaactcgcagttctcccagcgtcaggaatcggaagcggacgactactcgtacgatctgctgcgcaagcgcggcattaatccggcaggacttgccaccagcttcgagaaactggcgaagctggaagccggacgccaaagctccatgtttgatgaccacccggcatcggaagcccgcgctcagcatatccgcgatcgcatgaaggccgacgggattaagtaa

SEQ ID NO: 180912 - DNA, 516 bp, Klebsiella oxytoca
atgttcgacttgccggagtgggcaaaaataatctacaaccgcccttttccgctggtcgatatcacggtgatacctgataacgcgattatgcagcatcggcgtattgcgctcctggagctcctgcaaaagcatattcgccagcgggatctcatgttgctgctcgagcaattggggattctgcttaacgcgggatacactaccgccgagcagctaaaagtgttatttagctatatggggcagcgcggtcacaccgaaaaccctaaggcttttttcaatggactggtaagtcatataccgcaggaggagtcgatggaaacgctggacgaatggctggaaaaaaacggcaaagagctttttattgaatggggccaggaaaagggtgaggcaaaggcccgactaaaaattgccaaccggatgctggaaaacggcatggagcgatcgctggttatccagctcacggaagtgacggaaaacgaattagagcagttgcagaattccgcagttagtcccaactga

SEQ ID NO: 180913 - DNA, 558 bp, Klebsiella oxytoca
atgaatgggcgtaaaactattgcatttttatgcatcatctgtacctcgggttgttattacactacatcgccagtacctaagataaacaaagagttcttaaacaactacccttctttaatagatgctcatggtacagttgaggataaagagttcactgcagcgtggaaggacttcctcgaagccagtgccagatgtagggtgattcacaataattatgaaataaaagctaataacgcagagcaaaccaagttattacttggaacgactggcggtgttgctggtataactggttcgacactcatggctgctggctcaagtactgttgtcggagggattgctgcaggcatggcgggtgttattagtatgatattgggtaactctgagaaaggtcccctaagtacaaattattttgttaagcaaaaggaaagtatagctcatcaaattcaacaggctgcagatgctgctaaaattgcaaaagaaccgaaagatgtttatatgattgcttctaatttatctgcatcttgtttggctgcagagagtttagatggcgaaaagtga

SEQ ID NO: 180914 - DNA, 183 bp, Klebsiella oxytoca
atgatggtaatgcagtgtcgttttacctggcccggcgattaccctgcggctctctttgaccgagacgttgagcaaaacggagccagacttatcattcagaccacctgcatagcagatggcattgataaagcccataggggcgtactaagtccagactctgaattcggattttcccatgagtag

SEQ ID NO: 180915 - DNA, 390 bp, Klebsiella oxytoca
atgccctttacccgtattaccctccatcagagttataacgatacgcaaatcatgcagatttccgacattttgcaacagagccttgaaacagaatttgccgtcccgccccacgatcgctttcaggttttcgaaaggctgccggcgaaccagcatgtgttcgaccgtcgctataaaagtgctggccgcagcgacagttttattcaattccatcttctggctggtaagcctcgttcattggcgcagaagaggaacttctgccgtaccctgtgtcgggagctacagacgaaactgcatattagtccggatgatgtgatggtgatgatgcagttcaataccgccgatgagtggagcttcagccatgggcttctgctctctgaggaggagttatga

SEQ ID NO: 180916 - DNA, 303 bp, Klebsiella oxytoca
atggccaaacccctcgatcgtgaaaccctggctcgcattgcgccgaagttagccgagctgagtcagaatgtactttttaatgatatctggacgcgtgaaccgctttccccccgcgagcgcagtctggtgacgctcggcgctctgacggcgctgggccgcgttcagcagctcccctggcatatccgcttcgcccaacaaaatggcctgacccgtgatgagataattgaagtcttcactcatctggcattttatgccggctggcccgcggcggtttccgccatcgaatgcctggaagaggagtaa

SEQ ID NO: 180917 - DNA, 885 bp, Klebsiella oxytoca
atgaataagctcccccctacgttcgatctcgacgcgctgcgcagttttgttaccggcattgaatgcggcagctttgcgcaggcggcaagtcgcctctgccgctctacctcggcggtgagcgcacagctgaaaaagctggaacagcagtgcggcgccgatttggtggtgaagagaggccgccacctggcgctgactcagaatggtgagataattatggggtatgcccggcgtctattggcactgaatgatgaagcacagcgagctcttcagggcgaacgcttgcagggagaaatacgcattggcatgcaggaggattttggcgagtcgcttatgcccggtatccttggcgagtttaaacgccaccatccaggaatgcgaattattgcccgagtcgatcgcaaccgggcgctgctcaacgcgcttaatgacaatatgcttgatatggcgctgctgtggcaggcggagagcgtacagcgtgaaggcaagacgatcggccagtgccggctggagtggataacccatccgcagctgaatattgccacgctgctggcggagggcaaaccgttaccgttggtgatgctggaaagcccgtgcttgatgcgttcccgcgccatcgactgtctggaccgggccaacatcgcctggcaggtggtgtttatcagccatagcctgagcggcatctgggctgcggtgcaggccggactgggcataaccgtacgtacacgcatcggcatgcccggcaacctgcgcgtggcgggaagcctgctgccatcgccggggagtcttggtatttcgctgacgctggggcaggggaacgacggggttcacggcgcgcaggcgctgttgggacaactgatggaagacgcgctattaagcgcgatgtga

SEQ ID NO: 180918 - DNA, 624 bp, Klebsiella oxytoca
atgataaccattttaatcaataccaaaaacatctacacccgatatgccatcaagcagctgatgcaggaaagcgtagcccatgaggaaaacctcatttttgtagatagctacacccccggtaacatcgcagaggctcagatcatattcaccgaaatggcacccggagaaatatttttatgccatgatgaattgaaatataaaaccacgaaaagcttactatttattcttcaggaaagggaaaatcaatgttcggaaaatgaactccccaactgtactaaagattgtttgtttttatataaaggtgattcgcttccggcgataagaaataaaataaaagttcatatttatgcattcacctggacggacaatgaaacaggatatcgcccgcagactagccgctgcattaactgtccctgtaaatcgctgacccaggcgcagtcaaaggtcgttcatgccctgagtcttgggcttaaccagctggaaatcgcgaataaattgaacattaactataaaacagtgtattctcacaagaaaaatgtcatgcatgactttaagattgaaagcaataccgatcttaataagtttctaaacgtgctagagaaaagaaaacagtttatgacctag

SEQ ID NO: 180919 - DNA, 681 bp, Klebsiella oxytoca
atgaaacgggcaatttttaatgaggtggtggagtggattgaatcccgcctgacaatcaatccggccgttgatgatatcgcctgtggggttgggtattcccggcgttttgtttataacctgttccatgagcatgccggccttcccgtcgggaaatatattcgcatgcgcagaatgacgcttgccgccggtaagctaaagctgactcagcaatcaatttcatcgattgcctgtttactgcactttgattctcatcaaaccttttcccgtgagtttaaaaaaacctttggccttagtcccggagcgtatcgggattcgacctgttgggatatgtcgttactttatcagaaggtggcaccgcagggcggcggcgtaccggcaccttacctttgttttcttgaagaacagtcgtttgctggatatggattcaactatacgctatctctgactgatgatatcgctacgcgaaaagaggtcactcggagaaaaattgccggcggcgcgacaggcgcagaccgcgatatctacattctctctgcatgttcccccgctgcgcacaatatatataaaacagcgatcaatgcattcatcggcacaccgtttaattcgcgggcggcttcttttcgtgaggtacgggtcgctaaacgtgggctataccttggtcttgaatttagtggctcatag

SEQ ID NO: 180920 - DNA, 558 bp, Klebsiella oxytoca
atgaatttggaaaaaggcggtcgtggggctatagagcgcatggttgaagcctatggtttcaagacaagacaggctttatgtgatcatttaggtatatcaaaaagtactttagcaactagatacatgcgtgactcttttcctgcagagtgggtaatacaatgtgcattagaaactgaatctgacttagcgtggcttgttactggaactggtaggccgacaagttcacaaaaagagaacaccactattctacctagatttgacctagttgagggagtgctatctgaaaacggtgctgtaacattcgataactctcttttgcctacaaaagttagtcggttgttttatgttcgtcacgggcatgataattacgtttgcagtaaggattttactaacgttcgtgatggtatatggctagttaacattgacaatgaagtctccattcgagaaataacacgcctgcctaaaaataaaattctcgtttctgggggcagcaaagaatttgactgtatgctggacgatatagaagtaacggcaagtgttgttttgaaaataaaatga

SEQ ID NO: 180921 - DNA, 1770 bp, Klebsiella oxytoca
atgagtcatagactttcaaatatatcaattaaaaactttagatcttgtaaagaaattaacttaaatttttccttgttcacacctttaattggatacaataatgcggggaaatccactattctgaacgctattgagtggttatttaagaaaaaggtattgtcaccaagcgattactttaataatgataacgagatagaagttgagggtaaagttgaaggtattaccgacgagatactgtcagctttaacagaagaaaacagaaatcgtattaatccatttattacagcaggcacattaacattcaaacgcacccagtctgttggtgcattagcagcaaaagatgtgaagctactaataaagaatccagataatggcctattccgaccatcaccatcagggatcgataatgcgataaaggccttatttccagatcctatacgcatcggagcgatggaaaacgcagcagaggattcgtctaaatcaaaagcaggaacaacaataggtaaattattatcagagttgagcgctaaaattcaggagcaacactcaaatagaatattgaagcacatagaagcagtaaacaggagaatgacggcctcaggaaataaaagactatcagaccttgttgatatcgataactcaattagtgataaagttgcagattttttccctggcatcaatcttaaactacattttgaacttccgaattttgaagatatttttaaagctggaacagtaaaagtttacgaagactctctgccagatatagcaagagactgctcatgttacggtcatggaactcagcgctctatccagatggcgcttattcgccatttagctgacattactacaaatgagaacatcggaacaacaaccttactattaattgatgagccagaattatatctccatccttttgcaatagaacaaataagagaatcattaaataccttatcccaacatggctatcaaatcattttttcaactcactcctcacaaatgattacttctgatttggctaaggatactattttaatacgaaaaaacaaccaacaaggaacacattgtaggttgacaatatctgaagcagtaaatcaagtaatagtacaacgtcctgcgcaagctacacatttattttcactaacacaatcttcaaaaatattatttgctaataacgttgttctaacagaaggaaaaactgaaacaaccctattgccatttatattcaaaaaaataaataataaaacaacaggtcaaatgcaagtggccctaatagaaactggttcagttgatagcatttcgaaaaccatgcaaatacttgccagtatggacataccgacaaaggcaatcgttgatcttgattttgcactcaggggtgcaataagaaataatttcctacaaggtaacgaccccgatattatcgggcttaaggctattttagttgatatgcagaatgatgggcaatgtgcattagatgcttctggattaccaacaaagaatggtgtagttactgcagcgcaagcctatgaacttatgtcacaaaaagctaatgcggcaccactaatattatctttggctaataaattactagaatcaaatatatggatttggcaaaaaggagcaattgaaaatcatctgggcctgacagaaaaaagtgaatcggcttgggccgaattcaaatctaacgctgaggcacaacctctgtcagacatctgcactgattatgatagtgttgaggacttggtggcgtggataacaccagttgtttga

SEQ ID NO: 180922 - DNA, 249 bp, Klebsiella oxytoca
atgcagtttgaatcagagttcaattacgtctttcagagttcgacggtctaccgattcacccagccagggcttagcctctgcctcgtccatagtatggcgttcaaaagccagtgcctctcctttggtggcaaactgcttacgcacacgacgcccactgcgtccggcggggtagcattagcaaatccattttccggagtcgagttttcgtactgccataaaaaagccctcatgtctgagggcttaatttaa

SEQ ID NO: 180923 - DNA, 777 bp, Klebsiella oxytoca
atggtcaatgcactcggaaacccaattgctactgatctcagctcgaaattgttcgcgcattaccgggacaaacgccttacgggtgaaatctatttcagtgagaagtggaggaaaggtgccagcccggtaacaatcaacctcgaacaaagctatctgagtggcgtttttagcgagctggcacggctcggagaatgggcggcaccgaacccgctggagaacatgcgtaagttcacgattgccgaaaaagaaatggcctggctaacgcatgagcagatcgctgagctgctttacgactgccaacgccaaagcaccctgctcgctttagtcgtcaagatctgtttgagtaccggagcacgctggcgcgaagcggtgaacctcactcgctcccaggtcacaaagtaccgaatcacgttcgtcaggaccaaaggcaaaaagaaccgaagcattccgattagcaaagagctttacgaggaaatcattgccctagacggcttcaagttctttacggattgctacttccagttcttgtccgtgatggaaaaaacctccatcgtgcttccgcgcggccagcttacccacgttctgcgccacacgtttgcagagcactttatgatgccgggaggaaacatacttgccctacaaaagatcctcggtcaccacgacataaaaatgaccatgcgttacgcccacctggcccctgatcatcttgaaacagcgcttcgctttaatcctttagctacattaccggacaacattccatcgatgatttgccaatga

SEQ ID NO: 180924 - DNA, 582 bp, Klebsiella oxytoca
atgtctcagatcgttctttttctactcgctattgtgttaattattgttatttggcgtcttatcggacaacacaagaaaaccttgtttcgtatttccttaattttactttctgtagctgttctgctcataggctcagttgcgggctggctccaatacagtgcatggaaagataaccagcagtatcagaaagatgtcgtgagctattttacttcttatgacaaatgggccgaagaatccagaaaggagcatgacaacaactattacacgatggatgtaatggaaagatatgctgaagacctagcgaatgctcgcgggcactcatactggtattcacaaaggccacttactttaggtactgatggctttcctgtgtttgacgatacactgacaatgaccttagctgaacctctggatggcataactgaaatcaaggtcagctataatcgtggcttgagcggtggtgtcgttagagactcaatagagggaggttatcgcggaggttttctggtaaccctactcactttggatatgaccaagcgatggaaccctaataaaagtgcttggataccaaccaaaggctaa

SEQ ID NO: 180925 - DNA, 156 bp, Klebsiella oxytoca
atggggcagattttggggcaaaatggcgtttggggcacggtttggggcaatcaaatgtccgcatttgtccgcatttgtcccgaagtcaaccgcgctatatcattgaaaatatggcagatcattgaatttgctaaactatttttttgcatgccataa

SEQ ID NO: 180926 - DNA, 318 bp, Klebsiella oxytoca
atgggattcccgtcaccggctacggattacattgaaacaacgttaacagtgaactctctgtgcaacatcacagcaaactcgcgagttatctcaaccgaccgtgggtatgttgttctggacttgtctctaaaggttaagcagggaagtattctgcttatacgttcgggtggagaacttcagtttgcaaagctaattggtagatcgttcattacggtagaaggagaatcgattgaaggagatgccatggatgaggttgaagtgctcggagttgcaacgcacgtgatcaacgatatgaggcaggatgatagccctgtttga

SEQ ID NO: 180927 - DNA, 1254 bp, Klebsiella oxytoca
atgaaagggtacagcaggcgtgatgccatagacatggcggttaaattcggaataggcgccgctttaatggccgtaatcccaaggatggcggtcgcttcaggttcattgaggctaagtgtcgttgattttggtgcgaagggtgacggggtaaatgatgattcctttgcttttcagaaagcctttctaaaggcaaatgaggccggtggcggcactgtttacttcccaccccctcaaaaggaatacctgcttaagtttcccgtcttcatctttaacaatactgaagcttacggcgatggaaaggatacgcgcattgttttcgagaatcctgttttcagtaagggacgcggaggtttcgttataggttcaagcctggaggcaaacagagatttggcgctaacccggttcagtaaccgttcattgtccacgacgatcaaccaaaacttcaagaatcccgtccaacggcactacatacgtgatacgccggagctggcccaggcgaaagggagtagcttgcatgatatctatctggaagcgagattcaccgcaggatcagaaagcaactggggagggtacgggattaatttcgtaaacgccattgattgccatgctagtaacatctggggtaaaggctggacacaacttatcggtatgggatctgataccccaccagaaacaccatcaaatcataattgcagcgccaaaaatttgtatgttcttgagcctgatatggtcaggacatattactctatagggttcatggcaaactcaagtaattgcactattcagaacgctaaacaacttaagcccatggctgagggaagtaagaacggtagtgccgtggctctgaatttctgcgaagactgcattgtatcagatattgatatcccagacttgggtagaactcaaacgtctgagggggtccttataaacaactcttccggatgtttaatccaaaacataaatatcggaaatgctaaaaaagcggtctcaaccttttttaagttcaaggatacgcaaaaagaattcaagccaaacctcatcaagaatgtcaaaggtacaaattgcgacattgtattatccatttactcaagatttaacgttataaaaaacatacaaggggtaaactcaggaagaataatcgcattgatgaattctaatgcagcacgtaatgtgataagtgctcctgaggcggatatttccaccccaggaaagtcaccaatcaatacattgatgaaactcaataaaattgaataa

SEQ ID NO: 180928 - DNA, 1206 bp, Klebsiella oxytoca
gtgagacttaaatttacagtagacgacatagcaattagattatatcttttcgctcttttaataattacacttgtgccatttgggaggggcagtttttctggtttagaaccagcggttccatttattatcttatcctttattatattctcacttaaaaagaagcatattgacaagaaaaaatggcttgttatttttatgtttttcctttgggctgtgtggataatatccggaatagcatttagctacatcacttatgataaattagcagatcatgagtcatcctttctgagatatgtacgactcctggaaatgtattttcctgcacttcttgtttttgtcttcatcaatgaactaagccctgagcaaaagaaaaccgtttacagattctttatattcctttttttcgcggttaccattcaggccgcatggggctggtttatgcaggttgaaaacctggtggcaacgcagagatttagctaccctggcatgggctatatttacagggccggtggtgtagcgaacgactcaagtgcatatggcagccttgcgatgattcttggagtggcatccctgatagggctgagacatacaagtcgaagcaaattcctttatttgctgatcatcattgctctggcgttaaacgtatacatatctttgaccaggacagtagtctttgctctagcagtttatgtattccttgatcttataaggaccagaagcctgagtgttttcaaaatgttgttcttcgctgctgtgatatcaggcgttgttttctatggcatcagcaacgagtatgttgtggcgttgttggacaggattactgggtcagggcagatagacattacttcagggcgcctcgccacatgggctgcagtacctgatatactaggtgaaagccctatctttggcgtaggttatcgcatggcaacagataaatatggaatacttcctgacaacgttttcatatcatcattgcttgagacaggcgtaataggattagcgctttacctcggtatgcttttttctatgtgttattgcgtttataagaacaatgctgaaagcttgccattgctcatagcatatatagcgtccggaatgtttgtcgacatatcaacattctggattagcattccggctttaatattctttgtagcggttaacagccagcgcgatgacaatgactctcgccaccgcgccatagagtag

SEQ ID NO: 180929 - DNA, 1434 bp, Klebsiella oxytoca
atggcgactatcgtacaaagtaatatgaagtttaaaggtgatgtgaaattaccttccgttaatgcccctcttccggatggcgctaatttattcgctgatttctccaccagtcgctacgtcataaagcatgccagcggtaacgtcatccgttctgcagccctgacagatattctgtcattcacatgtgccagtgtaagaagctacgttggctcgtccggccttatcgaatacctccaggcaaatgaacctgccatagaatatcatccgttatctctggagtgtcttggattaagaactgaatattcgagcacaaaccgcctggcgtggtcacaggatttttcacagtctgccacctggtcatccggagggctgacggtaacaccgggtgacagtacggcgcctgacgggaataccacggcaacccgacttgccgagaccgcaaacgggacatcgacagtaagaacgttactggctacgacgaccagcgatgcggtggtaggatcgccttatactttcagtattttcgcgaaggcaaatacggcgggggttattcagcttgcggcacagggggccctggcagcaaccgcattcgctaactttgaccttaaaaacggcaagattggcaaagtttctccgggttccgcaacagtcggcatgctccaggtcacaatggagccttatcgtaatggctggtaccgcctgtcaataaccattacaccggcttcggcggcatcgcctttattcactgtcgccctggtaaatgatgattccagcgcgacagcggtaccgtcataccttccttccacacctaaatcactctgggtgtggggggcgcaggctgagcgccgggatggttattcatcttatattccgactgcaggaacagaagtgatgcgcgcgagtgaggtgtgcacaacgccgtcaaccacagcctttatcacgtctgccgctgctacggtgctggtttcagtggttcatccccatagcctgcagtcgttaagcgggaaatataactctctggcctgtgcggtcgttctggacaacagcgcctcaggtgcacatatccgtttcgcctaccggccgcccgcgtcgggaaccgccgtggggacgcctcagggggctgcagtgggggtaattccagattcctcaggcacagcgcaaaaccttgagattccgggtatggcggcggttcgcgatagtgagcagtcctgcatctttaattttgatggcgcagccttaacgacacgactttttgatggctataactggtattcccgttcggtgactgctttcccgccggcgctttcacgtctgtgcattggtcgctcaaacatggatgcgaacaactatttcaacgggcatatcaggaaaatcatctactggcctgctgcgttaggcgatatcgaaatggagcaaattctttcttatcagtaa

SEQ ID NO: 180930 - DNA, 387 bp, Klebsiella oxytoca
atgctgaatattgataaatatctggctgtccgctggcagatgggcgggcgggttttccctgttctcgactgctacggcattgtgcatgaggtccgccgggacctcgggctgcctgaatggcccgcgtttgaggctgtgattaaagagcgtggcagctctgaaatggggaatgtctgcgagagtttttcgcatgacctgactccatgcgggccctgcaacggagcggtagccgcctgctatatgggaggagtaatcggtcatctcggcgtcgtggtggagctgggcggccttctgtatgtgatggagtgcaatccccgccgtaacgtgacgatcctgccgttgacgcgctttgagaagcagtatctgaaagtggagtattaccagtga

SEQ ID NO: 180931 - DNA, 396 bp, Klebsiella oxytoca
atgaattacctcaagagagacactttaaatccagaaggcgaaaatattcgtcttttcgaattatcagcttacagccgtatgaaatatattgagttcatggttgaagaaaggaaatcgttgcctgaggatggattatcgccggatgagaattttaaaatggcgactttgctggctacgcgagaccaggccatgattgtcgctttatctttaagtgaagcggatggcgaggaacgcgacggtaaagatattttcccggagataatgcggaattatccacctgggttattgggcagcgctgcattacttgtgcgtatgctttcagggatgatccccccggttagcaatactccggagcaacctgaagaagaggaagaactggacctggaaaagtcctga

SEQ ID NO: 180932 - DNA, 174 bp, Klebsiella oxytoca
atgaaaaatgaagaatttgaacgtaaagtcgaagatgagatttctgcgctcattaagaaaaagatcgctgaaatcaggaaaaaaactggtaaagaggtttctgaaatcgagtttattccagttgagacaatgaatgggcttgatggatacgaagtaaaaatcaagctgatataa

SEQ ID NO: 180933 - DNA, 162 bp, Klebsiella oxytoca
atgactatctttgatgatcttaagatgtacatggataaacaggtgaaggtgacttgcccccactgctctcacatcatggagcaaagttccagcaaaatacgtaaaaacatcacgtgtatttgccctaaatgtggatactttttccttccggaggaagggtga

SEQ ID NO: 180934 - DNA, 240 bp, Klebsiella oxytoca
gtgaaagacattaaaaaatttccttctttgctttttaagccatatcgcttaggactttcagctgcaaatgaagaatcctatcaaatgacagatatcgagcttaaggactatctgttcacacttacatgcatcattatttcaggaatggtgctcagcagtaattatcttcctgtaagtcaaacgaaccagttcagattgctctatcagctcctggacgaagaatatagaaaaaagatataa

SEQ ID NO: 180935 - DNA, 246 bp, Klebsiella oxytoca
atggtagagatcaccgacgctcagcagattcgcctcaacctgctttcaaccctgaactacgacacagcagcagcaaaagtcgccgtagaatttgttcaggatgatccgcttaagtatcagcttttcatccagcaatacagccgcgtcacgacagaaaccgaagtggtagcaaagacgatgaaagcagtacaggaagcaactgaagcgctgccgctcttcgataccagcgctgaagcaaacagctaa

SEQ ID NO: 180936 - DNA, 198 bp, Klebsiella oxytoca
atgacgatgttgatcacgagctgcgcgagcacttcacccgccccggtagtcgttgatacctcctgctactgggttcgcattatctacctgaccgaccacgatatcgacgcgctggacatgcagacgaagcgagatattctggcgcataacaaatccgtgctggccaactgcccgaagcttaatcctaaaaagggataa

SEQ ID NO: 180937 - DNA, 276 bp, Klebsiella oxytoca
atgagccttgaatttatcagcgggctggtagtcgttctgcttggcttaatcgctggcgcgtttgggttaggccatgcgcgcgggaccagcaaggcggaagccaaagccgagcagcagcgcactgaagaaaacgccgctgctaccgtcgccgcggcagaacgccgggctgatgcaacgaaaggagccagcgatgtacaggaagacgttaagcgtatgggcgatgacgatgttgatcacgagctgcgcgagcacttcacccgccccggtagtcgttga

SEQ ID NO: 180938 - DNA, 312 bp, Klebsiella oxytoca
atggctaaacgtatgcaagacaaagagagcattgccgggatgtcctggctggttctgctgatcattgcttgctggggtggacttgtccgctacctgatagatgtgaagcagagcaaggcaacatggagcttgatcaatgctcttgcccaaatggtggtttcagggtttaccggcgttattgctggtctggtgagcattgaaagcggattgagcatttacatgatactggccacttccggaattagcggggcaatgggttctgttgctttgacctatttctgggagcgcattaccggagttaaggcgccatga

SEQ ID NO: 180939 - DNA, 282 bp, Klebsiella oxytoca
atgtcaggcatctgtattattgaaggttgtggcaagccagcaaacaaaatcatcggggttcgccttcgtcgtgagttggatgatctttctgctatatgggctcagaatacaaacgcgtatttgtgtgatgaacatgcggcgatgggttatgaagtggatgtcaagttcactccaagagacgatcacacgatcaaaactacagtgagcaatggtgattctgaaccggttgtacgcttatttgaaatcaccaacccagtgaatcggactgaagacgataagtaa

SEQ ID NO: 180940 - DNA, 882 bp, Klebsiella oxytoca
atgttaaaaaaggccaccgtaacaatccagacagaaggaacgcacctttatcatggcgactgccttgaattgctgtcgctaatggagggatcctccgtagatttagtggtgacatcccctccttatgctgatcagcgaaaaggcacttacggtggggtatcccctgacaaatatgttgactggttcgcacccatcgcggagcagctgctaagggttctgaagccgtcagggtcttttattcttaatatcaaagaaaaagccgtagatggcgagagacatacctatgttcttgagttgattcttcgcatgcgtcagatggggtggtactggacggaagagtatatctggcataaaaaaaattccttccctggtaaatggcctaatcgtttcagagactcatgggaacggtgccttcatttcactaaatccagaaaattcgccatgtatcaggaagctgtaatggtcccgatgggagactggagaaaggaacgactcaagaagctcagcgccaaggataccgtgcgagatgagtccagcgtaggaagcggatttgggaaaaatatctctaactggcaaggtagagatatggcctatccgtctaatgttctacacatggccacggaatgcggtaataaaaaccatagtgctgcatttcctgaagctttgccggagtggttcattaagcttttcaccaaagaaggtgatgttgtattggatccattcgctggttccggcacttctttgttggtagcagacaggctatcgagaaatgcagtgggctttgaattgcttggcgagcattgctctgttgcaaaagacagaattggcttgcagggtaacattgagcaggggattgttacattcagcaaaaaagctgaataa

SEQ ID NO: 180941 - DNA, 645 bp, Klebsiella oxytoca
atgactaatccttactgcgaatctatcacagccctacgcaacgcgccctcccattacttaaaagaggttggcgaccagtggcgaacgccggatccgcttttctggggtatcaatgcgatgtttggtccgttgatgctggacctgttcgccgatgacagcaacgcaaaatgccctgtctggtacaccgcagaagataacgcgctgaaacaggattggtcggaaatgctgggctcaatcggtggtgctgcatttggcaacccgccatacagccgctctcagtaccacgaaaagcaagccaccaccggcatgactcacatcatgaactatgcagcagcgcaacgagagaagggcggccgctatgtgttcctggtcaaatccgcaacgagcgaaacatggtggccggaagatgcggatcatgtctgctttattcgtggacgaattggttttgatctgcctgtctggtttaaacccgccaacgacaaacaaaggccgaccagcgcgttttttgctggtgccatagctgtatttgataaggtctggcgaggagagaaattcagttatatcaaccgtaccgaattggaagcgaaaggccaggcatttatggcgctggcgcagtttgccattgataagaaggtgaccgcatga

SEQ ID NO: 180942 - DNA, 168 bp, Klebsiella oxytoca
atgaatacagacgagttaatagaggctattcgcattccgggtagttatgtgcttgatagccttcctgacggtaaatatatactcacccctatagagccgggtgagataaaaaatactgaatcctctcacgaggaatgtaaaagcttcttccagcaggacagaagctga

SEQ ID NO: 180943 - DNA, 234 bp, Klebsiella oxytoca
atgaaaatcgaagtaaccatcgacaaaactaaaaaactgccagaaggggccattccggctcttgaagttgagcttttgcgtcgcctgaatcagaactatgaagattgcaagctaaccattcgtcgcgccgggtcagatggcctaagtgtttacgggggtatcgacgacgataaggaaatcattgaggaaatactccgcgagacctgggaaagtgccgacgactggttcttctga

SEQ ID NO: 180944 - DNA, 267 bp, Klebsiella oxytoca
atgtcaaacgctttcaaattttcaatgacaaagcagcaacttaaggaaattactgaaactgaccatgtgcaatgcggggaggctgcggcaatggctggcgctttattgcgcatccttgagctgaaaccagtagcctggcgctatcgaaccactatgaaaaacgtcactgacaactggatgtttacagatgaaaagtggcgaacgaaagagagtattacgtttgagtctgagccgctgtataccttatccctgacagtttctgattga

SEQ ID NO: 180945 - DNA, 270 bp, Klebsiella oxytoca
atgcaaatgataaccagaaaaaagccagcctttaccgagctgtatcagactggagttctgactcgcattgttgcagtcagaaacgcagatagcggaggctggcgactgtttggcctgtggagagataagcaaatcggggtatacgtagaggctgctcgtggcggtgtccgggaatggtcaggcctggattacctggctaacttctgcggcagctgcggaatcagtctgtgggaagttcacagcaaggtcgaaccaaagttccccctgtga

SEQ ID NO: 180946 - DNA, 396 bp, Klebsiella oxytoca
atggaaaatgacagcgacaacgtcatcactctgatgcagccaaagcgcgacgaagaaaagctgttgaacatcaccgtaattgacaagaagggctacagggagcagcactgcaagcataaagccgtcgaggtcgatgagaaggggaggatcattctgtgcctgcaatgtggctgcgctgtagaccctttccagtacgttcttcagtgtgcgactgatggtgaggctgtggtgagggagattcagcagctccataaccgccgtgatgagctgcgcgaatctgtcgccaacctcgagcgagaagagaaaaatgcaaaggcacggctacgcgctgccagaacgtcgatcctattcgcggaaaacgacctgaaaaatactgagcaggggataaagcaataa

SEQ ID NO: 180947 - DNA, 654 bp, Klebsiella oxytoca
ttgagcagtaaattaaccagcgaaattctggacgatgagactcttgcagagctgatcgcttttcgccgtagccgcgtagagtattgcccgaaggaaggtcttccatatcagaaggcgctgcatgattcgatgatgctggcacttgaagagctacaggaatgccgcaaggccgacagcgagccggtggctacactggacgtgcaaagcgggaggccggacggtcataagttctcactggcttattcatctgtggcacataagttgccggatgacgtctatttcctctatcgccacgcgcagcagccggtagtgccggatgcatacgtgcgcgatgagcgcgggagaatgatgcttaatggcgtctgcgaaccgaaaattggctttagtgcaggatggaacgcctgccgcgccgccatgctccagtcgagctgcagcatccaacccgcaccagcactggatttcgagccaaaaacagccgaggcgcgcagcggcaactctccggtaattccggatggtttaatcgccgcagttaatcgtcttctcgatagcgacggaagccgtggttgttatagcgcaatccgctgccgcgatgcacgcgcggaagtagagcgcttgctcgcaaccgcccctcaggaggtgccagatggaaaatga

SEQ ID NO: 180948 - DNA, 411 bp, Klebsiella oxytoca
atgacaactgatatcaccgaactggcgcagagagagaaattcgaagcgtgggcacatagccagaaacttagccttgcttatggagattgtggttacgctttttcctcaacagaaatggcctggcgtgcatggatggcgtcatctgctgcgctggtagaggcggtggagaaggcgcaagggatggaaacctactggaaaactcaatgccgtgggataacggaccacagcgaggagttgcaggcgcgcatcgcagagctggagtcccgcaccgtcaagctgccagctgaaagattttgccctgcggagtacgccggtagtcaactatggtcagaaactgaagtttggaataaggcgatcactgcatgtgctgacgaacttcgcgcctctggcatcaaggtggaggctgagtga

SEQ ID NO: 180949 - DNA, 1329 bp, Klebsiella oxytoca
atgagcaacgcagcaatgattattgtgccaacggatatcagcgaaaaggtacgcgaaattgaggttgcatacgctcgctatctcgaagagttccgtatccctgacgaccataaaatagtcgttaacttctccgccgggaaagacagcacaactacggctactgtcgctcaccacctgttcggcgaaaaggtgcagaatgtgatggctgacactgacaacgagcatgatttaactgtcgaattcgcgcgcaatatccacctgcaaatcggctgcaagcccgtgcagattgttaagcggatttactcagatgttgagtttgaacgtcgccggaaatccctgatgaagcgctggccaaagaaacaggcaattcggatgggggcataccgtggcgtaatcatgccatcgctggcgaggtcagacacaaaattcgggcaggcatggcttagaactgctgagcgttggggtatcgagtttgaaacagctctggatgccgcgctgtcagttatgcatccatctggaaacagcttcctggacgcagcgcttctgcacggcaaattcccgatgatgtgtgaccgtttttgcactgatgagctaaaaattcagatcgcctttgatgcggcaattaagccactacttgatgatggtgaagttgtcgttcagtggtctggtgttcgcgctgatgagtcagacaaacgcgccggatatgatcggttttcatgtgatgagcgtgaccgcgattttctctataacttcctgcccatccacaaatggacggcggctgatgttttcgccttacataaatatttcggtatcaagccaaatccactgtacttgcagggggctgaccgtgttggctgcatgaactgtgttttatgcacaaaagaggagatagcccagacggcagcccgttggcctgagcacatcgagaagcatcacgcatgggagaaaaaagttcggttaacctcgcgctgggtccactggatgagcgtgggcaccgaaagtcaggcgtggatgcgctctcagcttggttttagagaagtcgtctgggatgagtttgaattttcagaagacgctgacgcccctggtatcgttcagaggaagaaaagatatccagtaaatctgggcaaagatgtgctgctgtatggccttgagccagacgttcagcgcatcgaatggtctggcttctacggacctcgcgggaatatgggggcgccgtctgcgctggatgttgtcgagtgggctaagacaggccggggggggcaaggtttacgacctggtgaaagccagcatcgacacctctgtgtgttcatcccgttacggtttatgtga

SEQ ID NO: 180950 - DNA, 549 bp, Klebsiella oxytoca
atgactatcacactacaggcagtaaacgagctcattcagtcgctggagagtgcgggcgagttgtcgatcaaagagacaaaggttatggcgctggcgaaagcttaccagcagctggttgcggagaatgtggcagcaaaaaaaataatcagcgaatgccgggagtatttcattgctggagtgatgaaccgcatcagaccaacgaatgaaggctacctgcacatgatttgcgacacatttgcagatgaaacccccgccaccgatcgcatcgtagccggggttaaggccagcgccattcctgaaggctttaagctggtacctgagcagatgtatctgtcagacgaagatattcaggcaatctgcatgcagtgcggtaatggcgacaaaaaaggctatggcgattatgaggacggcattttgtgggttggtgagcttagcaatgacggtgaggtgaaatacggcctgaatattgcgaatgccaattacccggaaaaaggttcaatcacggtgtttgagtttgatgagccgctgcgcgagggggccgacaaatga

SEQ ID NO: 180951 - DNA, 213 bp, Klebsiella oxytoca
atgaaattacaaaaatgccctgattgcggcgcggtacctgagtttcactggaaagattatacgtttggctcatgttcagacgccctgaaatgcccgtatgaccattaccgggtccagcacagttactgggctggtggaaagaacaaagccagacatgctctggaacaaaaatgggtggaagcggtgaataaaaacgaggttaaaaatggctaa

SEQ ID NO: 180952 - DNA, 255 bp, Klebsiella oxytoca
atgtgtaaccagtctgctgctgaattgattgctcgcctgaaacgagcgtatccggcgtatgagccgtctgaaggagattgtgcaggcactggcatccctaaggccggttctcgcttccagcacagacacaaaggccacatggtaacggtactcacagcgacagagaaagatgtttcctaccgcaaagcctgcgggtctgttggttgggtgggattgagagagtttttacggctacacaatgaggtttcggaatga

SEQ ID NO: 180953 - DNA, 414 bp, Klebsiella oxytoca
atggaaatcaaacacgagcacgttgaaatagctctgctggcctgggctgctgaagtcggtcaggcatacgcagccagcgcgattactgaagaatacgtgcgctcaggtggggctgagcttcgcctggtaccgggtaaagcatgggccaatcagcaaaatatcttccatcgctggctgaagggtgagaccgaacagcagcgcgagaaaatccgtctgctgcttccgtcaatcctgcgcgttctgccacgtgaaatccgtcatcgtctgagcatctacgacacgatcgagcgtcgggcattgctggcggcccagcatgccatcggaacggctattgatgcgcacgacgatgctattgaagccatatacagcaaggcgtatcagcctgccactgttgaagtaacgaaataccactga

SEQ ID NO: 180954 - DNA, 294 bp, Klebsiella oxytoca
atggctaattttctgcaaagtaacccgatggttaaagcagctcaaaccaaactcgctattgcgcagttcattggtaacagtggcatgtggtctgatgccatgacgtcaataaaagatattcatgaagcagcaaagcacgaagaagaccatatgttttgtggtcgcacggattcactttccggacttcaatttcgggacgtagttttaaattacgacctgtacggggatttaatttccgtcgatgctgacttgcttacagggcaatataaagtaaataccgaagtttcattttaa

SEQ ID NO: 180955 - DNA, 696 bp, Klebsiella oxytoca
atgatcgagcgtggaatgatttttaatggagaaatggtgcgtgccatcctcgacggccggaagacgcagacgcggcgcccagtgaaattccctgtacatgataaaaaccttgggtgcgagctggctggcaatgaactggccggggaactgtcggcaggcaactatctgaacagcgcatttggcaagccagacgatcgaatttgggtgcgcgagacgtggggagtcgtcagccacgaactggatgaggatggtcgaatccaaccatggacgccagaccgaccggctacagccattcacgaaatgccgtttggcaatggctattactctggccacgccatttatgcagctgatggtgattttacctggggtgatgacgatggttatgaagatggtcgttcgtgctggaagccatccattcatatgccgaaagcagcaagccgcattctgctggaaatcaccgacgtgcgtatggagcgattaaacgctatcagcgagcgcgatgctcaggccgaaggagtagcgaaactacgagggggattctggcagcactatcagccaggttggacgcagcatcaattgagcgcccgcggctcattcgtaaccctctggaaatcaatctacggcaaagaatcatggaattccaacccgtgggtttgggttatcgagttcaaacgcgttgaaggcggtgcggcatga

SEQ ID NO: 180956 - DNA, 1329 bp, Klebsiella oxytoca
atgcacattggacaggctcttgatctggtatcccgttacgattctctgcgtaaccctctggcttctccgggcgattatcttgacccggaactgatttcccgctgccttgaagagtccggcactgtcacgttacgcaaacggcgccttcctctggaaatgatggtctggtgcattgtcggtatggcacttgagcgcaaggagccgcttcatcagatcgttaaccggctggatatcatgttacccggcaatcgtccgttcgttgcgcccagcgccgtgatccaggcccgccagcggctgggaagcgaggccgtacgccgcgtgttcacgcaaacagcgcagctctggcataacgccacgccgcatccgcactggtgcggtctgaccctgctggccattgatggtgttttctggcgaacaccggacacgccagaaaatgataaagctttcccccgccagacgcatggcggaaacccggcactttatcctcaggtaaaaatggtctgtcagatggagctgaccagccatctgctgacggcagcggccttcggcacgatgaaaaacagcgaaaatgagctcgcggagcaactgatagagcagaccggcgataacaccctgacgttaatggataaaggttattactccctggggctgctgaatgcatggagccaggcgggagagcaccgtcactggatgatcccgctcagaaagggtgcgcagtacgaagaggtcagaaagctgggtaagggcgaccatctggtgaagctgaaaaccagtccacaggcacgaaaaaaatggccgggtctgggagatgagatgacagcccggctgttgagtgtgacgcgcaaaggtaaagtctgccatctgctgacgtcaatgatggatgccatgcgttaccccggaggggaaatggcagacctgtacagccatcgctgggaaattgaactgggataccgggagataaaacagacgatgcaactgagcaggctgacgctaagaagtaaaaagccggaacttgtggagcaggaactgtggggtgtcttactggcttataatctggtgagatatcagatgattaaaatggccgggcatctgaaaggatactggccgaatcagctgagcttctcagaatcatgtggcatggtcatgagaatgttgatgactcttcagggcgcttcaccagggcgtatcccggagctgatgcgcgatcttgaaagcatggggcaactggtaaaattaccgacaagaagggaaagggccttcccgagagtggtaaaggaaaggccctggagataccccacagccccgaaaaaaagccagtcagttgcttaa

SEQ ID NO: 180957 - DNA, 138 bp, Klebsiella oxytoca
atgttgcaggggacgaagcgttttttccgtaacattgacctgatgatcttgcgtgacgacagcagctttcattctgttctccttattgaacataagcgtattaacacaattttgttttttacgcatgctaaggtttag

SEQ ID NO: 180958 - DNA, 237 bp, Klebsiella oxytoca
atgacttcgttctatacaactgagttcgccgcagcaagcccggcgatagcgtggctgctgaatttttggcgcacgttgcttgcggggaacccagagcccggtttttatcataagccgtctgagtgtttccttaccaagaacaataccgtgattttcagcgagcttttcccgcgccagtgtgggaccaaaatcggcatcgcgttcacggatgatattcagggcctgatcagtcaatga

SEQ ID NO: 180959 - DNA, 330 bp, Klebsiella oxytoca
atgttctacaggaatgaagtgatcagttatttacagacgaataaaattcttgcgttaaaactcgaccgtgccttaacgggcgtcgaaaaagcggtatcaaatcagattgaaagcataggcgcaggcgcgatgcgtatgctgtattatacctcctgctttactgatgagtatcaggatgtatgccagcaacaaaaaaacgaagaccttcgatttaaacaaggtgttatttatttgttgcgacatggtaatctcgtgtacgacttgctaaaaatatattttgaacaaatattcaaatttaaaaccaacgatcaattggaatacattaaataa

SEQ ID NO: 180960 - DNA, 480 bp, Klebsiella oxytoca
atgtctacacccgcacatttatggcttgaggacgaaaatggttctccaattatgggtagctgtttaatgccgctacgaatgggatctatcgagttaaaatccttctcccacggtatcactattccggtagatcccagttggggaaaacttacgggtacccgcgttcaccgccctatcacgatagtaaaagaatttgatcagacaacaccgcttctgtatcgcgcagtctgcgaaggccgaaccatgaagacggcgacaatcaaaatgtatcgtattctcgaatcaggtattgaagccgaatatttcaatatcattctggaaaacgtcaagtttacaacggttgcaccgtacctctctccaaacggtataagtagtactcatcttgaaacgctcgaattgcgttatgaggcgatcacctggaagtatacggaaggaaatattatctatcgtgatagctggaacgatcgttgctgtgcgtga

SEQ ID NO: 180961 - DNA, 894 bp, Klebsiella oxytoca
atgacagttgaagaacctaccgttgcgctgatcggtccgggcgcaattggtaccaccatcgccgcggcgctgcacgaggttggccgtacgcctctggtatgcggccgccgcgcgcacccgcagctttcgctgcgttttgatggcggaaatattgtggtgccggggccggtcttgacggaaccggcatcggtcgccgcgccgtacgacctggtatttgtggcggtaaaagcgacacaaattgcggctattgcaccgtggctgcaagcgctgtgtcacgatcgaacggtagtctgcgtgctccaaaacggcgttgaacaaaaaacgctgttcgcgccgtacgtggcggaagctaccgtgctgccatcggtcgtctggttccccgcccagcgtgaacctgaagcgtcagtctggctgcgggcgaaaccgcgcctgacgctgccggatgttgagggggccgagcgggtgcggcacgcgctacgggacacgcgctgtgaagtggatatcagcgcggattttctctccgttgcgtggcgtaaactgctgcagaatgcggtcgccggtctgatggtgctggcggggaggcgggcagggatgtttgcccgcgacgatattacggcgcttgctttaacctatttgcaggaggggctgacggtggctcgcgccgcaggcgccagcctggacgacgccgtgccgcaggaaattctcgccggtttccaccgagcgcctccggatttaagcacttcaatacttacggatcgcgaggccgggctgccgctggagtgggatattcgcaacggggtcgttcagcgatatggccgtattcaccatatccccacgccgttaagcgatgtgattgtgccgctgctggccgccgccagcgacgggccgggctaa

SEQ ID NO: 180962 - DNA, 837 bp, Klebsiella oxytoca
atggcatttgtgacaaccaaagacggcgtcaatatcttctttaaagactggggcccgaaggaggcgcagccgatcgtattccatcatggctggcctttaagcgccgatgattgggataaccagatgctgtttttcctggcagaagggttccgggtgattgcgattgaccgacgcggtcatggtcgttcagatcaggtgagtgacggtcacgatatggatcattatgccgccgatgcctcagcggtggcggagcatctggatctgcataatgccgtgcatatcgggcattctaccggtggtgggcaggttgcgcgctacgttgcgcagtatggtcagccgcaggggcgcgtggccaaagcggtgctgatcagcgcggttccgccattgatggtaaaaacggagagtaatccgggcggtacgccaatcgaggtgtttgatggttttcgcaaagcgctggccgccaaccgctcgcagttttatctcgacgtggcgtccgggccgttctacggctttaaccgtgaaggcgcgaaggtgtcccagggcacgattcagaactggtggcggcagggcatgaccggtagcgcaaaagcgcactatgaggggattaaggcgttttctgaaaccgaccagaccgaagatttaaaagccattacgctgccggtgctggtgatgcagggcgatgacgaccaggttgtgccttatcaaaacgccgcgatactgcaggataagctgctgccgaacagccagctaaaaatttatcccggctttccgcacggtatgcatacctcgcacgccgatgtgattaacgccgatctgctggcgtttattcgctcgtag

SEQ ID NO: 180963 - DNA, 255 bp, Klebsiella oxytoca
atgcgtaatgaacagctgaactcaattcccattccgccggaacctaacgatccggtaccggtccacgatcccaaacctcgcccgcgcccgttacccgacccgccgcctgacgatgagccgattaaattgtcgcatcgggagcggagatctgcgacgatacgcgccagcagattgtccgcccctaaatgtaatgcgagaaataattgtgaccgctttttcaactctgaatgttttgcccgccgcccagctaactaa

SEQ ID NO: 180964 - DNA, 1359 bp, Klebsiella oxytoca
atggacggtaaaaaaattccgctctaccagcgcattgcccgacagcttaagcaggcgattgagcgcggcgagctggctccgggcagcaggctgcctgcaagtcgggtctatgctcaggagcttggcgtgtcgcgggcgacgattgagaacgcgtggggagatctggtggcgcagggatggctggagcggcgcggacaggcggggacctttgtcagcgatcggctgctgccgcagcaaaacgcgcccgttcagcccatcgcgggcgatgaacccgcggcgccgctgccgtttcagctggggctgcccgcgctggatctgtttccacgcggcctgtgggcgcgcgtgatgggtcggcgtctgcgtacgcaaacgcgttttgacctcgcgccaggcgatcccagcggtgaaccgacgcttcgccgggcgatcgtcgattatttgcgtctgtcgcgcagcattgagtgtcggcctgagcaggtcttgatcaccggttgctacgcggcctcgatgcgccttattttgcgcacgctggcgcggcctggccagcaaatgtggatggaagatccggggtttccgctgatccggccggtagtgaacgacgagggggtggcgatcaatcccgttccggtcgacgacgacgggatggatattccctgggcgcagcggcattacccgagtgcccatttcgcgctgctgaccccggctcatcaaagcccgctcggcgtggcgctatcgctggccaggcgcagacagctcctgctatgggcggcgcagaataacgcgtggattatcgaagatgattacgatagcgaattccgctatcacggtaagccgctgccgccgctgaaaagcctcgacgccccgcagcgggtcatctatgccggggcgttcagcaagtctttgttcccggcattacgcgcggcctggctggtggtgcctgagccgctggtggcgccgtttcgtgaacaggccgcgctgatgtgctgtagcgtgccgacgctgtggcagcagacgctggcggattttattcgcgaaggccacttctggcggcatctgaagaaaatgcgcgccagctatgcccagcgccgactgtggcttgagtcggcgctgcgggcgcagggattcaccgtcgtgcctcaggcgggcgggatccagatggtggtcagggtcgccggagacgatcggcctctggcgcagcgcgccagacgggccggtctggccgtacaggcgctgagcgactggcggatggagactcggggagaaggggggctgataatgagcttcaccaacctgacgtcggccgaaatggcgaatcaggctgtgcgtaagctttatgtcgcgctttacccgcagagataa

SEQ ID NO: 180965 - DNA, 243 bp, Klebsiella oxytoca
atgccatctccgctgcgtatggcgtttctaggtaatacgtcaaaaactgtttggatggtagttggcacgtatggtatctgtcgagggctatgggttaagtatgtgttttcttggtttctctatttcttaactagtttcaaaatgttaaatccatcacaaaaatgcggtagtagaaactatgagcatatgatttgccattttttgagggttgaatgtaaacaagcctgttggcaaaattgttga

SEQ ID NO: 180966 - DNA, 1155 bp, Klebsiella oxytoca
atggctgcaaaactatgtttcttccccgtaggtaatggggatatgacacttattcaaactgaagatggaaaaaatatattaatcgattgccgtattagggatggagaagaacatcctgatgtccgctcacaacttagagaaaaactctctcgagatagcgaagggcgtcttttcgtcaatctttttatttggacgcatcctgattcagatcattgtgatggagtatctgatcactttcacttggggaaacctgaaaattggagtgaaaagagcgataaaatttttatcaatgaaatttggtcaagcccaattgtatttagacgccatcatgctcaaaatcatccattatgtgatgatgcaatagcgttaaatacagaagtgaagagaagagttaatctttacaaagagaagggctatttggatggtgtcggaaatcaagtcttggttttaggaaaagacgagaatggtaaaactgatgatataccatatattcttttagaattagataatacaaccagttatattaacggagaatcttcatcagtttttcaagcccggttattaggtccatcacccaagaaagatctcgacgagttagaagataaattaggtaaaaatcattcgagtgttatcataaactttgaattaaaaggtgataacaaaactgcttattttttaagtggaggtgatgctgaggttgtgtgctgggaaggtgtgaaagatcgtctgacagacaagaatgaaatgtcatggttagattatgatatcttacaaacaccacatcattgttcttggcacagtatatctcatgatagtctaagccaaaaaggcgatgatgcaaaaacctctgaaaaagcaatggaggtatttaaccgtgcaaaacaaaatgctttcattatatcaagttcgaaaacaattgaagacgatgaaaaagatcctccagcttaccgagcaaaagaagagtatgaaaaaataacagatgataaaaacggtcaatttctgtgcgtatctgatcataaaaaaaatgggaaaaatgttcctttggaaattgaaatttccagtaatggtattaagaagatagcggcatctacattaggtatggcagaatcatctaatactgtcgtaaatagacaaggtggtggtggttatgcctga

SEQ ID NO: 180967 - DNA, 1875 bp, Klebsiella oxytoca
atgcctgattgtcttaaaaaaaagatagatcagttaaataaaatccttgcaccttatggtgcaaggaagctgtccaatactgaattatctattcttgatgaaaaatatatatgtgtctgggaattacctacagatttagtattcaatgacgactcaattgtattacaaataaggtataaaagtttaacacagcatgatatcccagaagtatttgtatcatctccagtaataaatgtatgtcaattacctcatatagaaaaaaatggtaaactatgtgtttggccaaatacatacattattgatttgagtgataattcatatgttcttgaattattaagtgatgcctattcgatgttgaaaaaaggcatcaaaggagatcttagagatgattttattgacgagtttcagaattactggatttatcattgcaataaaatagaacgtgttattagcctatgtgatttgaacataaagagcacaagattagtatacggctacaaagcaaaaacattaggatggatatattctgatggtgaacaaaaattaattaattggttagataatcagaaactactatcttccaattcagataactctaatgcaagagataaacacctacgtcaaagacaactttccagaataatatctattccattaatattttttgaaaatgcatggtatccagaacaatatccaagaacaataagagatttattcaatttaatcaatgaatatcataatgagccagatatagttgatgagtttattttaaaatcaatagcaaatatatataatcgcaacccaactgttttaatagcatttcctacgccctcaggaatgaatattataggaattcgaatttctgagaatgtaggtgatcgtcatacagatagatatgatacaagagctatcgctaacggtcgattccacattaattcattattagatggtcatagagattatatcaatggccgcattttaaagaatagaattggtgagttaaaagcacaaaacatcttagttgaacgtaacgataactcatggataatgggtagagatcataatcctacttataaaaaaatatctgagcatacagtagctataatcggatgtggctcagtcggttcatctatatcgaggctgttaatacaatctggcattacaaatataatgctctgggatgaagactctatgaaatcagaaaattcttcacgacatctcctggggttcgattctgttaacaaaaataaagcttctgctctcgcatccaaacttcgtttagaatttccaaacaccaatatagagtattttaatgaagaatggtccgaaaacgctgaatcaagtacaagaattactgaggctgaccttatcctaagctgcactgccgattggaataccgagcaacaactgttaagtaaacaatctcagtgtaatttgggagttcttgtttttgcttttgttgaagcccatgcaatggctggacatgtaatagtaaatcaaatagattctggtgcctttaatgcctggcattacacacaaggtgaaaaaataggtgcattgagatatcctgctacatattggaaagaaaatacaaaaaaaagaattgctgcttgtgctggagaatttcagccttatggagcgatacctttagcaaacttacattcacttgctgcaagaacaataattgacttaatattgaatagatttcctgacagttcctttgcatatagctatcttggtagacaagaagaactggtagaacttggtggtcaatggaatgattgttggataaataaatttggcaatccaaataaaggcgatcgaatcatttctttgatttatgaaaactcaagctggatgaataacgatgcataa

SEQ ID NO: 180968 - DNA, 489 bp, Klebsiella oxytoca
atgcataaattttatagttatgatttaaatttttatatatgcatcagtgaagatattatggaagagttattttcttatagacagaaaaatttcctaagtaaagagtctggaggaatgttatttacaaataaacttgacaacacagaaatagaaataaataaaatctcaataccttgctcatctgatataaggaaaagaaactatttcaaattagatgagaaaaaagcgaaacaagaagtactaatacaatttgaaaatggtttccattatttaggcgactggcatacacacaacgagactattgcaaacccatcacctactgatattaatagcattcatgagttatttaccaaatctaaacataacagaccattttttataattttaataattcctaatcaaaatgtaatatctaattgttatttggcagcggcagatggaaaaaagatataccaatttaaatatcaaaatcaaacaacaacgatttag

SEQ ID NO: 180969 - DNA, 906 bp, Klebsiella oxytoca
gtgtctataattaaaagtttttcagtaggaaatggtgatatgtgttatataaagcataatagtgataatttcacaatcattgattgtaacattaatactggaaatgccaaaggcattatagaagaaataaaagagcaatcagctcaaaagagtataatgcgatttatttcaactcatcctgatgaagatcatttcgggggtattcatctgcttgatgatgaaataaaaatccataacttttatgtaataaaaaataaagcgataaaaaaagatattacagtttcatttgagagatactgttccttacgtgatgattgtgataaagctttttatatttctaagggatgcacacgtaaatggatgaataaaagtgatgaaaaccgttcaagctcaggaataagtgttctatggcctgaactaaataaccctttctttattgaggcgttaagtgcctgcgaaacaggtgaaagttataacaatgcctcagcagtaattagatatagcctcaataatggtgccagcataatgtggttaggagaccttgaaactgaatttatggaaaatattgctaatgacatacacttagaaaaaaccacaattgtttttgcagcacatcatggtagaaagtcaggaaaaataccagattcatggctgaaaaagttagatccgcaatatattatcatcggagaagccccatctcgacatttaaattactataccggataccaaaaaataacccaaaacagagccggtgatattacaatgaaatgcatcgatgataaagttcatttttacgtatcgaatgcagcctatgaaaaagactctttgattgatgaacaagtatatgacgcatctctcgggtactacatcggctcacttacagtagaaaaagaatatacgttatag

SEQ ID NO: 180970 - DNA, 630 bp, Klebsiella oxytoca
atgagtgaaactaaaaatttaaaagaatcgaataaaactactatatatgcagttataactgtactctgcgttgttatatttttaattcagttaggcatcgaaggatatgttaatatcaagaatatttatgcggggctcggtatctctggaggggtatccgtcatatcgttgttattagttaatatcattcctcaaaacttcaaacatattctggtcttttggcgggttaaacgagtattgccaggaaatagagttattgaactttgtcgtaaagatgaacgtctgaacatgaatgatttacaaaacaaatggcctgagctttttctgcatgatatgccagagcaagataggaatcccttttggtataaaaatatttataagaaaactgattcaagtgctcaggtgattgatgctcataaaaattttcttttatttagagatttatgtagcgcaaccttagttatgtttttatgtgctggtttattgaaatttatttcaattgatggcttgcatataaaatggattgtgcttgcctttcttttcataatgacctttattttctcagttatttcaagacattatggtaataggatggttacaagtgcagtggctgtcggtgctgatagttag

SEQ ID NO: 180971 - DNA, 363 bp, Klebsiella oxytoca
atggaacaatatatttcagcattcaatgagattgatttgcttatggaaggattattcgagagattaaatatagggataggcgaaattaatgcatatccaagtgaagatatgtttagaattatcgtaaataagacagaagttgagagtttgaaatcaataaatgagatgtttgcaaagaattatttttcggaagctcataggcttatgagccagaatgtgtatatatttgtgaattggtggtgcgataatttagattttatgtcggtagatataccttcgctaattgcttcaaaagaaaaagaattaatcatttcaaatgctggaaaattacgttctggaaattttgataaaaaaagactatga

SEQ ID NO: 180972 - DNA, 267 bp, Klebsiella oxytoca
atgtttgaaaataatactggcgtctacaattacaaaaataaaacccccaccctcattcctccaatcaatctcgatgcctggaaagaattagggaagatatcgcaaaacctaaataagctcaatatccatcttgataacaagagtgatggaagctgtttgacaaatacagaactttttgccgttagacgtcaaatctctgagcttcgtttgcatctcataaatattgatctttggaggatatctgatgaagggaatgcagaagattaa

SEQ ID NO: 180973 - DNA, 1227 bp, Klebsiella oxytoca
atgaagggaatgcagaagattaaaagaggaaaatgtttctcaggaattattcactatgctttgaaatcagtatctcatcataaaactgtaccaagaataatcggtggaaacatgctgggaagctctactactgagttaatcgatgaatttaatacagccaaaaagcttcgagaagatatagtaaaaccggtgtggcacaattcacttcgattaccaaaagatgatacgcttacagattatcagtggtctaatatcgctgatgattacatggcacgtatgggtttctcggaaacacatctaaaatgctatgttctacatgatgatattagcggtcaacatatccacattatcgcctgtcgtattgatctcattgatggcagagtctacttaggtaaaaatgaaaatctcatcagtacacgtattatccaagaactggaagaagattataaattaacccgaactagagggccatcagctattggagcgcaatcatctaagtcgaaaaacaaaaaaagccgtggtgaggatatgttggaaaaaagaactggtaagccatgttctaaagtcataatccaggaagccattgaaaccttgcttgtcaaaaatctttcgactatagaatttgtacatcaactcaaagaaaagaacattgtagctgttccaaacatctcatctactggtcgtatgaatggcttctcgtttaaatatggaaatatggctttcaaagcatcgcaattaggaaaaacctactcatggtctgctctacagaacaggatcaattatattccagatcgcgacaacggttttcttttcaatttaaaagcatcttgcagtgaaactcttgatatgatacctccttctgggattgtaatagaagaggttaatcccacgatagaaatgcttgcactttgtaaaacttctcatgacgatagatacgataccgattataccaaagaatgtatctcgacaattcctagtaatagcgaagggctgttaactgatgctccaaaattaagcttagaaatacctaagtttagatggctagaaacaattccctatattgatgcagttattagtctactaaaaaacatcaaaatactaacacttaaacgcccaaaaaaccctagtattatcagcaacataaggattacgaagatagcccctttatgcctcgccacaacagatgagcctgtctcggtacaccgcaaacgatcaccatcattgtag

SEQ ID NO: 180974 - DNA, 645 bp, Klebsiella oxytoca
atgagcatttactctatgaagagcaacagtaaacaagcagaaactgttgctcctaaattcgttttcttaggggaaacctacgagtttgttgaaactttttcaggcgaagtcatcgaatcatttaatgaacagatcttagtaaggaatgattcaggtgaggaaacaaaaatttctgactacggtattacattcaggaattcacaccgcattcataaatatgagttgcgccaatatagtggatatgagcggtgtagtgtaaattacgatgctctgatcgtaaatgagaatacaggtgagtataaagtaaatttaagcagaaaactcattgtcatacctgcattcatgacaatgttattaaataatgtatcaatggcatcacactacaaagtgatgcctgttcccaaacttttttatatccttttcactttgctttgcttagcttctttcattgccttctgtattttacttgcaggatataaagatgggtatgttttcaatgaacacaaatatgagtggttaacatatctcctatctcgctcagcaacttttatctgcatccaatggatgaaaagaaaaagttcaaggtttgataacgaaatcagaaatattatttataagttagttaaaaataaaacatcatcataa

SEQ ID NO: 180975 - DNA, 414 bp, Klebsiella oxytoca
atgaaaaatacaaagcttgatcttatggagaggtatttaattattctcgataagtttgtgagtaaaatatcagaatctggagtgccacaacaaaaagtcatcgaacaatcatatctattttgttctggcttttatattaaatataagcaagaaattgaaaagataaaattctctaatagtgatgttgttttgacgtttctactctattcatactataaatttattaataagttagatgatgatttaattgataagagacgtataaggaaaatatgctctttgcttattaattttattgtcgataatggtagccaatcagagaaggtctatgttcaggaaaaaaagaagtatgatgctttccagttacaaagagatttatcaatgaaaaataagagaaaaaaatatgggttgtaa

SEQ ID NO: 180976 - DNA, 279 bp, Klebsiella oxytoca
atgtttaagccctgctatcaggagttcaagaaaatgctggcgcttacggatatcgagttgaccgagggacaaaagacacatgttctgcgtcacaccttcggtgcgcattttatgatgaacggcggtaacatccttgtactgcaaaagatactcggccacgccaacattcgtgaaacaatgaagtatgcgcactttgctcccgaccacttggaacaggccgtcactctaaatccattatcattatctattggcgacaaattggcggcggaggtttcataa

SEQ ID NO: 180977 - DNA, 339 bp, Klebsiella oxytoca
atgaaatttaaaattatcgcggctttgtttgtgggattggcgtttggggcggtggccgcagaaaaaacacaggatttaaatgccggggattttggggaggattggcctctaacctttgagaatgcaaaagtatcatgtgttaataaaatgtatgcttttgtgtatgacaaggatacagatgatagatatccacttaatggcatggcaaaagatgcggttaaatcaggaaaaatggaaggctctaacttggatgacgtctggaaggatagccctgattatgacggtgttaagatttcaatttcaccgttgatagaagccgctacagccctttgtgattga

SEQ ID NO: 180978 - DNA, 861 bp, Klebsiella oxytoca
atgagttctgaactcgatgttcagtggcgtattggtgcttcggatggagtgttagagcgcctgatgtctgcatatggcgtcaagatgcaaaaggatttggctgatctgcttggcatcgctaagcacagtgtcagcggctgggtacagcgtgatgcgatacccggaaatatcattgtgagatgctgtctcgatactggggccgatatcaattggcttgttaccggtgagcttgcaaatgcgaatttagaatatgattcctcaaagctgaaaggcaaagctctctatgacgagattatggggaatggaggcaagacggtattgcgcaggatacttgatgcttacggctttaacatgcagaaggaacttggtgatttactcggcatttcttcaggaaccattagtacgtgggttcggagagatttctttcctggtgatgtggtagttacctgtgctcttgatactggcgtatctcttgagtggttagcgacaggtaaggggcaaatgcgagatagcaaggaaacccttgcgactgagctttctattaaaaaatcccgtcttgagtctggggctctcaaggatgctggatactggcatcccgatccctcaatgattccgccaaatactaacgatttgctttttgttgatggggttaatacgtcttggcttgtcgactgttcagcctcaaacatagctaatggtcgctggctgattagcattgacggtgctctcgatatttttgatgtaatcaggttaccaggcgggaaggttagattatcaaataaatccgctgagtttgaatgtagcctcactgatatcaagtcggtgggggtagtggtaattacgttggaaaaacacatataa

SEQ ID NO: 180979 - DNA, 375 bp, Klebsiella oxytoca
atgtcagatgcaaaatcaaccatgcctcacaccattaatgactcgcaaatccaaactttgctattaaaccctgagcagttgaacgccatcgttagcgcaatgctaccagcagtggaaacgatgatccgctcggctatgtccgacaccatgaccgtagaagactttgccgccgcgcgcggtgtgagtgaccgtctggtgtggcaatggattgataagggcattcttctaaaggctcccactaaagatttttctagcaaagaggaagccagtaaacgaggccgagttctcatcaatgtgaaagcctggcgcgacaagttaactcaacaggctatcgactgccgttacatcgaaaataacaaaaccgcattcaactga

SEQ ID NO: 180980 - DNA, 510 bp, Klebsiella oxytoca
atgttagattttcgtgtttcgtcacatgcacactttgatgatgcatgcagaaaattcgcggccacgcataacgtgaaagagctggccgataaagccggtatcaagccgcatacgctttacaacaaactcaacccggaacagccgcaccagttaacgccgcgcgaaatctggacgctgacagacctgaccgaagattcgaccctcgtcgatggttttctggcgcagatccattgtctgccatgcgtgccggtcaacgaactggcaaaagagaaactgcaatcctacgtcatgcgcgccatgagtgaactcggcgagctggcgagcggtgccgtttcaggcgaccgccttaccccggcccgtaagcaaaacatgattgcgagcgtaaacgcgggtattcgcatgctgtcgctgtcggcaatggcattgcaggcccggctccaggctaacccggctatgacgagtgtcgtcgataccgtcagcggcatcggcgcgtcattcggtttgatttga

SEQ ID NO: 180981 - DNA, 201 bp, Klebsiella oxytoca
atgttgactaacgaaccgtcattcgcctctctgctcaaaaaacgtagcccatccatgcactacgggcacggctggataatgggtagcgatggccagcgctggcacccttgcaactctcagtccgaattgttgaacggcttaacagcaaaaaaagtctctgcggttaagcggcttttaaatgcattaatgggggcaaaatga

SEQ ID NO: 180982 - DNA, 372 bp, Klebsiella oxytoca
atgaacgaaagaatttcagctcatgacacccaggcgagcaagctttttagcaatgctgattgttctactgagcaaccgaagaccatgaccggcgaagagtgtttcgcacggtttcatcaaaagctgaaagcaacagaaaataaggcgctgcgtaatttcaataagcttgatgaagattttaagtttgtggttttaacgcttgctaaccgaaataatccgggcgtgtttcgctctgatgaagtcggtaagccatatgagtattttgatatagatcgccgcaagctgattattgcgtcaatgaacaaaatttcccgctggggtggaattttgccccggcatatttccattcatgaatgctttttagctaattaa

SEQ ID NO: 180983 - DNA, 225 bp, Klebsiella oxytoca
atgcacaaacaagcttcagaaccaaaagaaaataccgacctgcttcttgaggttatcggtattgcaaaacgtgaagagcgtaaaggtcgcgcgctcgctgtttccatccggcttgaggcactggcaacccatattgctaacaaaggtatgagcgctatcgaagcggccgaactgttgcgccgcgaagccacccgctacgaaaacgaatctcaggagttgcactaa

SEQ ID NO: 180984 - DNA, 228 bp, Klebsiella oxytoca
atggccgatgcaatggatatcgcacaacagcgcgagcaggcagaacgcgagcgccttatcaacaaagcgcgcagccatatcgctgcgccttctcgttttacctgcgaagagtgtgaagctccaatcccggaggaacgccgtatcgccatccagggagttgcgctttgtgtcacctgtaaggaaatcgcagagctgaaaggcaaacactacaacggagtcgcggtatga

SEQ ID NO: 180985 - DNA, 744 bp, Klebsiella oxytoca
atgaacttaaaaaaccgaaccaaacagttaacagaaaaagaattagaagacctgatctgcgagctggaagcggcaggcttttaccgccgtcagttgatagggctgactgagctgcaggaacgccgcaaagcggaagccaataacaagcctgtagcgtggacttgtgcggaacagctgcgcgatgcaaaggctcaaggctgcgggtacgtctttggcttaggtatccctgctaaagcaggccaccagataatgctgtacgccaacatgccgccggtaacttctgaacttttcatttcaggtgttcgtgatgaggatggcgactgcactgcggttgaagatgctgccgcacaattctggaccgtgtattgccgcaatgaggacgggacctgcgatgcgctgatggactttgtgagcagggaaagtgcggaaaaggcgattcaaatgattgcccctaagcccgcgcaaaccggtgtcgatgacgatgtgcgcaacattattgggctgctggaaaataacgagtgggcggagcattgcactgaaactgtattaggttcgcgtctggaagcggaaataacacgactcgttggtagcatgcagtcagcgccggtagtgccgaagaaaataccgcgcagtgtttatatggtcatctatcaggaatgcggcggtttcgtagactgcggtgcaaatgctcaaacaatctgggaagcctgccgcgccgccatgttgaaaggtggtgcagcatga

SEQ ID NO: 180986 - DNA, 474 bp, Klebsiella oxytoca
atgagcctccgcatcgaaatcggcgacaaatgggtaattaccagcgaccaatatcaattcatcctgaatgaaaagaaagtcgctcaatccgggaaaaaagctggcgaggaatggctcgacactatcggatattacccgaaaattaatcagcttatttccgggctgattcatcatcatatccagcagtcgaccatcaactcaattgaggaaatggcagctgagattaaacgcattggcgcgctatgtggcgatgcatttaacgtcatggaacaaagcgaaaaaatcggaggttgtcactggatatcgtggaatgaattaagcgaacgcggtcttatcatccgtattaataaagaaattctacaccctattgggctggcggttttccgtgaccctcaaacaggtatgtcacggggcgctttagtttcccctgatggtatttgggaatatgaccagtccgtttcagtgaaggggtga

SEQ ID NO: 180987 - DNA, 2124 bp, Klebsiella oxytoca
atgattgcggctttgctgcgtgcgcgtaaggccctctctcttcagcctgagtgtgtgcgttttgacgtttatcgcaccgcgacggtactggagcaaaatcagggcagtcaacgagccaatgcctttttaatcagcttctgcaaaaaggcattgccacgtcttgaactggtcgcaaaaaaatatgagtgcgcgggtatcaacagcaacgtatcagccgctgtttttggaggtcattttgatacccggcttatgcaatatctggcctcccgcatggtcaatatggttgccagatataaccgtctcccggacatgtctcgcgccgatatcgaccttctggctggtgatattgctaatttcattcgttctgagctggcaaatattgatgactcaggttttggtgagctcaaaacgctatacacctggtacatgcacgctggttttatttctctgcaattcaatgtcacccctccccattgggatcgcgtgacaaataaatacttcaacaaagatgatatcgcccccgcagtaatccgtatgtttactgagtcatggtggcgtagtcgtctgcgtcgtgtcgcgtcggcatggcgcgaacatctacaaattgcagtcggcaacgtcagcaagaaacgacacgcctacgcgagtaaaaactgcgtgactgactggcgcgagcagaagcgccgcacgcgtgagtttctgaagggcttagagctcgaagacgaggacggcaaccgaatcagcttgattgaaaagtatgacggttcggtcgctaaccctgcgatacgccgctgtgagcttatgacccgcatccgtgggtttgaaaatatctgcaatgaactcggttatgtcggggagttttacaccctgaccgcgccgtctaaataccacgccaccaccaaagcgggctaccgtaacagcaaatggaacggagccagcccagcagatacacaaagctatcttactggcttatgggcgcgtatccgcgcgaagctgcaccgtgaagagattcgtattttcgggatccgcgtagcagaaccccaccacgacggaaccccccactggcacatgcttatgttcatgctgccggaagatgtcgagcgcgtgcgccacattatccgtgattatgcgtgggaggaagaccgccacgaactgagaagcgataaagccaaaaaagcccgctttcatgctgaggccatcgacccggaaaagggcagcgctaccggctatgtcgctaaatacatttccaaaaatatcgacggctatgcactcgatggtgaaacagatgacgaaagcggcgaactgttgaaagagaccgcgcccgccgtttctgcctgggccgcgcgctggcatattcgtcagtttcagtttatcggtggcgcaccggtgacggtctaccgtgagttacgtcgtcttgctgataccgagaccgcgcacggcctgagcgtcgagtttgccgccgttcatgatgccgccgacgctggtgattgggctggttatgttaatgcgcaaggtggcccgtttgtgcgccgcgacgatttgcaggtgcgtacgttgtacgaaccacgtaccgagtttaatcagtacggcgaggagacggtctgcattcgtggcgtttacgactctgccatcggtgccgataccccgattatgacccgtctcactcagtggaagattgtgccgaagcgtgccgttgatttggccgttgaccttcagggcgctcctgcgccctctcggagttctgtcaataactgtacgggaagcgaaagcgatccgccggagctggatttatccaaaccgttgagtcgaagtgaaaggcggaagctaacgaccagactcagggacaaaaaacgggtcatcgggcgtgattttgtccacggaacggataaacaacgcgcagccattgacagaacaatagacgagattcagctcacgaccggcgaaatcatcagccggggtgaggccctgcacctgatggccggtggcaaaagttgcataaacggcaaatggtgccgtggttcatcaaccggtgaaattttcccggcagcaccgtcacaccgggcgcaggccagacaaatcctaaatcgagtcgcggggttagcagcaaagcagcaccagagatga

SEQ ID NO: 180988 - DNA, 186 bp, Klebsiella oxytoca
atggttgatgaatatttcagccaaagacagaaaaaatgggcttgtgtgcaattcatcgccgaagtgtctctgattgcaaactgcaaaccgtcagaactcaagctcgccctgtctctcattgctgaccttgcaaacagtgaaaataaagaacctgaagaagaagaagttttctataaggctgaatag

SEQ ID NO: 180989 - DNA, 231 bp, Klebsiella oxytoca
atgagaatcaatatcacgctggataaagaacaaaaaataggtcagcagatagtcgatgctttccaggatgaattaacacgtaaggtgagatgtgcttttccaaccacacgggttactgttaagaaagggtctgtaactggcgtcgaactacttggtttcgataaggagtcagaccgtgaagcgttggactctattcttcaggaagtatgggaagacgaaagctggcgttaa

SEQ ID NO: 180990 - DNA, 1044 bp, Klebsiella oxytoca
atgagtaaatacaaaggccgcaagccgcagccgcaaaagcgcccgcgcaacatgaaagactcctcgccccaaaaagtggaggcgtttacttttggcgagccgagcgcggtgctcgatcgccgcgatattctggattacgttgaatgcgtcaataatggacgctggttcgaaccgccggtcagctttaacgggctggcgaaaagcctgcgcgccgccgtgcatcacagctcgccgatttacgttaagcgcaacattctggcctcaacgtttattccgcacccgctactgtcacaacaggacttcagccgcttcgcgcttgattttctggtgtttggcaacgcgtttttagagctccgaaagagtgtcactggtcgcccgctgaagctggaagcgtcaccggcgaaatacacgcggcgtggtattgaggatgatgtctactggtgggtgccgtcattcgaccagccgcacccgttctcgccgggatccgtattccacctgctggagcctgacatcaatcaggagctgtacggcatgccggaatatctcagcgcgctaaactccgcatggctgaatgaagcggcgacgctatttcgtcgcaagtattaccagaacggggctcatgcgggttacatcatgtatgtgacggacgccgcgcaaagcggtaccgatgttgaggcgctgcgcgatgcgatgcgcagttcgaagggactcggcaacttcaaaaatctgtttttctacgcaccgcacggaaaaccagacggcattaaaattgtgccgctcagtgaggtggcaacgaaagacgatttctttaacatcaaaaaagtcagcgccgccgacctgctcgacgctcaccgcatcccgttccagctgatgggtggcaagccggaaaacgtcggctcgctcggcgacatcgagaaggtggcaaaggtgtttgtccgtaacgagctcatcccgctacaggaccggatgcgcgaggtcaacgcgtgggccggtcaggaggtgatcaggttcaaaagttacaccctcgacaccgaaagtgactga

SEQ ID NO: 180991 - DNA, 1770 bp, Klebsiella oxytoca
atgaccattaccaccgacaccacactcttaaacgacccgcgacgccaggcggctttgctgtactggcaggggttttccgtgccgcagattgccgaaatgttgcagaccaaacgcccgacggtgcagagctggaaacagcgcgaccagtgggacgaaacggcaccgctgaaccgggtcgaaagcaccttagaggcccggctgattcagctctacgcaaagcccaacctcacaccccacgatttcaaggtggcggattttctggcccggcagatggagcgctttgcacgcattaatcgctatggccagacaggaaacgaggttgaccttaatcccaacgtggccaaccgcaacaaaggcgaccgcaaaaagccgacaaagaactttttcagcgacgaggctatcgagaaactggaagagattttctttgcagagtctttcgagtatcagctccgctggcaccgcgccgggcttgagcaccgcattcgcgacattctgaaatcgcgccagattggggcgacgttctacttttcacgcgaggcgctgctgcatgcgctgaaaaccggccataaccagatttttctgtcagcgagtaaaacgcaggcgtatgtattccgcgagtacatcatccagtttgcgcgcctggtcgatgtcgacctgaccggcgacccgattgtcatcggcaacaacggcgcaaagctgatttttctcggcaccaactcaaacaccgcgcagagccataacggcgacctgtatgtcgatgagatattctggatccccaacttccagaaactgcgcaaagtgtcgtcgggcatggcctcacaaagccacctgcgcagcacctatttttcgacgccttccaccctggcgcacggcgcttacccgttctggtcgggagagttgttcaaccgtggccgcgcccgtcccagcgagcgggtcgacatcgatatcagtcatgacgcgctcgccgctggcgtggcgtgtcctgatggtcagtggcggcagattgtcaccattgaggatgcgctcgccgggggctgtacgctgttcaaccttgagcagctacagcgcgaaaacagtgtcgacgacttccgcaatctgttcatgtgcgagttcgttgacgacaaggcgtcggtgttcccgttcgaggatttgcaacgctgcatggtcgacagcctggaagagtgggaggacttcgcaccgttcgccgacaacccgttcggctcccgcccggtgtgggtgggatacgacccgtctcacagtggcgacagcgccgggtgtgtggtgctcgcgccgccggttgtcgccggtggcaagttccgcattctggagcgccaccagtggaaagggatggactttgcgacgcaggccgaatccattcgccagctcaccgaaaaatacaacgtcgagtacatcggtatcgatgcgaccggcctcggtattggcgtcttccagctggttcgctcgttttatcccgccgcccgcgatatccgctacacgccggaaatgaaaaccgcgatggtgctgaaagcaaaagacgtgattcgccgcggctgtctcgaatacgacgtcagcgccaccgacatcaccacctcgtttatggctatccgcaagaccatgaccagcagcgggcgcagtgccacctatgaggccagccgcaccgaggaggccagtcatgcggacgtcgcctgggcgaccatgcacgcgctgttaaacgaaccgctcaccgctggcagcggccaggcgacatcttccattctggagttcaactga

SEQ ID NO: 180992 - DNA, 855 bp, Klebsiella oxytoca
atggcaaaaaaagtttcaaaatggtttcgcatcggcgtcgaaggcgatacctgtgacggccgcgttatcagcgcgacggatattcaggaaatggccgagacctttgacccccgcgtctacggttgccgcattaacctcgaacacctgaaaggcatcctgccggatggcccgttcagccgttacggcgatgtggttgagctgaagtctgaaaagattgacgacgattcggtactgaaaggcaagctggcgctgttcgccaaaatcaccccgaccgatgacctgatcgcaatgaataaaaaattgcagaaggtctacacctcaatggaaattcagccgaatttcgccaataccggcaaatgctacctggtcggcctggcggtgaccgatgacccggccagcctcggcaccgaatacctcgaattttgccggggtgccaaatttaaccccctcaaccgcttcaaagccgagccgggcaacctgatttccgtcgccaccctcgccgagctggagtttgaagaccaggcggaaaatgtctttaccgccctgagcgacaaagtgaaagcgatcttcagccgcaaacaggccagcgatgacgcccgttttcaggatgtgcatgaggccgtgacgaccgtcagtgagcatgtgcaggaaaacctcactgccactgaacagcgtcttgccacgctggaaaatgcctttgcgacgctgaaacaggacgtcaccacgaaggccgaccagaccagccaggcattcagccagttaaaaacgtcgctggatacgaccgaaagcaccacgcagccacgccgcaagctctccactggtggcggtggcgacgagctgctgaccgactgctaa

SEQ ID NO: 180993 - DNA, 1059 bp, Klebsiella oxytoca
atgcgtcaggaaacccgttttaaattcaatgcctacctgtcccgcgttgccgagctgaacggcatcgacccggccgacgtgagtaaaaaattcaacgtcgagccgtccgtcacgcaaaccatgatgaacaccgtgcagatgtcatctgcctttttgcagaaaattaatatcgtgccggtggatgagctgaagggtgaaaaaattggcgttggcgtcaatggcaccatcgccagcaccacggacaccaacagcggcaaggagcgtaaaaccgccgactttaccgcgctggagtccaaaaaatacgagtgcgatcaggtcaactttgacttccacttcaaatataaaaagctggatttgtgggcgcgcttccaggacttccagcgccgtattcgcgatgccatcatccagcggcaggcgctcgatttcatcatggccgggttcaacggcgttgagcgcgccgaaacttctgaccgtgccactcacccgatgttgcaggatgtcgccgtcggctggccgcagaaataccgcaatgaagcggcgacccgcgtgatgagcaaaatcgtcgacgaggaagggaacgtcgtttccgccgtgatccgtgtgggtaaaaacggcgattacgttaacctcgatgcgctggtcatggatgccaccgacaacctgattgacgagatttatcaggaagattcggagctcgtcgcgattgtgggccgtaagctgctggccgacaaatatttcccgatcgtcaacaaagaccagccgaacagcgaagcgctcgcggctgacatcatcatcagccagaaacgcatcggcaatctgcccgccgtccgtgtgccgtacttcccggcgaacgcgattatggtgacgcgtctcgataacctgtccatctatttcatggatgaaagtcaccgccgctccatcatcgaaaacccgaaactcgaccaggtggaaaactacgaatcgatgaacatcgattacgtggtcgaaacctacgccgccgggtgcttcattgaaaatatcaagctgggcgatttctctgccgcgcaaccggagggctaa

SEQ ID NO: 180994 - DNA, 744 bp, Klebsiella oxytoca
atgacgagccccgcacagcgtcacatgatgcgggtctcggccattgaaaccgcgcagcgggaaaacaacccgctgcggcatgccactgcctacgagcagatgctggttaagctggccgcagaccaacgcacgttaaaagccatctttggtaaagagctgaaagcaacgaaaaagcgcgagctgctgccgttctatctgccgtgggtcagtggcgtgctggaacagggcaaaggcgcgcaggatgacatcgtgatgaccgtcatgctgtggcgtctcgatgtcggcgatatcggcggcgcgatggatattgcccggtacgcgtttaagtacggtctgaccatgcctggtaaacaccgccgcccgccgcagtacatgtttaccgaagaggtggcgctcgccgccatgcgcgcccatgccgccggggaaccggtcgtcatcagccagctgctcgacacgctggcgctgaccgccgctgcggatatgcccgacgaggtgcgcgcaaagctgcacaagatcaccggccaggtgttgcgggataacaaacagcccgccgacgcgctggcccacctcaagcgagcgatgcagctcgattgtcaggcaggcgttaaaaaagacattgaacggcttgagcgtgagctgaagccaaaaccggcaacggtcgttaaagccccgttaagagcgccgcgcgccgtgaaaaccacggcaccggctaaacgtggccgaccgaaaaagaaccccggttaa

SEQ ID NO: 180995 - DNA, 507 bp, Klebsiella oxytoca
atgacgacgctgattattaaaaagaacgatgagccgcagccggatggcgtggtggtcatcccaccgcctgccagcgatgagccggtgataaaaaatacgtttttctttcctgatatcgacccgaaacgcgtgcgtgaagggatgcgccttgagcagaccgtcgccccggcccggctgcgtgaggccatcaaaaccggcatcgccgaaaccaatgccgagctgtttttgtggcgggaacagcagattgccggggggtttagcaagctggccgacgtgccgtctgacgatctcgacggcgagagcgtgcgcgttttctattacctgcgcgccgttacctcaatggcgaccgccacgctctatgagcgttatcgcggtgtggatgccagcgccaaaggcgacaagaaagccgacagcatcgataccactgtcgacgaactgtggcgggacatgcgctgggccgtatcacgcgtccaggacaagccccgctgcatcgtgagccaaatctga

SEQ ID NO: 180996 - DNA, 204 bp, Klebsiella oxytoca
atgcaggccatcgcacaacagggcgacacgctcgacatgatttgcgcccggtattacgggcgtactgagggggtattcgagtcggtgctcgccgcaaatccggggctggccgagctcggcgcagtgctgccacatggcacggtggtcgagctgcccgacgtccagtcatcccccgtaactgaaacaattaatctgtgggagtaa

SEQ ID NO: 180997 - DNA, 291 bp, Klebsiella oxytoca
atgacggaaggtgaaaaaagcgtcctgtcactgtttttgatcggcgtgctgattgtcgtcgggaaagtgctggccggtggtgagcccattaccgcccggctttttattggtcgcatgctgctgggcggctttgtctcgatggtggccggggtggcacttgtgcagtttccagacctgccgcctgccgccgtgtgcggatttggctcgatgctgggtatcgccggttatcaggcggtggagattgcgattcagcgcaggattaaaaaaggggaaagcgatggcggtcattaa

SEQ ID NO: 180998 - DNA, 498 bp, Klebsiella oxytoca
atggcggtcattaaaacacaccccaacgtcgcggcatttctcgacacgctggcgttttcagagggtacggcgacgcacccgctgacgaaaaacaacgggtacgacgtcatcgtcaccggtatcgatggtaagccggagatttttaccgactatcgcgatcacccgtttgccggtgggcgcccggcgaaggtcttcaatcgtcgcggggaaaaatccacggcatccgggcgttaccagcagctttacctgttctggccgcattacaaaaagcagctcgctttgccggatttcagcccggtatcgcaggacaggctcgccattcagctgattcgcgagcgcggcgcgctggaagatttgcagcaggggcgcatcgagcgcgcgatctcccgctgtcgcaatatctgggcttcattgccgggggccgggtacggtcagcgcgagcacagcctcgacaagctggtcgcagtgtggcgtaaggccggaggcgtatccgcatga

SEQ ID NO: 180999 - DNA, 432 bp, Klebsiella oxytoca
atgaaaatagtcattatcctgctggcgctggcctgcgcgggtctgctgtggatgcgacacgataacagcaatttgcgggcctcatttgaacgtgcgaaccgggtcgccggtacgcagaaaaacacgatcaccatgctgaaaaatcagctcaacgttgccgcagagcagtcccagcgtaaagagctggcgcaggtcgctatgagggacaagctcactgcggctaacctgctggctttcaggcgtgaacaaaccatcacgaggttactcaatgaaaatgacgcgtttcgccgctggtatcgcgctgatttacctgatgctgtgcgccggttgcaccagcgcgccgcctgcaccaacgccgccgccggtgattgtttacaacgcctgcccgaaggtcagcccctgcccgatgccgggcagcgacccgctgactaa

SEQ ID NO: 181000 - DNA, 468 bp, Klebsiella oxytoca
atgaaaaagcccaacagtctgcgaaaagccttaactgatgcggtgccggtactgcgtaccaaccccgatatgctttgccttcgcctggacgatggcaacaatacggcgacgctggcgcgctccctgtcgtttgaaaaacggtacacgcttaacatcgtggtcactgattttaccgacgatattgacctgttgtttgtgccgattatggcctggctacgggtcaatcagccggacatcatgacaaccgacgaggggagaaaaaaaggctttgcctggtacgctgacatcaataacgacagcagcctcgatgtcagcatcagcctgttgctgaccgagcgcacgctggtcaaagaggtcgacggcgcaatgtacgttgagaacatcccggagccgccaccgccggagccggtgacgcgccctgttgagatgtggagtaatggcgaacgggtgagtaaatgggatgaatga

SEQ ID NO: 181001 - DNA, 450 bp, Klebsiella oxytoca
atgaatgacttcaaaccctttgaggacaagctcgccggattgatagcggccctttcccccgccgggcgtcgtcggatgaccgccgatattgcgaagaaactgcgccagcggcaacagcagcgcattaaatcgcaaaaagcgccggacggttcgccatttgccccgcgtaagcgcccgcccgtcagggcaaagcaaggccggattaagcgcgagatgttcgcgaaactgcgtaccagtcgctatatgaaagcaagcggtaacgacagcgcggcggtggtggaatttaccgggaaagtgcagcgcatcgcccgcgtgcatcagctcgggctcaaggataaaccatcaccaaaaagcgccgaagttgaatatccacaacgtcagcttttgggctttaccgaagacgaccggcaacttgtggaaagcgtcattatcgactacctcgccgattaa

SEQ ID NO: 181002 - DNA, 636 bp, Klebsiella oxytoca
atgaatactctcgcatctatccaggaactcgcccgcgcgatacgcaacatgatccgcaccggcatcgtcgtcgaaactgacctcgacgccgggcgctgtcgcgtacagaccggcggcatttataccgactggctccagtggctgacgcaccgggccggacgctcgcgcacctggtgggctccctctgttggtgagcaggtgatgattctggccgtgggcggcgaactcgataccgcctttgtgctgccgggtatttattccgacgacaaccccgcgccgtcggcctcggcggatgcctggcacgttgagtttcccgacggtgccgttatgagttatgagccggaaaccggcgcgctgaccgtcaccggcattaaaaccgccgatgtgaccgcatccgattcggttgccgtcagcgtgccggtggtgctggtcaaagcctcgacccgcgtcaccctcgatacaccggaagtggtctgtaccaacaagctgacgaccggcacgctggaggtgaagcaaggcggcaagatgtctggtgatattgagcacagcggcggctcattctcttctaacggcaaggtgctccacacccatagacaccctggcgacagcggcggacagacgggggaaccactatga

SEQ ID NO: 181003 - DNA, 348 bp, Klebsiella oxytoca
atgacagcgcgttatctcggcatgaaccgcacgaacggtgaaagcatttcagacgttgaccatatcagccagagcatcggggatattctgcgcacgcctgtcggctcccgcgtcatgcgtcgtgaatacggttcgctgttgtcgcagatgattgaccagcctcagaccccggcgcttgagctgcaaattatggcagcgtgctacatggcgatcctgaagtgggaaccgcgcgtcaggctgaccagcatcaccacagcgcggcagtttaacgggcaaatggtcgtcgatgtgacaggccaaatcaccgataccggcgagagcctttctttaactattcctgtgagttga

SEQ ID NO: 181004 - DNA, 909 bp, Klebsiella oxytoca
atggcagttatcgacctgagccagctccccgcgcctgatgtggtggaaacgctggattttgaaaccatcctcgccgagcgcaaagcgacgctgatttcactgtacccggaagatgagcaggaagcggtcgccaggacattgacgctggagtcagagccactggtgaaatatctcgaagagaatgcctaccgcgaggtgattttacgccagcgcattaacgaggcggcgaaagccgggatggtggcctatgccattaaaaacgacctggaccagctcgcggcaaataataacgttgaacgcctggtcatcactccgggtgacaatacgcaaataccgccagtggatgcggtattggaatccgacagtgatttacgccagcgcatcccggcggcatttgagggcatgagtgttgccgggccgaccggtgcctatgagtttcacgccctgagtgctgatggccgcgtagcggatgcctcggcgaacagcccggcaccggcagaagtcactatcgccgtcctgtcgcgggaaggtgacggaacggcatcagacgatttattgcaggtggtcagtaccgcgctgaatgatgagagtgtccgcccggtggctgaccgcctgacggtcgtgtcagctgaaatagtcaactatgcggtcgacgcggcgctgtatgtctacccaggcccggcgaccgagccgattcttgccgctgccaaagcgcagttaaccgcttatatcacagagcagcgccgtctcggtcgggatatccgcatgtctgccctctatgccgcgatgcatgtgcagggggttcagcgtgtcgagctgcgcgagccgagggccgacgtagtgcttgataaaacccaggccgcgtactgcaccgaaaccagcgttgtgatagggggctctgatgaataa

SEQ ID NO: 181005 - DNA, 1161 bp, Klebsiella oxytoca
atgagtaaaaaatttctatccctggtcacaaaacaaggtacggaagccatcgccgccgccattgtaaacgacgaacgggtcgcctttgctgaaatggccgtgggtgacggtaacggtattgtaccggtaccggatgaaaaccagacggcgctgattaatgagcttttccgcacgcagcttaacagtgtgaaaatcgttgatgatgagaaaaatatcattgcggcggaaatgataatgcctccggaagtgggcggttttaccatccgggaggcggcgttatttgatgccgggggtgtctgcctggctgtcgccagcgtgccggaaacctataagccgctgcttgctgaagggtcggggcgttttaccgttctgcgcatctggctgacggtcagcagtacggcgaatattgagctgatagttgacccggggatcgtactggcgacggtagaagatgttattcaggtcgggaacgatgcgaaggattacacggataaccaactgagtgagcacgcgcagtcacgcaatcaccccgatgccacgctgactgaaaagggctttacgaaactcagtaatgatacggacagtgaggacgaggatcgggctgcgacacctgcggcagtcaaagccgcgattgcgcaggcaatccgtgccgcctgggaactggataaccccgtcggtaccacgcggttctttaatcagaatgtgaaccccaatgaacaatggtcatggtcagagtggatttacactggcgaaaataaaacgatccgcatcggcaaagcggacggttcagacgtcggcgcgaccggcggcagcgataccgtcacgctccagcaggccaacctgcccgccgttcagattgatgtgagtggcgaaaccagtgaacaggcggagcagaagataagaacatctgaagacggcgagcacaatcatggtggcgtagccggtaaggatgacccgtgggaaataggcggggatgtgcggcagctctttaacccgaaagaactgggtgtcacggatatgggcgggaagcatgaccatgaagtaattgtacccccgcacaaacactcgaccaccggcaaaaccgccaacctcggcgaaggaaaatcgttcagcgtggtggaagcgcacaccctgcttatgtgctggagccgcgtcgcctga

SEQ ID NO: 181006 - DNA, 1182 bp, Klebsiella oxytoca
atgagcgattttcatcacggcgtccaggttgtcgagattaacgacggcacccgcgtcatttccaccgtatcaacagcgattatcggtatggtctgtacggccagcgatgccgatgccgccaccttcccactcaataagcccgtactgattaccagcgtgcaaagcgccattgcgaaagcgggtacaaaaggcaccctggccgcatccctccaggccatcgccgaccagtcgaaaccggtcattgtcgttgtgcgcgttgccgaaggtaccggcgacgatgccgaggcgcagactatttccaacatcatcggcggcaccgacgaaagcggcaattacaccgggctgaaagcactgctcacggcggaggccgtcaccggcgttaaaccgcgcatcctcggcgtgccgggcctcgattcccttgaggttgcgaccgcgctcgcgccgatttgccagaagctgcgcgcttttggttatatcagcgcctgggattgccagaacatttccgaggcgatgctctatcgcgagaatttcagccagcgtgagctgatggttatctggcccgattttctggcatgggataccacggcgaacgcgaccgaaaccgcctgggcgactgcccgcgcgctgggcctgcgcgccaaaatcgaccaggacaccggctggcataaaaccctgtcaaacgttggcgtgaatggcgtcaccggcatcagcgcgtcggtcttctgggatttgcaggaatccggcaccgatgccgacctgcttaacgaggctggcgtcaccacgctcattcgcaaagacggttttcgattctggggtaaccgctgctgctccgatgacccgttgttcctgtttgagaactacacccgcaccgcgcaggttatcgccgacacaatggccgctggtcatatgtgggctgtcgacaaacccatcaccgccaccctgattcgggacattgttgcgggcatcaatgcgaaatttcgcgagatgaaaacggcgggctatatcgtcgatgcgacctgctggtttgatgaatcggccaacgacgcggcgaccctcaaagccgggaaactgtatatcgattacgactatacgccggttccccctctcgaaaacctgacgctacgccagcgcattaccgataaatacctggcgaatctggtgtcatcggttaacagcaattaa

SEQ ID NO: 181007 - DNA, 516 bp, Klebsiella oxytoca
atggcaatgccgcgcaagctcaaatacctgaacacgtttttagatggcgtcagctatctcggcgttatcgagtccgtcaccctgccaaagctgacccgtaagctggaaaactaccggggcggcgggatgtcaggctcggccccggtcgatttcggcctcgacgatgacgcgctggcgatggagatttccctcggcggcttccctgatgatgcgatttggtcgctttacggtgccgtcggtaccgggacgctactgcgctatgcaggctcttaccagcgggacgataccggcgaaaccgtggcggtggaagttgagacccgtttcaaggtgaaggaagtcgataacggtgagagcaaacagggtgaggataccagcagcaagctctcgctggtctgtacgtactacaagctgaccatgaatggtaaagagctggtagaaatcgacgtcctcaacatgattgagaaggtgaacggcgtcgaccgactcgaccagcaccgccgcaatatcggcctgtaa

SEQ ID NO: 181008 - DNA, 276 bp, Klebsiella oxytoca
atgagcaaagaaaacatcgtcaccctggaaaaccccattaaacgcggcgatcaggtcatcgaaaaaatcaccctgatgaagcccaacgccggaaccctgcgcggtgtcagcctggccgacgttgcgcgttctgaagtggatgccctgattaaagtgctgccgcgtatgaccagcccgtcactcaccgagtcggatgtcgtcatgatggatttacccgatttgatggcgctggcaacaaaggtgatcggttttttgtcgccgaatttggcggattaa

SEQ ID NO: 181009 - DNA, 2439 bp, Klebsiella oxytoca
atgagtaacgacgttaaattgcaggtattactcaaggctgttgaccaggcgacccgcccgtttaaatccatccagacagcgagcaaaacgctgtctggtgatatccgggacactcaaaaatcgctgcgtgaactgaatggccaggcatcccgtattgacgggtttcgcaaggccagcgcgcaactcgccgttaccggtcaggagctgaagaaagcgaagcaggaagccgccgcgctggcgatccagtttaaaaatacggaacagccgacgcgcgcgcaggcgcaggcaatggatgccgcacgtaaaagcgccgccgcgctacagctcaaacacaacagcttgcggcaggccgtacaacgccagcggcaggaactcagccaggcgggaattaatacccgtaccctggcggcagacgagcgccggttaaaaaccagcatcagcgaaacgacggcgcagctcaatcgccagcgtgaagcactggcgcgcgtcagcgcgcaacaggcaaagctcaacgcggttaagcagcgatatcaggccggtaaagagatggccggtaaaatggccggtgcgggtgctgccggggttggtatcgcgacagcgggaacaatggccggggttaagctgatggtgccgggctatgatttctcattaaaaaattctgagttgcaggcagtactcggcgtggcgaaagattccgcagaaatgacggctttgaaaaaacaggcccgacagctcggcgacaatactgccgcctctgctgatgatgccgccagtgcgcagattattatcgcgaaaggtggcggtgatgccgcagctatagcagccatgacgccagtaacattgaatctgtcactttcgaacagaaaaacaatggaggaaaacgcgcagctgctaatggggacaaaagccgcttttcagctctctaatgacgcggccgcgcatattggtgatgttctttcagccacgatgaacaaaaccaccgctgattttcaggggttgagtgactcattaagttaccttgcccctgtggcgaaaaatgccggggtgagtcttgagcaagccgcggcgattactggcacacttcatgataacaacatcagggggtcaatggctggtacgggcggtgctgctgttattacgagattacaggcgccaacaggcaaggcatacgatgccctcaaggagctgggcgtcaaaacctccgatagaaaaggcaatacgcgcccgttatttaccattctgaaagaaatgcaggccagctttgagcggaacaagctcggcactggtcagaaagcagaatacgttaaaacgatattcggcgaggaggcaatgaagtctgccagtgtactgatggcggcggcagccagtggaaagctcgataaactcaccgctacgataaaggcctcagatggtaaaaccgaggagttggtcaaggttatgcaggataacctcggcggtgacttcaaagagtttcagtctgcttatgaggctgtgggtactgacctctacgaccagcaagatagctcgttgcgtcagctcactcagacagcaacgcgatacgtgttaaagctcgatgactggatcaaaaacaacaaggagttagcggaaactattggcatcattgccggtggcgcactggctctgattggcattatcggcggaattggtctcgttgcgtggccggttgtcatggggattaacgccattattgctgccgctggcgtgatgggtaccgtctttactgtcgctggtagtgccattgcaaccgcgctcggtgcgatcacatggccgattgtggccgtcggtgcggcgattgtggccggggcgctgcttatccgtaaatattgggaacccatcagcgcatttttctcaggggtgattgaaggcatcatcagcgcctttgcaccggtcggggaaatgttcgctccactggcccccatttttgacggcctcggcgagaaattgcgcaaagtctggcagtggtttaaagacctgattgcgccagtcaaggccacgcaggagacgctcgatagctgcaaaaatgttggtatcgttttcggtcaggctctggccgatgcactgatgttacctctgaatattttcaataagctgcgcggtggcctcgatgtcattctcgaaaagctcggccttgtgaaaaaggagtcgagcagcattgatgcagaaacatcaaaagcgtcgtcggttggtcagggcggtggctatatcccggcgacaagctcacttggcgggtatcaggcttatcagcctgttacggcacccgtcggtcgtacctacattgaccagagcagcccaacctatcaaatcaacatgccgggtggcgcaccgggcggtcaactcggaaatcagttgcaggatgcgttagaaaaatatgaacgcgacaagcgagccaaagcccgcgccagcatgatgcacgattaa

SEQ ID NO: 181010 - DNA, 480 bp, Klebsiella oxytoca
atgatgcttgcttttggaatgtttgtttttatgcgtcagacgctgccccaccagacgctacaacgcgatgccgaatatcgatggccgtcaaattcacgtgtcgggaaacgagattcgtttcagtttttagggccgggtgaggagaaaatcaccctggccgggacgctttacccggagctcaccggcggaaagctgacgatgacggctatccgcctgatggctgaccaggggcgcgcctggccgttactggatggcaccggcacaatttacggtatgtacgtcatcaataatatcagcgagacaggaagcctgttttttgctgacggaacgccgcgcaaaattgattttacgctgacgctcacccgcgtggatgaatcccttgcggcgctgtatggcgatatcggcgaacaggcaaaatcactgattggcaaggcgggaaatatggcctcgtcagtggctggcatggtggggattagctga

SEQ ID NO: 181011 - DNA, 1158 bp, Klebsiella oxytoca
atgctggatatgctgaatatgaatgcgggtggcgtactgacgcccgattttatgctgatgctcgatagcaaagatattaccggcaacatcagtaatcggttgatgagcctgaccatgacagacaatcgcggattcgaagccgaccagctcgacatcgagcttgatgatgctgacggactggtcgagctgccgttacgcggtgccgtactgacgctttacctcgggtggaaaggctttgcgttgattggtaagggaagttttaccgtcgatgaggttgaacatcatggcgcgccagatacggtgacaatccgcgcccgtagcgccgattttcgggggacgcttaactcacgtcgggaagagtcctggcatgacaagacgctcggcgagatcgtggcagcgatagcgacacgtaacaaactggcgtcgaacgttataccggagctggccggaataaaaattccgcatatcgaccagtcacaggaatcggacgccaaatttttaacacgcctcgccgagcgaaacggcggtgaggtttcggtaaaagcgggaaagttgctgttactcaaagccggtcgtggggttacagccagcggaaaggccattccgcaggtcacgatcacccgcagtgatggcgaccgccatcagttttccattgctgaccgtggggcatataccggcgttacggcaaaatggttgcacaccaaagacccaaaaccacaaaagcaaaaggttgcgttaaaacgcaaacccaaagagcagcatttacgcgcgctacagcaccccaaagccaaaccggtaacgaagaaaaaaacggtgaagacgccggaagccagggagggtgaatacatggtcggtgaggatgacaacgtgtttgccctaacgacaattttttcaaccaaagcgcaggccatgcgagccgcccaggccaaatgggacaaactgcaacgtggggttgctgagttttctatcaggctggcgacggggcgagcagacctttaccctgagatgccggtacaggttgcgggctttaagcgcgtcatagacgagcaatcgtggacaattactaaggttgtgcactctctgagcaataatggattcacgacgagcctagagcttgaggtgaggcttacggatgttgaatacgagtcaaccgaatag

SEQ ID NO: 181012 - DNA, 249 bp, Klebsiella oxytoca
atgcgtgtagaaatcagcattgccaaagagaaagccgggaaaatgccaaaagggtcaatggaggctttgaaagacgaaatgacccgccgaatcagtaaacaatatgacgacgttgaagtgatcgtgaagacggccagcaatgatggactgagcgttttgtgggcgacagataaagaaattgctaaagaatttgtcgagactactcttaaagacgcctgggagacggctgacgactggttcgtgcgttaa

SEQ ID NO: 181013 - DNA, 294 bp, Klebsiella oxytoca
atgaacggatcgtcatcacatgatgtagaatggttgtttaggcagatttttgactaccttacagaaaagcaaggtatacctggttaccagttaagtaaaattgagaaggttgttttggactcattgatcaaggatggcggaatcacttgctatgatgagcttgacgaggagttcgcggctattcaggcggaagtagtcgctgtggaaaatgaccctgggaaaaaagcccttaaagatgtacttctgcgttatgccatgctgctttggtatgactttaaaccttatcgctactaa

SEQ ID NO: 181014 - DNA, 672 bp, Klebsiella oxytoca
atgctaaaaattagtgatgtagaatctacggctctggatggccttttcactgatggaaaaatatcaggtggcatccctcctacaaggttggttgcagcatggttcaatgcaattcaaacagaacttgtaaatgttgtcgaaggggcaggaattgaattagaccccgaaaactcagcgcaggtattagaggccttaaataaattattcactattagcgactatcttaaaaagtcactgaacctcagtgaccttggcgataaatccacggcaagggctaatcttggtctgggtgaatctgctacacgagcggtagggaatacagcgggtacggtggctgcgggggacgattctcgcattactggcgcaatgcagaaaggccaaaacctgaatgatctgcctgataaggttgcggctcgatctaatctcggcctgggcgcaatggctaccagagacaaccctccgtttattgatgaaatcggggcctgtgcactggcctggtacgacggtgcggtgaattataccgacactgtaaacggtggcgctcttttcccgtcaactgccgatggtggtcatgcaaccgtcgcattatccgggacctggcgctgcctggggcaaacagaaaccatcaacgaccagcaccgaacgactttatggcaaaaaatcgcaaactga

SEQ ID NO: 181015 - DNA, 669 bp, Klebsiella oxytoca
atgagcctttactctgttgatgactatgctcgtgccctggtttcattgttgcccaccggccttgcatggccccgtgatgttgaaagtacacagcacgcgacggtcaggtctcttgcacattcattcgcacgttctgacactgagtcattggcgttattatcaggtggctttccttcaacggcactgatgatgctttacgaatgggagcgcacactcggcttgcctgacgattgtgctattggcgaaatggatagcattggtgctcgccagagagctgttgtttcaaagctaatcagtaccggtgggttaaaccgcaattactacatcagtgtcgcggcagcgttagggtacaccatatacatcactcaatttcgacctgcaatgtgtggaatgtcggtgtgtggagatgcgataaatggcgatgaatggcctttcacatggcaaattaacgttcccggaacaacaatcagatacgcatattcaggtagcacttattgtggtgatccactcggttcatggggagataaacaatttgaatgtgcgataacaaaaatcgcaccatcacatataaacattatatttgtttatggctttgaggcggagattaatacgccagaatatcaatctttatttgatgttttgatgaatagtgtatggccggaatattaa

SEQ ID NO: 181016 - DNA, 1149 bp, Klebsiella oxytoca
atgccgtttaaacgaaaaacgctgagtgagctgcgcgaagaaaaccggcagtttatgcaggcggagcttaaaaatgtcggagccttgcttcgcttcggaaacctgaaagtcgtcgcggacatggatgccggcatgtcgcacctgcattatgcctacctggattatattgccctgcaaacgaacccttttacctctaccggtgaatggctggcgggctggatggctcttaaacagatctatcgaaaagcggccacagcctcccggtcaccggtagtaaaggccacgggaactgccggggctgttcttcctgcgggtactgttctgaaccgggccgacggttatcagtatgtcactgattcagggctgaccatatccgccgggaaaagcggaaccactgctgtcacggctgtcttgcccgatatttctgacgacgtaagcggcggcggaagcgcaggaaacgctgatgccggcacattgctgacgctggatgccaatgtgccgggtatcgacaatacgctgacgttgatcgagccagcgacaggcggggcagatatcgaaaaagaggaggatttccgacagcgcgggctgcaggcgtaccagagcccgcctcagggtgggagtgacgccgattataaaaaatgggcgctggaaatttctggcgtaacccgtgcatgggtaaagcggcgcgggatgggggcgggtaccgtcgttatttacattatgtgtgatggcaatgacacgacgaataacggtttcccggtcgggaccgatggggtgtcatcgcttgaagactggggggcgataaaggcgacaggcgatcagggaagggtggcggattatatttaccctctccaggctgataccgcgattatttacgtctgctctccaatagaaaaagttgtcgacttcaccatctccgggatcccggacgcagacagcgatacagtgcaggcaataaaagacgccattaatttgctattttttgacaacggaacgccggatgggtcaggaaaaatttatctctccgatattaatggcgcgatcagtcaggtcgccggtacgacgggatatgtgctggaatcaccctcccagaacatcattttagggacgggtgaactgccattgctgggggaggttgatttcacatga

SEQ ID NO: 181017 - DNA, 450 bp, Klebsiella oxytoca
atgagtgatatttcatcattctggaatgttgatgcgcttcatgctgactggcgtaccgatcccggcgcgctggaaaccggcaacgacctgcaaaccgcaatcatcctcagtctgttcacagatcgccttgcccgccgggacgacgcttatgacggtagtgatcgccgcggctggtggggagactcagacgccgatacgcaactgggtagccggctgtggttgctgcggcgcgaaaaactgacgacgaatgtcgcgataagggcagaagagtacgcaaaagaggctcttgactggctgaaaggcgatggtgtcgtcagtgatatcagctgcacaacacagatcgtcatgccgaacaggctcaacctgattattcgttatctgccgccggctggagactggcaggagagcgcatttttctggatctgggagcaaataaataatgccgtttaa

SEQ ID NO: 181018 - DNA, 579 bp, Klebsiella oxytoca
atgaaccagtttcgacatattgcaaaccgtattgccagcatgctgggcgtggggcgagtcactgcgatgcaggacactggtgggacccagtcagtgcagtaccagaccccgcttgaggtcgccagcgcacatagactggccgagtttggcttttcttccgggcttcccgttggtactgatgtcgtgctggcgttcctgggcggtgatcgttcgaatccggtagtcatcgcgaccaaccatcaggggtaccgccattcagatctgagccccggtgaaacggtaatgtacaaccagtgggggctgtacatccagttgacggaagccggcatcagcatcgatgcaaagggccaggacgtcaccgtcaataacgcaaaaaatctaacggctaccgcgacagaacaggtgaagctcatcacacctaaattgctggtcaccggtgatgttattgataactgtgaaaccaacgacaaaacgctgaaacagttaagggacgcgtataacgaacacgatcatgaagtgaaagaggtcgaacaaggtaacgataccgtaaccagcgagaaaccaggggaacaggtatga

SEQ ID NO: 181019 - DNA, 1077 bp, Klebsiella oxytoca
atgagcgatcaggatgtagtcacgctgacagtcggtgacaaaaaattagagggctgggattcagtccgcgtaacgcgatctgttgagcgcttcccgtctgattttagcctgggtcttctggactattacccgggcacccacgaaaagcagctggtggtggagggggcgccctgtgaggttcatttcggtgaggacccggtgataacgggttatgttgacagctgggaacccgcgataacacgagcccggcatgaggtacaggcgaacggccgcagcaaatgtcaggatttggtggactgttctgccgagtggccgaacaacgttatcaaccggagtgatgcgctgaatatcgcttcccggctggcctcgtggtacggcatcaaagtgtcatgcgatgttgacgatctggtcgacgttcctcagttcacgattaactggggcgaatctccacaggagatcatcgagcgagtatcccggtggtctgcgctgctctattacgatttgcccgacggaaacctgctgcttacgcgcacaggaacacgacgggcggccagtggagtggcggaaggcgagaacgtcgagcaggcgtactaccgcgccgatatgtcggaacgattctctgactatgttggggtctcgatgagcgtttcgccgatcgccgggttttctccggatacggcctatgactcggtaacgctggccaccgcccgtgatcctgaagcggccggtatgcgataccgcaaacgcatcgttatcgttgaaagcacgctgatggcgtcgcagcaggcgcagcgcgccatcgactgggagatgaaccgccgttatggccgctcgaagcagttaagcgtcacggtagacaactggcgggataaggccgggaaattgtgggagccaaatacgctgatcccggtgaatctccccacgctcaggctaccggatactgaattgctgatagccgaagtcacttttatgcgggacagcgatggtacgcatgcccggttgacgctgatgccaccagaggcgtttgcagtgcaaccctatgcgttttaccagcagatagcaggattcagccaatga

SEQ ID NO: 181020 - DNA, 1401 bp, Klebsiella oxytoca
atgccgattattcaggatgcgatttcttcactgatgggcggcgataccagtgatgactggcagagcaaactgcaaccctccagtttccggggtgtcccgtttgccgttgttgctgaggaaggtagtcacggtcgccgccaggctgtgcacgaatatccttatcgtgacactgcctggatagaggatatggggcgtggtgtccggcggattgttattcgtggcttcctcattcaggacagccagatgtatggcggcggtgatgttatcacccagcgtcaggagctcatcaccgcatgtgaggagaagggaacaggtacgttgattcacccgaccctgggtgaaatgacggtggccataccggaaaacgggcttcggctttccggctctgcagatgctggccgtgtttttgaattcacgttgatggcgatcgagtcagggctaaaggtttttgctgtcaccggcagcagtgcggcaggaaaatctgttcgcacaaattacctgaagttggtcagcaccaccgtattaagcaccatcgcacggattaaaggtgaaatccggggcgtgacgcaggcgataaaaaccatcaggaacacgatcgctttctggacaaacatggtggacagcaccaccaatgaagtgacgaatgtcagcaacgttctcaaatcaacgtttggtaatcagcgctacgggcgctatagcaaggggaaggtggggggcagctcatcaggtgtaaacggtagcatttctgccgatgacaccgatgattttgaatcactttccgcgcaggtatctgccagcgccatcatggaccgtcaggggatttttgataccgtcaccggcctgaatagctctgccacggttgatgagtttgtgcaacgtaccgctgacgttatcaacgcgatcctcaactgcaccggcggtgtgaatgagcggataactgcgctggaaaagttagccaacgccaccagttcagaatatcagcagtcgtcagcaggcgcggatatagcggaaagtgtcaatgtcctgattattgttttgtgctgcggcgcaatggcggcagcggccgctgaatcaaacccgacgagtcgcaacgaggcggagcagataacccgccgggtgtcggatcaactggatgccgctctgctggcgacaggcgaccgcgccgacgatgaactctacagttcattgttgctggtcaggtcgtcatttcttgacaccatgtcgtcgctttcagccagtttaagcgagctcatgcagttcaattccgcgcaaccactccccgcgctgacgatggccaaccggttatatcaggatgtcggacgcgctgatgagctgattcaggaatcagacataccacacccggcgtttatgcctgtttcgatgagggtgttacgacaatga

SEQ ID NO: 181021 - DNA, 567 bp, Klebsiella oxytoca
atgaagaaatctctttgctcattgatcgcagtggctatagggctcatacccccggccttgcatgcaactgactatacagacagggcaatgaaagcctttaagatcggcgattggaatattgttgagttcgcggcagacaagcagattatttataaagtggcgacagaggcgctcaatcaaaatctcaaggagacatacttaagtttttatctgacaacttctgaaaaatgtaaaccctccttggctgagatgagcatgcttatggggggatatagtgaaaacctcgcaaatggccatgtgcctctttcttataaaatcccagggcaaaaagaggatactgaagcggtagaaactaagatgcttcaaggtgaagaattcgcattctttaaattcaagaagttgtccttaaataaattagtgaattcaggaagtcgagggaatctcgctatctgggttccagcaagcggcaatggggaagtgcgcggttcatccaatatgtacttttcccttaatgggctaagtcaggcgtactctgcggccaaaagtctttgtagtgataacctgtag

SEQ ID NO: 181022 - DNA, 1791 bp, Klebsiella oxytoca
atgagtaatgcattcgatttcgagctgattgcggacgacagggtcagcgccaccattgatgaaatcaacgaggccattaaaaacctgctccctcacctggatgagacgcaggaaaagcttaatctcggcggtgatgagacggttgatagtctggatgatgtcggcggtcggctggataaaatggcccgtagtgcacgggataacgtccagttcatcggagatatcattcctccactgaagatcgtcggtgagctggcaggtaaaatggctacctttggcgcggccggcgttgtcggatacggtataaaaaaggttgccgacggtttcagggacgcggcaaaagaggcttacaacctcgatacccacgcgcagaacaccgctatgagcgtccgggactttacgcaactggcaggcgcgatgcgtattcttggggcggacagtgaaagtgcagcctcatcaattgagggtattttcaaagcatttaatgaggcagccagcggtaagaatgcaggtgttatggccgcaatggcacaaattggtgcgcagatcgaaaagaacagtgacggctcagtaaataccctcaaaacactggagtcgattgctaaaattttcccgaccctgcgacctgaccagcaaaaatccgttgctgacgggctggggctgacgccagaacttctgacactgatgcgtgaaggcgcgaattataaaaaactcctggcgaaagcagatgagtttggcctgaccgttgatcccgggctgaataaacagctttcagatgtcaacgtgacgatgagtgaactgggggccgcttgggatggcttaatcaacaaggcagaaaaaaaagttctgaaatttgtcatgtccgatggttccgttaagaacggactggaaggcgttactgatttgctcaccaatggtgattttactgctctgtctcacgctgtgggctttattaataccgatgaggctgaaaagctacgccgcatccagggcaataaagacctttataataaactgagtcgtagtgaacgtggggcggtcgatgccgggtttatgaccgatgccgtccgtaaacgctatgatgcagaatatggggcgacggatgcggcagagcgtttgcgtggtgatatgtcggtgattacgccgcaaaaggtgcccggtaatgaaaggataccttatcgccataacgacaataccagccagtatgatgatctactcagtgaggccggtagcaagtacggcgttgatcctcgtctgttgaaagccataatgaagcaggaatctgcaggcgacccatatgctattagtcgagctggagctcgtgggcttatgcagattatgccctcgaattttaagtctacaggcattacagactggaccgatcctcggcagaacatttttgcaggcgcgcagattatggcggaaaatatgcggaatgcgggtggaaacatcccgttagcgttacgctattacaatggcggctatgatcgtagtcgctgggggcgggagaacgccgcgtatcctggtgcggttttagggtattaccaggacattatcagcggcgatacaggtgggaacccatcaggcattaatcaggagaggcctggcagcattgttcagcccacatcgggtgcgggttctgtatccgtaaacgatataaccaaatcgttcaaaagcgctatggaagataacaagcttaaactcgaaataacgacggttaatgaaaaaggggatcggaaagtgtttgaaactcagagcggaggtcggataaccttacccatgaattactaa

SEQ ID NO: 181023 - DNA, 279 bp, Klebsiella oxytoca
atggctgaattagaacgtacgaagaccattattctgaccgtccccctggacgatgccgcacaaaaaatacgctatgagcagctggatctgaaggcccccacactgactcaggttgagaagttctacgaaaaacaggagtcctccacttcgattgctgcaatgcgcttgctgatcgccctggtgacagatacccgggaaagcatactggcaccgatggattatgtggatttttgcaaatgtaaggagtatctgctcggttttttgaactggaagccctga

SEQ ID NO: 181024 - DNA, 369 bp, Klebsiella oxytoca
atggctgatacctcaaaccgcctggccggtaccgcctacgtcaccgtggacggtgtttcagtcatggtggaaggttcctttaaataccagccgtccaccgttaaccgctcgacgctgacgggtatggatggtgtgcatggttataaggaaaaaccggttgccgggtacatttcagctcgcctgcgtgacagcggcggcaccagtgttcgggattttaacgggcagaccaacgttaacgtgatcgccgaactggcgaacgggaaaacgattattggtcgcgcgctctggacggttaacgttcaggaagtggaaagcgaagacgcggtgttcgatgtccgctgggaaggccgcgaagtgacggagaattaa

SEQ ID NO: 181025 - DNA, 1518 bp, Klebsiella oxytoca
atgaccgttccgttttctcgcgtacccggtaacctccggacgccgttgttttacgtcgagttcgacaactccatggccaatacggcgacggcgacgcaacgaaccttgctgattggacagatgctggccgctggttcgacgcaggtcaatatccccgtcaaagtctcctcgccgaatggcgtgggagagctgaccggtaaggggtcacaactgcatggcatgatgactgcctatcagaagaatgacacggccgctgaaatctggatcttgccgctggcggacaactccgggtcaatggtggccgcgaaggggagtatcaaggttgcgtcacaggcgtctgagacgggcgtaatctctctctacctcgccgggacccgcgtgcagctcaccgtgctggcaaccgatacgccggcgcaaatcgctacggcactggtcgccgccatcgccaaaaaaactgacctcccggttacagcagctgttaaatcagacgcgaccgatacggtcgagatgacggctaaaaatgcggggcttctgggtaacgggattgatattcgtctcaactatctgggaacgcagggcggggaatcgacgcctgcaggtctcaccctgaccattacctcaatggcaggcggcgccggcgcgccggattttgtggatgcactcggaaatctgcaggataaaacgttcgatttcatcatcaacccgtacgacgatacggcctctcttgatgccatgaaggcgtttctgaacgatgcttccggccgctgggcgtgggataaacagctgtacgggcatgctttcggcacgacgtcgggaacttatgctgaactgggcacaaaaggcgaggccagaaataaccagcatgaaacgctgctgggcgtgtatcgctctccgacgcctcgttatatctggtctgccgcgctgaccggcgccattgccccgagcctgcgtaatgatccgggccgcccgctgcagagcctgccggtttatggcgtgctggcgccagatctgcaggaccgctttgaactaaccgagcgtaacaacctgctgtacagcggcatttcaacgtataccgtcgccgacgacggaacggtcaacgtggaaaacatcatcaccacctaccagaaaaacagttacggtgatgaagacgacagctatctgcaggtggaaacgttgttcagcctgatgtttgtgacccgctatctccgcacagcggtgaccagcaagttcgggcgcatgaaactggctgctgacgggacccgttttgcaccgggtcagcccattgtgacgcccaacatcatcaaagctgaccagatcgctgaataccagacgctggtgtttaacggttacgcccaggatgctgacgcgttcgcgaaaaacattatcgttgaacaaaacgcctcaaatcctaaccgcgttgacgtgctgtggccgggaacgctcatcaatcagctgcgtatttttgcgctgcttaaccagttccgcctgcaggcgcagtcaacagatacaggagcataa

SEQ ID NO: 181026 - DNA, 180 bp, Klebsiella oxytoca
atgtttgtaaaaccaaaggacgggctcagtgttcgctgccccgtcaggggcgaacctttgcccgcagatggcgcagaggtgcctgataatacgttctggcgccgtcggttgaaggatggcgacgtcagcctggtgctggaaaaaggtgtgaagagcaccgctaaaaaagaggacgcttaa

SEQ ID NO: 181027 - DNA, 546 bp, Klebsiella oxytoca
atgaatgcatcagctattcgcaaaatggtggtggcggcgttgtccggtcacaccgatgccggcgaccgcgtttattcgccgcgggactggccaacctcggcaacgctctatccggcgctgctggtccagacaccgtttgatcataaaaaggcgcaggggcggaatacgccggcgtttactacggtgaccaccgttcgcatcactggccgcgtccaggaatatgacggggaaaccgatgatgacggcgccatgcgggccgaggaggctctggaggatctgcgcgagcaggtggaaaggacggtcatcaacagctacgagctcacccgaaaaatccagaagtacgcggaaatccgttcgacgattaacgttgacggcgagggggaagcccatctgggccagctgctgttcgaaatcgatatcgaacattatcaggggccggaagatttctatcccatcaacccgccacctctggaggggatcgatatcgctgtcaaaatgccggatggcacaccgcgcccgggcgtcagtattaacctgcaggagtaa

SEQ ID NO: 181028 - DNA, 360 bp, Klebsiella oxytoca
atgggagtggactgggatttacaccttttaagtccgctacatggcgtcttcggcgatgaacacgagtaccgtcccaaagacggtgctcccttcacgattaacggcatttttgaccgtgggtatgcccaggccgctgaaaaccttgatggcgactcagtgattaacacgtccagcccgatgctcggtgtgcgtgatgccgagttccgccagttgggtaaacctcagcctgaagtatcggaccgggtgtttattaaaaccgtcggcggccacgtcattaatcagttatttgtggtgtccaatgtcgagcctgacagtcatggcggatcccgccttgttctcaatgtggtgaaagcacgatga

SEQ ID NO: 181029 - DNA, 369 bp, Klebsiella oxytoca
atggctaaaacaaccaaaaccgggtcggtggatgacctgaatgcggaaggcaccgccgaagaaggtctgagcgttgatgatctgaatgcaggcggcatcgtccacgataaccaacagcctgacgaaactgacggtgattcaacagatgatgcggatggcgatgaagatgaaaccgcagcccctgaatacgtagttctgaaggggaactgcattcgccatgacggcgagatttaccgcgaaaatctgcgtattccggtctccggtaaggacgcagaacgtctgctggctgcaggtgtgatcgccgatgttcaggttcttcggcaacgagcgttatctgctgcgcgtggcgtgaaaattactacggagtaa

SEQ ID NO: 181030 - DNA, 1050 bp, Klebsiella oxytoca
atggaaaatatttttgataccagcgtgctggtacaggtcgttcctaacctgaaaaccagtcagaactggctgctcgatcgcttctttcccaatgtcgtgacttacgagaccgaagaggtggcgattgatgttgatgtcggcctgcgtcgtatggcgccgtttgtctctccgctggtggagggcaaactggtcgagtcccgtaaataccagaccaatacgttcaaacctgcgtacatcaaagacaagcgcgcccctgatctgcgtaaacccattcgtcgccagatcggcgagcgaattggtggtgaatacaccgccgccgaacgtgaaatgctgaatctgcagtttgaaatgactgaccaaatcgacatgatcaaccgtcgtctggagtggatggcagccagcgcgctggtgtccggcaccgtcacggttaccggggaaggctatgaaaccaaagtggtggatttcggtcgtgcttccgacctgactatcaccctgagcggttcggataaatggccgctgaccgttgccgccggcgcgaccaatacccaaccttctgatgatatcgaagtctggcagaccactttcctgaaagagtccggttctgtcgccactgacctggtcttcacgaataagtcgtggcgtgcattccgactcgataccaccattaaggataacgccatcaccttcccggcgctgagcccgtttggtaaccagattaatgcgggtccgcaggtgatgaagggggctatctataaaggccgctggggtaactttgacctctggttgtataacgactggtttattgacccgcttgataacgtcgagaaaccgatgatccctgatggtgctgtcatcatgagcggcgcggacctgatgggcacccgcgcctttggtgtgattctggacccagcattcaactatggcccgctggcttatgcgcccaagtcctgggtgaaagaggatccggcacaacgccttatcctgatgcaatcctccccgctggttattccgagccgggtaaacgcatccctctgcgcaacggtggtctga

SEQ ID NO: 181031 - DNA, 405 bp, Klebsiella oxytoca
atggatcagtttggtcagaatcagttcgccccgggtatggaaagttcgttgtttttacccgaccagctcatcgccgggacgcttcagcttgttacggacaccggcattattaccggtggtacctataaacgtggaaccgtactggggatggtcaccgccagtgggaagtataaactgagtgtgaagacggcaaccgatggtagcgaaaccccggtggcgattctggttgataatgttgatgcgtcaactgcagatcagaacggcggcctgtatctgatgggcgaattcaaccagaaccacattatctttgataactcctgggcgattccggcgctgaaaacagcacttcgcccgctggctattttcctgaaagacagcactcaggcccctgtagccacttcctga

SEQ ID NO: 181032 - DNA, 585 bp, Klebsiella oxytoca
atggcaaagaaaccgtttagttttgctcaccttctcggacgtggcgcatcggcatccgaagaggaagaagataaaaagtccaaaaaggaaaaggctcgtcgcgctgaagaagacgagcgtgatgatgacgcggacgacgaagagcgtgatgacgacgctgaagaagacgaacgcgatgatgacgcggaagacgatggtgacgatccggatgcttccgaagaagacgattctgacgatgatggcgatgacgaccgcaaagaaagcaaagcggttaaaagcgcccgtattgctgagcgtaaacgttgcgctactatctttcgtagcaagcatgcggcggcaaacccatcactggccgcttcgctggcattcaacaccgggatgagttcttccgctgctatcgatgttctggtatccactgcgccagcctcgcaaccacaggggacgcgtaagcgcactctcgatcagcgcatgcaggaaagccaggatgtacggcttgggcaggatggtgaaaacaaagccagcggtaaatcgacactggtgaacaaaatgaccagtctctacaactccacgaaaggggaaaaataa

SEQ ID NO: 181033 - DNA, 870 bp, Klebsiella oxytoca
gtgaatctaccccatctggcccaacggctgtttaatacgccgctggcccttcaccctaacaaagccgaggtcatcatggccgcagtcatggatcggttcggtatcagtaaaatcgaatcctctctggcgatggaggatgacgactggtacggctacgacgacaaacgtggccgggagtcaaagcgcgaccccggatatgacaatgtggccggagtcgctgttatccccgtctgcggtacgctggttcaaaaactgggaagtctgcgaccctatagcggcatgacaggttatgacggcattcgccagtcatttctgaccgcgctggccgacccggaagttaacggcatctgcctggatattgattcgcccggcggtgaagtggccgggtgctttgatctcgtggatgaaatctacaatgcccggggcacgaaacccatccatgccattctgaccgaaaatgcgtattccgcagcgtatgcgattgccagcgcggctgaccgtatttccgttcccagaaccggcggcgtgggttcagtcggcgtcatcacgatgcacctggactggacgcagcgaattaaagacgacggtctgaaagtgacgatcattaccttcggaagtcgtaaagcagaaggctcgccattacgtgaactctctgaagaagcgttcaatgctatccagcaggatattaacgcgatgggggaattatttgtgaataccgtcgccagaaatcgcgggatcagcgcgaaggtgattaaaagtacgcaggctgcctgttttatggctgctgatggtgtggaacttggactagctgatgaggtatgtcctcctgatgctgcgttcagacatttacttgaaaaaacaggagcctga

SEQ ID NO: 181034 - DNA, 1638 bp, Klebsiella oxytoca
atgaataaagtgcaaatacttggcccggatggtaccccgtatcgcgcacagcggcccagcatgctgacgggcggcagccgggtaccttatgacgccgccgattcgtttagtgatcagttggcaaactggcagcctgctctatggtcgcctgacaacgaaatcaacatttatcgcgatcgcattgtttcgcgtgcccgtgacctggtccgtaacgacgggtgggcgaatggcgccgttacccgccttctggataacgccgtcggtgccaatttcaggcccatcatgaaacctgattaccgtgtgttgcgtatggtcaccggtaacaaagccttcgattcgacatgggcggaagagtatggcaaggcgcttgaagcgcactggcgaacctgggcgtatgacaccgggcggtactgcgatgttgaacgcaagctgactgtgcctcagatgttgcgcctggcttttcgccacaaacttattgacggggatgcgttgatggtcctccagtaccggcctgacaggttagggcgggggaagggacggtatgcgaccacggttcaggttgtcgatcctgacaggctgagtaacccgcagcagaattttgacatgccgaatattcgcggcggcgttgaaattgatgaagatggcgcgccggttgcttatcacatccgtgaggcgcatatcggcgactggtggagcggtgccaaaactatgacatggcgacgtataccccgtgaaacctcctgggggcgtccgcatgtcgtccatgatttcgaccatgagcggggtgctcaacaccgcggcaatggcatcctgacgccggtcattcagcgtctgaaaatgctggtgaaatatgaccagagcgagctggaggccgctattctgaacgccattttcgctgcctacattgagtcaccgtacgattccgaaatggttcaggctgcgatgggggaaagcttcgatgacaccagtctgggagcctatcaggacggccgcgtggaatttcacaatgaccgccgactgaccctgcaaaatggcgccaggatgccgattctttaccctggtgaaaaaatcacaacggttaatgccgcccgcccttacagcaactttgaggtgttcgaatcggctgtgctgcgtaatttctcgtccggcacagggctttccccgcaacaggtcactcaggactggtcagatgttaactacagctccgcgcgatcttcattgcttgaagcctggaagacactgacccgacgtcgtgatgatttttcaatggggaccgcgcagcctgtcctgactgcgtttgcagaagaagttcatgataacgagaacctgcctctgccgtcgggtgcgcctgactttgtagaggcccgcgccgcctattcccgcgctcgctggatggggcctggccgcggctgggtggatccggttgcagagaaaaaaggcgccattcttggtctggatgcggggctttccacactcgaaattgaagtgggggaaaacgtcggcgaggactgggaagaggtgcttgaccaacggcaactggaaattgagtcctgcctgaaacgcgggcttccattacccagttgggcgcaggctgatcagttcgccagcgagacaattaaagatccggaggaaaagtga

SEQ ID NO: 181035 - DNA, 264 bp, Klebsiella oxytoca
atgttcaaccggaataccagtctgctggctggctcgatgactgatgagcagctcagggacgccctgcagaaagctcagcaggcatacattgatttaacaaccgggagtcgcggtgtttcattttcctattcgcagggagacgggacacggtcggtgtcttatcagcaaagttctctggctgatctgctggcgctcattcagttactgcaggcgcaactggggatcgtcgcgagaccacgtaagccagtgaggtttcgattctga

SEQ ID NO: 181036 - DNA, 2124 bp, Klebsiella oxytoca
atgtccacaaacatatctcagtcctcggagaaccagaatttaacccagcagaagactgagcgacttcagctaagtatccgaaaagggtggacaccgccgccgcggatcagcgtcccgcaatgggcggatgactaccggaagctggcgaaggaagccgggagcacgtcagggaactgggagacctcgaccgtagaaattgcccgcggtccgatgctggcggcgactgaatccggcgtgcatatcgtcacagtgatgtgctgcacgcagctgatgaaaacggcgctgctggaaaacctgttcggctattttgcacatctcgatccatgcccgattcttctcctgcagccgaaagaagaggcggcagaacagttttcaaaagagcgtatcagcccgctggtgcgcgtaacgccggtactacggaaaattatcggcgactctaaacagaaaagttcgaaagaaacgatcctctacaaagcctttaccggtggatttctggcgctggctggcgccggtagccccgacaacctggcgcgccgacctatccgtgtcctgctggcggatgaggtggataaatacccgattacccgcgagggggatccgatcaccctggcggaggaacgaactgcaacgtttggcctgacctggctttccgtccgcgcctgttcgccgaccgttgaggacgaaagccggattgctgatagctatgccgaatctgatcagcgccgggcatctgttgtttgtccgcactgcgggcatcggcagtttctggattttttcaaacacgttcagtggccgaaagagggtgataaacatctgacaaaatcagccatgatccactgtgagtgctgcggtgcaggatggtctgaaggcgagcgcctccgggcgttacaaaccattcgatggcatcagacccggccgtttgagtgttgcggttctcgccattccccgttgcttgagtacgaacaggcctggcgggcgaatgatgaaaatagcgtggctgctgtctggaaatggtccgaatcaccgcgacatgcggtctaccgggctatttgtccggattgcggcaaggaggctgtcgataaccatcacgccggctatcaggcttcaaaactgttcagcccctggcagaaagataaaccgtcggatatcgcgggaaaatatatcaaggcgaagggggatccggataaagagcaggcctggtggaacacgcaaatggggttgccacacagacccaaccatggcaagcagttgccggttgatattctgctggcgcgtcgcgaagtcttcccggccatcgttcctgatggcgtggcgttgttaactgcaggcgttgatacgcaggatgaccgcttcgaaatcaccatcaccgggtggggccgcgatgaggaatcctggtcggtttctcacgatgttatctatggcgatctggaaacggatgaaccatggaagcgtctcgatgcgtacctgaagcaaatctggcgccggggtgacggtcgaggcctgaacatcatggcgacatgcatggactccggcgggcaccatacccagaaagtctacgagtttgccaaagagcgcctgggtcgtcgtgtatgggcgatcaaaggtgagtctgctcaaagtggcaggcgtaacccggtctggccgacaaagcgcccttcgtcgaaaagcaaagccagtttccgtccgataatcattggtgtgaactctgccaaggatgtggtgcgcggaagactacatctggaacctcccgagctaggaaagcctgctgcaggttacatgcattttcctgatgatcgtgacctgggttatttcaatcagctgcttgcggagcgactggtttacaaagtcactgcaggccaacgttacagcgtctgggagcagatccccggaagggctaacgaggcgctggataccctggtttacagctacgccgcactgtgtggcctcaagcatatgggattaaagctcaacgtacgggctgccaaccttgaagccaaccctgaaaaattcctgccggcacctgccgtaccagaagaaaaaatcagctacgagttacccggcgcggttattgaagaatccacgcctgttaagcgcaagcaaatttctaaactcctgccgcaataa

SEQ ID NO: 181037 - DNA, 585 bp, Klebsiella oxytoca
atgaatcagtcagattttgccaggctccacggggtcagtcgtaaaactgtcacgatgtggaaaagcaggggatggctgatcatgtccggcgatgacatcgatgttagcgcctctaatgcccagcttgaaaaatacagaaaaacaattaaccgcacgggtaaagaaaacaaagtcgtccccatcaaaaagaattctatgccgtcaccctctcaagaggaggaggtggacgaggggggcgacccgtcactggaaagtattgccagggaattactcctggaaaacggtgctgagttatcactcgatgaagcgcgtcgcattaaagagaactacctggcgttactcacgaaattagagtttcagcaaaaagatggccagctcattgaaatgaccatagccgaggaggttcttttcaacgcctttcgccaacagcgtgacgcctggctcaactggccctcaagagccgcaccactaatggctgctgatcttggcgtgccggcggacaggatgacagaggtactgattgaacatgtccacaaacatatctcagtcctcggagaaccagaatttaacccagcagaagactga

SEQ ID NO: 181038 - DNA, 510 bp, Klebsiella oxytoca
atgatgaaaaaggttcgtttgattaatgcggcgttggctgctgttttacttacatcttttgctgcacacgctcaatggctcaccaaagtggatgacgacctgtttaccggtgggaaaaaagctttgatgattggtgacttatcatcatcaaactctggtctgatttttgactgcacgaaaaataaattatctgttgcgtatgtagaaactgacaaatcatctgattcagtccctgctatcgcaatggatttgattatcaaagtcgatggcaacccagctaataagcttgaagcgtcactatcacgccgaaatgcccaagccattgaagtaagtactgatgacgcagagaaaataactgcagtacttaagcagttacaaaacgccaagtctaaagttttggttggtatacagactcaagacggcggtaatcaatcctcgttctcgggcaatgcatccggttctaccgctgcgacaaatagctttataaaagcctgtgagatatctctgtag

SEQ ID NO: 181039 - DNA, 639 bp, Klebsiella oxytoca
atggcaactctgaaggatctttcccgccagttaaaacagttgcagaaacaaatacccttcgccactgctcaggctatgacaaccgtcgtgcgggaaattgccgcagcacaaaaagtcgcattgggtagaaagttggaatcgccgacgccgttcacggttaatgctgtgggctcatcgggggccagaaagaacaacctccgcgcgaaagtttatgtgcgtgatatcgcagctgagtatctggagccattcgagtttggcggcgaccataagctaaacagtcaggcgctgctcaacccgaagaacatcaaactaaacaagtacggcaacatgccgcgcaataagctttcgcagatgaaagcgaagccgaatgtgttcgtcggtgaggtgaatggcgtcgatgctgtctggcaacgccggaagccaaagaagtcgaagaagaaacgatcccggcgttctgcgaacggtacgcgccgaccaaagcggaaacagcgcgctcctaaactactggtgaggtttggtgatgcgttgcccgtaacgccagtactgggctacatggaccgctcaaaggctatggcgggagcattgataccgacagcactgaataaagcgattgctgaggctatcagaacagccaagtaa

SEQ ID NO: 181040 - DNA, 294 bp, Klebsiella oxytoca
atgcaaaaagaacaaaacggttgtgagattctgcctgtagcgaaagattttaaattctgcctgggtcagttggttaatctgcgcatcagcgatgagtttggggaggtgcaggcccgtgcacagtatctcaacggtgagaaccagtacctcatccattatcaggccgcagataaatgcgcgacagaacgctggttttcagagtcgcaactggtagcagtagaagatgatcgttcgccaaggatgccagtttttggctgtgttgagttgcctgaaggcgcggcggtcgaaggctaa

SEQ ID NO: 181041 - DNA, 324 bp, Klebsiella oxytoca
atgcaaaagagcagatcgcactggacgcatcgggagcctcggctgacatccggggtgctgttgcgaatgatgattgcgctaatcgctctgtgcctgctggcgcagttaagcggttgcagcaatacaaagacagtttacgtcaaagtgccgatggtgccgctgccggccagcctgacagctgagaccccacaaccggaaatccctgacaatctgacgtggggcgacagtctggatttgaacgtcagtctgctatcagcgctgggccagtgcaaccgggataaggctgatatcagggaagcagaaagaaaacgagcctcgcaatag

SEQ ID NO: 181042 - DNA, 207 bp, Klebsiella oxytoca
atgaaactcgttgatgactggaaaagcgcctggcgctggttctccatgcatgcactggtactggccggggtaatccctacggtctgggctgagctacctcctgacctgaaggcttcaatcccaccgggtacgatgggcggcattacagcggtgattgctgcctgtggcgttgtgggtcgtctggttagccagagtaagcagcaatga

SEQ ID NO: 181043 - DNA, 450 bp, Klebsiella oxytoca
atgcagataagcaataacggcattgctctgattaagcgattcgagggatgcgtgttgacggcatacccggatcccggtaccggcggtgacccgtggactattgggtttggctggacgggcaaggttgacgggaagcccattaagcccggcatgaagattgacgctgctacagctgatcgcctgctgcgcactggcgtggtgagtttcgatcaggcggtcagcaagatgctgaaagtttccgtgagccagaaccagtacgacgctctcgtgtctctggcctacaacataggcacccgggcgttatccacctcaacgctgatgaaaaagcttaacggcggagatgtgaaaggcgctgctgatgagttcctgcgttggaataaatctggcggtaaggtcatgcctggattaactaatcgccgcaaggcagagcgtgaggtatttctctcatga

SEQ ID NO: 181044 - DNA, 351 bp, Klebsiella oxytoca
atgaaaatgcacaacgatcctcattcctggccggatctgcttgagttgctgcagagctggtggcgcggagatacgccgctgggcgctgtgctgctttctgtattaatggcctgtttacgaatcgcctacggcggcggcggctggaaaaaaatagttcttgagggtccgctctgtggcgccctgacactgacgtttgtttccgggctggagtatctggactggccgcgctcgatggcaattctaattggcggtggcgttggctttatcggtgtggatgctatcagggcattcgcaatgaagtatctgggaaaccggtttggtgtgggagacggtaatgcagataagcaataa

SEQ ID NO: 181045 - DNA, 573 bp, Klebsiella oxytoca
atgaaacttttttcaccgctaagctatctgcgaataaaacatgaagaaaaaaaatggtatgactaccgaataccgatcgcaggtgcaacattagttgcatttgcttattatattcttcctaacaaaattccattgataggcggcagtggtcttttattacaggtaaatgggctgcttcaggtactgattgggttttacattgctgctcttgccgcagtatctacattttcaaatgcgacaatagatgaggtgatggctggagatcctcccacgttagtggaaagttatcgcgggcaaaaactacgcattgagcttacgcgcagaaggtttgtctgctatctttttggatacttagccttggtgagttttgtacaattctgcatcgggttggtatcaattttgattggcaagtcgttaggcgtatgggttgttgctgttagctccgtagacgcgtttcttttgttgaagactatttttttatggtgctattcagtcgtacttttcaacattataacgacaacccttttggggctttacttcttgtcagtcaggttccatcagtcatcactataa

SEQ ID NO: 181046 - DNA, 921 bp, Klebsiella oxytoca
gtgctttctaataacgaacgttgggtctcattttttgattttgcatttagaccgtcacacatagcggccccagatatcccagttacggataccttaaacagactgaaaaatctcgttgataacgggaatgctgttaaattgtataacggtgggaccagagctgttcgaatcagccagatgaactacgcagttggtgatcctcaggcgattttgcttctgcagctttgcgataaaaatggttcagacccggtttttggtgagttgactaccgggaacttgagggtggaacctaagttagcaggtgaggggattgcagtatctagccatatcgtcatttcaactagtgttgcagcaaatacggccgatcattttaaaaccctcgtagagtctgtcccgggcataagcaaatcaattatcgagccttttcttaatgcgatgctgagagaggcgtttcatggttgtgagtttagaaacccagcaaccaaagcaacctgccagcttcgtccaaaactggaaattctgtcacatggctctcagacacttcttgataccttgaagggcgctaaactgcataatgtcaaacttgtgagcactaagaagcaaggtgggatggataaaacaccgtacactgagttatctgagcgatcagtacgttacaaaataattaagcagcccccactgaaggacaagaagcgcctccttgagattttaagatggaaagggcagcaatctggttacagtaaggtttctattagctactcgaaagacgggcgtcaagctagtttagatcttgatcgtaatgaagacgcggcaaccaaactttttacgaaaagtgaacgagttatcctggggaatgccattcttcaatgtgagagtgcgattcacaatgagcttgaaacgaatatgattaagttgctttaa

SEQ ID NO: 181047 - DNA, 816 bp, Klebsiella oxytoca
atgaaattagaagcatcactcaaacacttcagccctcagggcatgcacatcagcgacgacgtgaaaagcacatcaccgaatcgccttaacggtacagacattatgaccgggatcggagtgaccagcagccgggcgcggttcgggctggctgcgtttttcggtaaggcgggcattagtaagtccgatgagcagatggcagttcaggcgctggcgcggtatgccatagattcagcaccaaagaacgtgcggaaggccgcaggtaagacgctggggcgctgctgcctgattctggcgcagtttgcctttgcagagtactcccgctcggcagcaacaacgggagcctgcagggtatgtaatggcaccggaaaggtgcagaacaccaccacagagcgcaaagtcacatacccgtggggcaaagcgccatactgggcgaaaaggtcccgcgctgtccgtccgtccgactgggagaagtggaccgaagtaaaagccatcgtcagcgctaaatgtgaagcctgtgacggcaaagggaggattaacgcccgctgtcgctgcggcggttccggccaagtgctggaccgtaaagcgacaaaagagcacggggcaccggtttataagacgtgcgagcgttgttccggcaatggcttttcaacgacgccatctacggctgcgtacaaagcgattcttacactcattccagatctgcacgtcagaacatggacccgtaactggaaaccgttctgtgatgcgctggtggacatctgctggcgtgaggagcggcgtgccgacaaagagtttcagcaggcgaccaatttttaa

SEQ ID NO: 181048 - DNA, 1356 bp, Klebsiella oxytoca
atgactcccgtgtggaaaaacgaagatctggaagaggcggtcattggcgcattattcctgcgtggtgccgaccctgaggtactggatgttcttttccggctgccggcgagcactttctcggttcgtcagtaccgggagattttcacaggcatctgccgtcaggcccgtggcggtggtgtgattgacccgctgctgctttgcgagtcgctgccggcgcttcagaccaccatcctggaagccactcgcgtcagctgggcgaaatcggcgctggtctcatacgttgacgtgctgcgtcgcaatgccggcgtgcgtgatgctgaatccgcgctggaaaaagcactggagcaaatcaggagcgccagcaacggcgatgctgcgttggccgcccttgaagctgcgaagctggctgtatcgtccatcgatatttcagcggataccgtccagcccgttcatatctctgaactgctcaccgcggtggccgatgaagcggaatcccggagccaggggaaagaagagacccggagcctgctcaccggcattgaggaacttgacgcgaagactggcggtattgaatccacagatctggtgtttattgctgcgcgcccatcgatgggtaaaaccgaactggcactggatatcatcgataaagtatctgctcaggggcatggcgtgctgtttttcagcatggagatgtccgatatccagatcgccaaacgcatggtatccgccgccggcggcatgtcgatgtcccgcctgaaagccgtggataaattcgaggacgaggactgggcgcggttctttaacggcatggaacgtatggccacccgcaatatctggatcaccgacgccacgggactcactatcgaccagatacagcaaaccgcgacgcgctaccagatagcgcatccggaaatcgcgctggtggtcatcgactatctggcgcttatcaaaattcagagtgctgcgcgttacgatctggccgtgggtgaggtatccaaggggctcaaaaacctggctaaagccaataaaacccccgtactcgcgctgagccagctgtcgcgtggagtggagtcccgacctaacaagcggcccatgaactcggatatgaagaactccggggagattgaggcagatgctgacctgatactgatgttgtaccgcgacgaggtgtacgacccggaatccaccgcaaaaggtatcgctgaaatcaacgtgacaaaacaacgcaacggcgaactgggcactatttaccgccggttttataacggccacttcttgccgattgaccaggaagaagcccgccagcgttcagcgccaaaaccaaaatcacaaccgcgtcgatatgcaaaatcctga

SEQ ID NO: 181049 - DNA, 879 bp, Klebsiella oxytoca
atgttaaatttgaatcagctcaaagagcgtgaagacctgagagcgcaacaggcaaagctcagcgatgaactggctttcgctgaagagcataaacttccctggggtttcgagggatggaagtcgaatcacaccagcacggtatcctgtccggagcatggagactacgaacagttcacgctggtgggcaaagattttcgcggcgtagagacttttaaacactcccgctgtccggcctgcatccgggcggagcaaggcagcgtcaaatccagcctgcgtaaacttcacgtgaccagcctgctggacgacgcgggtattactcgccgctttggtggctgcgagtttgaaaattatcttgagatcaaccctgaagcctcccgcaacctcgcagcctgcaggcgctatgccgacaactggccagccgttctggacgccgggaagagcttggtgctgacaggcagctgcggcacggggaagaatcatctggcggtctctctggcgaaaagcatcatccgcaaccatctcgccagcgtggaactgacggacgttatgcgtctgacccgcgccgtgaaaagcacctggcgccataatgccgaaacaaccgaagagagcgtactggatcactacgcttcgctggatctgctggttatcgatgaggtgggcgtgcagttcggaagcccggcagagatgaccattctgcatgaggtgattaacgcccgctatgaaagcgttctgccaaccatcctgatcagcaatctgccacctgagcagctgaaagagtttatcagcgaccgtatttttgaccgcgtgaccgacgggggacggaactacctggtattcaactgggccagttttcgcggcaatgacggggtgtgcgcatga

SEQ ID NO: 181050 - DNA, 930 bp, Klebsiella oxytoca
atgagcagtaaaattcttgggaacgtctgggatgcctgtgcggctcatgatgttaagggtgcgaagctgatgatcatggctcgccttgctgattattcgaacgatgatggcgttagctacccaagcgtagagaccatttgccgccagctgggcttaggggaaagtactgtgagaacggcgatctctgaactggagtccgctggctggctacttcgtgaatcccgtcgcaaggggaaccgcaatacttccaacttgtatcatctgaacgcagatcgactcgaagctctggcgcgtattgaacgcgacaaagtgacagccctaaaaaagcagcgttggtctgagacttattctcacccgtcagattctgaaccttcaaaatctgaaccgtcagaatctggaccttcaaacggttttcacccttcagattctggcaaaaatggcgttttgacccgtcagaatctgaccccagatccacaagtaaattcaaaacatgatccatcagtaaattcaaaacatgaatcacaagatactggcgcatcggctaaagcctctgcaccggctcgctctgcaaaacaggattattctcctgaattcgaaacagcctggcaggcctaccccaaacgcgctggtggcaattccaagtccggggctttcaaagcctggaaagctcgcctgaaagacggggttaagcctgaagacatgctggcgggtgttaagcgctatgcagcctacgccagagtcacgggcagcatcggtacacagttcgtcaagcaggccgctacgttcttcggacccgatcgccacttcgaagagtcctggcaagcgccgtccgctcccggaggtgggcacaacagcaccattgcccgcctgtctggtctgggacgtatgtccgatgattttggcgaatccggtgaaaacctgaatttttga

SEQ ID NO: 181051 - DNA, 264 bp, Klebsiella oxytoca
atgaacccgactgattttatccgtaagcacatcattgcagctttgactgctgaaggcttcgcgccatcggtggttcaggggggggtagcaaagggactggagcattaccgctgcatgtctcagtcaaccaaaaagggaagttgctttgcggattgcctttttcgggcccgtcagtgggctcttgggcagacaacagcagcagagcggaaagcggcaaagaaaaagccgggaaaaggtggtggcacttctcccggcctgttctga

SEQ ID NO: 181052 - DNA, 438 bp, Klebsiella oxytoca
atgtctaaatactcccgcctctgggaaaacatcagaattcacgtcagcaacattcgcaaaattgagaccggttacttcgtcaacagctatgaagatttgaaggccagtcacagaattgcgcagcttttcattctcgatgtgtttctccatcagcaccgggaaaagtacggtgctgggttgtttcctctgaggggtaaaaatgcgcttcaccatgcgatccttctcaagtacaagtggcctctggattacatccgtaatttgtcgctaagtgatgccctgcttacccttcaggacgaactcacccctgagaatctccccgaagctgcacagaaatttctgtctggtgtactagagagggcgtctcagattgcgtttgatgacctccttgacgatgagtggaatcctgagttgggcgaactattccttcgtgagcagtag

SEQ ID NO: 181053 - DNA, 309 bp, Klebsiella oxytoca
atgaacagcaaaccttacatcttcgcgggaaccctgaccgattccgagcttatcaagtggctcgaagagcgcgtccttgcgctcaaatcccttgagtggaaccggcgggatgtcgctgaacttaaaaaacacctgctcaacgctgagagccagaaccacccgcttacagctactgctcacgaaggaatagttcgcccaactcaggattccactcatcgtcaaggaggtcatcaaacgcaatctgagacgccctctctagtacaccagacagaaatttctgtgcagcttcggggagattctcaggggtga

SEQ ID NO: 181054 - DNA, 702 bp, Klebsiella oxytoca
atgagttcattagcagaccggttgatcagccgacgcgaattgttaggattcacgcaagaggctcttgccaaaaaagcaggtgtcacgagggtggctatcagcaaagcagagcttggattaacaaaaaactttaacagcaatactctttttaaggtctcgtccgcacttggatgtgagcctgagtggctgcagacaggaaaaggtacacaggaaaaactaccacaaacccaaccgcaacagaaacctatcagtgatacagcttgggttaataatgtagctgagaccgtacagccgcagcgcagatacagctacccgaagttaaattgggttcaagctggtcattttgcgcaatgtggtgataattataatatgtatgatattgaaaactggattgattctgtaaagtacgctggcgaaagaggtttttggcttgaggtaaaaggcgactccatgacttcgcatacaggggtaacctttcctgaaggtatgtccatactgatcgatccagaaaaagagccttactcaaactgctacgttatcgcgcaaaagagaagtagcaaggatatcacctttaaaaagtatgtgacagatatgggggctggtttcctgaaacccctcaaccctcaataccccatgattcccttagatgatgaatgcgagattatcggcgttgttgttgatgccagatgggacatattttaa

SEQ ID NO: 181055 - DNA, 219 bp, Klebsiella oxytoca
atggtgaatattatgaagataataaccgatgccgaaaaaattaatttctgttcaggcgaattaaccaagcttggtcatttactatcagtgctgaaccaggctgtaaatgataacaattgtgaaaatgatgatattgaagggtgtctaggtatcgcttgggacttggtgaaatcaatgcaatctaccattaaaagcaataatccggagatcgcaaaatga

SEQ ID NO: 181056 - DNA, 192 bp, Klebsiella oxytoca
atgaagaccttcaagggcctttcgctacagccagtagatgcccttcaaaatatcgcagcaatgaatgaggttggtttgctgttggtgtccgctaatgatggcgaagatatcgaacttggggatgcggttattgcattcgctcgtgactacgcgaaagccgctcacgatttcgctctggagaatcagaaatga

SEQ ID NO: 181057 - DNA, 189 bp, Klebsiella oxytoca
atgaaagaattcgaagatttaccccttgatgctgattgtgtactcaataacatttcacatcttataggtgctgctcgcgtacttgatggtacctctacatatagagaacttggcataaacataattgagtttgttgatatgtatgttgctgccgctatcgaagaaatgaaagcacggagggaaaaatga

SEQ ID NO: 181058 - DNA, 210 bp, Klebsiella oxytoca
atgaaaactccaaaacagatgcttgaagaaatcgcaggcgaaatgatggatgcggaaattcttttggaggtgctttatacaaatacagataatagcgccgagacagatgcgggtattagttgcattgtacgctcattattaaacacaaacgaaaaagctcaagggtatattgaaaggttaagtgccccccccccagcaggaaaaggatga

SEQ ID NO: 181059 - DNA, 339 bp, Klebsiella oxytoca
atgtcatatttagcgaccttttctaatattattcactgtggagccagtcataacgcaaagttcattgagcaggctggtaaagcgaccagcgacacgcttgtctgttttggttatcgcagcaaagagcaatgtattgaactcatccctaagttgattagcgtacgcatctgcgtgctgtgctgttctgagcgctccactcgattcaatgactacatggaattcaccacgcattactatttcacgatcactgttattgcggggtttaatattcatcacgcttacctcaaggtgagtttaaccacagcgattaagccgtcatttaattcaatgtttgattaa

SEQ ID NO: 181060 - DNA, 210 bp, Klebsiella oxytoca
atgtggaacccggcaaccagcacaagtattgaagaagttgtaactgaggctaataaccttaatgagttattggatttgatgcatctttgctttaaaagaatgaaccctcctcagaccgaagcattgctggggttggcgctaaatatcgcatcaaatatttctatctggatagaggctgaggaaaagcgccgtgaaaacaaatctgattaa

SEQ ID NO: 181061 - DNA, 348 bp, Klebsiella oxytoca
gtgaaaacaaatctgattaaaactcgccgccgtcacctcgtccgggcaaagctggattcaatgatgcgtagaaccgggagttatttccagatagtcaaacttgaagatggcacgaaattacctgtagagcttgatgacgacattttaacaaaagcactaatcaagctgtttgaagcaatgatttatgacaaccacaagcgcgagcaagcggagcatttaattgctgagcattattcgaattgcatgggcgttaataagttaacaccagatggtgtggactttatgaatgcgcttattgcaacgctggctgagcagtcattaaaagcggagaaattaactaatggctaa

SEQ ID NO: 181062 - DNA, 165 bp, Klebsiella oxytoca
atgacgattgaaaacggccaggtaattgatacccgcaaagttcgcgataacgaactgattgccagcatggatacgttcttctggatggcaaagaaagccgggtatcaggtgatcgcccctaatcaggaggaaaccagtggcactaacagcaatacgcattcctga

SEQ ID NO: 181063 - DNA, 222 bp, Klebsiella oxytoca
gtggcactaacagcaatacgcattcctgagcgggtacacctgcaggcgttgcaggtcctgctgcggtatcggcggaagcgcatttacgcacggcgcatgcaccgcaccggctacctcggcctgaaggttaacccacgctggcggctgttatcaaaagacgacggccggaactgggtagtgatgagccattccacgtacaaccgggagatggaaagcaaatga

SEQ ID NO: 181064 - DNA, 414 bp, Klebsiella oxytoca
atgatcgacaaccgcaccgccagcgcaattgacctggcattacagaaacaccacacgccagtcggcgacctgtacgctgcgatccgtcacggccgcatgaagcgctgttttagccgcggtaccgccatcagctggctggcccactttctgacatcgcatgccttcgccttgtccgggtttaagcaacgccaccctgattaccttgtggagcatgaaggaaacgaaatgtggcgccgtggcgaaactaccgacgaataccaccgcgcccaccgccgtactgttcgccggctgcgtcgaatcctcgcccgcaagcgcgaaatgcagaagtggtgcgaaaaatgggatgccatgcacgaccgctacgtgaaagagcgtgaagaactcagagccagcaaaccagaaggggttcgctga

SEQ ID NO: 181065 - DNA, 846 bp, Klebsiella oxytoca
atgatgaaaaaccaacttatgacctttagctctgaagaactgaacttttcgatgagcggaattctttacgagggaaaaccagcctttgacgcagttgaattggctaagcaacttggatatgcaaacccagccgacgcgctggcaaaacactgcaagtctctgattaagcttaattatagcaaatcacgagaattgggttttggcgaaaaaccgcgcggcactcagttggctggtcaggctgatctgttccgtcttatcctgcgcagccagctcccatctgccgaacgtgttcaggattgggtatgcgaagacgtactgccatcaatcatgactactggttcctattcccgccagtcagcacaggaaaccagtacgtatcccgacatgctctcgctggcccacgtcgtagccgaagcgacggcatcagcaacgatgaaagccgtgatggaaacagtaaattctgccgtagttttgcctcgacagctcgaacactctgatcgagaagatgttttcggtgacacctttaaaactacgcacgcacaaaaggaacagccaaatattgaagaaccggaatacgtacctgtccataaagtttcctgggctaccggattatctgatccaacatgccgccggctggttaccttctccgaccttccgaattgcttcatcgatggcattcgcgggctttgcgtgcatcgcgaatttttcatggctgcggtcgaggtcctgattaaggaatccacgccaccagccaaaggccgtaagcgctggcatcatccggagttcggcgggtttgagctgcgcaaggatcctaaggagatcgctgggggcaaccactgtgaatag

SEQ ID NO: 181066 - DNA, 480 bp, Klebsiella oxytoca
ttgagctgcgcaaggatcctaaggagatcgctgggggcaaccactgtgaatagcgatatctggatgccggccggttcagtcgaagaggcccaccagcgggccttaacgtgggtttgtgatgcgtacctgttctatctggttagcctgcaccgtcgcccggtgtaccgccaccagtatggcgatatttcacttaaccagccggcactacaggggttcattgactcctaccttgcggataaggggtggagcactgaacggcgccatgcgcattacatcaacattctggacctcattaaatatatgcatcgcagcaattcggaatttatagactggggaacagtgccggtgctgactcctcgtgggatccgctggatgaacgcctgcctttcacgcttgggcgaaatggtgaacagctatggcgggtggaaaggatatatcgcagcagttgaggaggcccaaaacgatgaaagtcagctttaa

SEQ ID NO: 181067 - DNA, 225 bp, Klebsiella oxytoca
atgaaagtcagctttaaagattacggcgccgtggccgcggtgactattaccagcaccatttttgagttccgcaagcataaccgggtagttgatgccgtcctgctctgcactccgggcgtggtcagcgaacgccacggcagcttcttcatgaagacgcacatttcaggcaaaacgcgggatgtactgcgggcctataaaaccgcacagcgggaggaaaaacgatga

SEQ ID NO: 181068 - DNA, 231 bp, Klebsiella oxytoca
atgatgttgatgcaaaaggttctgcgcagtgtaggaaccggcaccttcactccccgctggctaaaggtgttctgcttttacctgtgcatgcgccaggtatcggcaggactcagaaggtttacggccggcattgaccccgagctaatcactccggctcagcgtgcagaggttgaggcactggtaaagaaatttaacgaagcgcgtggcgtgaatagggaaaaagcagaatga

SEQ ID NO: 181069 - DNA, 810 bp, Klebsiella oxytoca
atgagcaaaattgaaaaccctgtggtgctgatccacaaacgcgacaacaacgactcctacgcggtggccatcaccagcggtagccagaattaccacgatgccgtgcttatggcgtcgatggagccggatatggtcggcgatgacgtcgatacctggagcaaaaccggctactacatggcggcggagatcgaacagctacgcgaaaaactgaaacgggcggaagaaaaacatcttcacttactgggcgttgttgatgattacgactggcaacgccagcggctgcatgcggcagcagaaaaaattatcaggtggaatcgacaggaagcagcagaccggacgggtaatgctgaggatgcagaaagctacgcctgcgttcgtgagttgcgcgacgcactcgccttttgcgacagcaaggactctccccatgcaagcatccgagcgtcgcaggaataccctgaaacgctcccctgccccgtcgttcttgaacccggcttccggtttggcaaaggcgttagcactcacctggttctgcgagcactcaagaaccgcgctgaacgttacgcggagttggatgctatgggtccagaggcccgcgtagaacatgatgccgctatcgctgaactccgggagaagctgggctttggtgcgccggccaaaacagccgtgcagattaagctgccggggttgccgaaactcggttctgacgctgaatggtatcaggggttttctgctggcgcaggaagcatgcgtgaagcatgtgcggctgcgctgatttctgcaggtgttgagattattggggaggaaaagtga

SEQ ID NO: 181070 - DNA, 147 bp, Klebsiella oxytoca
atgaacagagaatttgagatctggatgcggctgcgctacggcggccggtatgacctgacgcgagacggtcacggctactattgccgggaagtggttaagcggatgtatgagacgtggtgccactgtcgtggcctgaaagtggtgtga

SEQ ID NO: 181071 - DNA, 213 bp, Klebsiella oxytoca
atgatttatctggatgttgtgccgattacaaagtactgcgaagagatgggcgagacgctggatgccgttaacaaacggttacaacgcggagtgtggcaggaaggggttcatgttttaaaagtcgatggttccaaagaacgttggatcgacttaaaggagattgcaaattgggcaagacaaaacaaggatcactatctctcccaagaggggtga

SEQ ID NO: 181072 - DNA, 1215 bp, Klebsiella oxytoca
ttgggcaagacaaaacaaggatcactatctctcccaagaggggtgacaatccgtcagcataaaaccggcgccacgctggtcatcactttcacgtacaaaggggttctctgtcgggagcccctctcccggatggaagccaacgcgcgcggtattaaatatgccgagcgcctgctgggggagatacagaaccagatcagcagcggcgagttcgattattcaaaatattttccaaactccaaaaagttggagctatttggggtcgtgagaaaaaccaaaaatataaaagcgtatctcgatgaatatctgaaaatctgtgagaaccggaatctgtcaccatccacgatcaacggctatgagaagtgcctttctgcactatcggcgctacacaagttgcacgtggctgaactgacagctgcagtactgaagagctggatcgccagcagaaaaaccaggctaaagaccatcagaaataacctgtcatttttgcgcagcgctatcgatgaggcggtgaccgatggcctgctgtccattaacccggtgacactggtcagcgccagtaggtaccacgtcattgatagtgctccaaagaccgatgattacgaggtagacccgttttcacctgcagaaaccagtgttatttatgcccactgcagatacccggaatgggaaaatatcttccgctttgcattcaataccgggttgcgtagttcggagttgtgcgcactgcgctgggctgatattgattttgtcggcagcacggcgcatatccagtctgccagcgtggtgggggtgattaaggggacaaagactaaagccggtacccgcaaagttgaactaaacagcgaagcgctgctggccctgcaggagcagaagcaatacacctttgtcaaaagtgagttcatattcagcgatccgaagacgggagagccctgggctaacgccgatgcaatccgtaaaaaggcctgggtgcctacgcttaaaaaagccggtgtgcgctaccgcaacccctaccagacgcgccatacattcgccacacgccatatcagccagggcgtaaaccttttctggttggcggggcagatgggccataaagggccggaaatgttattccgccactacggatcttacctcgcggaatatgacggcaatactgccgttcagcagccagatagcggggtaaatattgcaaaatgttatacagaatcaggacgttag
